United States Patent Application Publication US 2011/0183924 A1 - sequence listing, part 77

SEQ ID NO: 277737 - DNA, 6290 bp, Homo sapiens
tgtaacttgcaggttaagtggagctagagagctacattgtaacctagttggatttttttggggggggaatgtatcagaatctaacgtgtcgttaatagaaagaagaacaggcaagaagtggtccagccggcgaagttgcagatctgatctcttctgaacacctcatcgtgtctccatccctgggaatctgaccctagcaactggaccactttgttcttggaattttgggtggcaggagatggtttggaagagcaggaattttctatcaaggaggcaaacttcacagagggaagtctgaagctaaagattcagaccacaaagcgggctaagaaacccccaaagaatttggagaactatatatgtccacctgagatcaagatcaccatcaagcagtctggggaccagaaggtgtcccgtgctggaaaaaatagcaaagccacgaaggaggaagaaagaagccactccaaaaagaagctcctcacagccagtgaccttgcagccagtgacctcaaaggatttcagccacaggcttacgaaaggccccagaaacattcaactctccattatgacacgggcctcccacaggacttcaccggtgacaccttaaaaccaaagcaccagcaaaaaagcagcagccagaaccacatggactggtccaccaactctgacagcggacccgtcactcagaattgcttcatcagtccagagtctggcagagaaactgcaagcaccagcaagatccccgctcttgagcccgtggcttcctttgcaaaggcccagggtaagaaaggcagtgcagggaacacgtggagtcagttgtctaacaataacaaagatctgctcttgggaggtgtggctccatccccaagcagccacagctcaccagccccacccagcagctctgctgagtgcaacgggcttcagcccttggtggatcaagatggaggaggtacaaaggagcccccagaaccacctacggtgggcagcaagaaaaagtccagtaaaaaagatgtgataagtcagaccataccaaacccagacctggattgggtcaagaatgcccagaaagcatttgacaatacagaagggaaaagggaaggttattccgcagatagtgcccaagaggcatcaccagccaggcagaacgtgagttctgccagtaatcctgaaaatgactcaagtcatgtccggattactatccccatcaaggcaccctctctggatccaaccaaccataagaggaaaaaaagacagtccattaaagcggtggtggaaaagatcatgccagagaaagccttggcttctggaatcaccatgagcagtgaagtagttaacaggatactttccaactctgaggggaataagaaggatccccgtgtccctaagttgagtaaaatgatagagaatgagtccccctcagttggccttgaaactggtggaaatgctgagaaagttatcccaggaggtgtgtctaagccgcggaagccacccatggtcatgacacctccaacgtgcacagatcactctccatccagaaagctgccagaaatccagcatccaaaatttgctgcaaaacgaaggtggacttgcagcaaaccaaaacctagcaccatgcttcgagaggcagttatggccacctctgataaactgatgctggagcccccgtctgcatatcccatcaccccatccagccctctctacaccaacacagacagtcttactgtgatcactccagtcaaaaagaagcggggacgaccaaagaagcagcctttgctcacagtcgagacgattcatgagggaacttccaccagccccgtcagtcccatcagccgagagtttcctggcactaagaaaagaaagcgacgacgcaatttagcgaagttggcccagctagtgccgggagaggacaaacccatgagcgagatgaaatttcacaagaaagttggaaagctcggcgtgttggataagaagaccatcaaaactatcaataagatgaagacactcaagaggaaaaacatcttgaatcagatcttgtcctgttccagcagcgttgctctgaaggcaaaagctcccccagagaccagccctggggcagcagccattgaaagcaaactgggcaagcagattaatgtcagcaagaggggaaccatctacattggcaagaagcggggcaggaagccaagagcagagctgccacccccatccgaagaacccaaaacagccatcaagcaccccaggcctgtttctagccagccggatgttccagccgtgccttccaactttcagtcacttgtggcgtcttcaccagcagctatgcacccactttcaacacagttaggtgggtccaatggcaacctgagccctgccagcactgaaaccaatttttcagagttgaaaactatgccaaatctccagcccatcagtgctcttccaaccaaaacccaaaagggaatacacagtggaacctggaagctgtctccacccagactgatggccaactccccttcacacctgtgcgagattggctccctaaaggaaatcacgctgtcccctgtgagcgagtcccacagtgaggagacgatccccagcgacagcggcattgggacagacaacaacagcacttctgaccaagcggagaagagctcagaatcccgaaggaggtactcttttgatttctgctccctggacaacccggaggccattccgtccgacaccagcacaaagaaccggcatggccaccggcaaaagcatctcattgtggacaactttctggcccacgaaagcctcaagaagccaaagcacaagaggaaacggaaaagcctgcaaaaccgcgatgacctccagtttctggcagacctggaggagctaatcaccaagttccaagtgttcagaatctcccaccggagttacaccttctaccacgagaatccatatcccagcatttttcggattaattttgatcactattacccggtgccatatatccagtatgacccgttgctctatcttcgtaggacttcagacttgaagtcaaagaagaagcgtggtaggcctgcaaaaaccaatgacaccatgacaaaggtgccttttttacaagggttcagctaccctattcccagtggaagttactatgcaccctatggaatgccttacacatcaatgcctatgatgaaccttggttattacggtcagtacccagctcctttgtacctatcgcacacgcttggagcagcttccccattcatgaggccaacagtgccaccacctcagttccacacaaactcccacataaagatgtccggtgcagctaagcataaagccaagcatggagtacacctgcagggacctgttagcatgggccttggtgacatgcagccttctctgaaccctcccaaggtaggcagtgccagtctgtccagtggtcggctccataagaggaaacacaaacacaagcataagcacaaggaagaccggatcctagggacccatgacaacctgagtggtctttttgcaggcaaagccacaggcttctccagccacatcctgagcgagcggctgagtagcgcagacaaagagctcccgctggtgagtgagaagaacaagcataaggagaaacagaagcaccagcacagcgaagccggccacaaagcttctaagaacaactttgaggtggacaccctgtctacactgtcactttccgacgcccagcattggacacaggccaaggaaaaaggagacttgagcagtgagcctgtggactcatgcacgaaaagatactctggcagtggcggggatggtggcagcacgagatcggagaacctggacgtgttcagtgaaatgaacccttcgaatgacaagtgggacagtgacgtgagtgggagtaaaaggaggagctatgaaggctttggaacgtacagggaaaaggacatccaagccttcaagatgaaccgcaaggagagaagttcttatgactcctccatgtctccagggatgccaagtccccacttaaaagtggaccagacagcagtgcatagtaagaacgaaggctcagtgcccaccatgatgaccaggaagaagccagccgcagttgacagtgttacaattccaccagccccagtgttatctctccttgctgcatctgcagcaacgtcggatgcagtcggctcctccctgaagaagaggttcaagcggcgggagatcgaagccatccagtgcgaagtgcggaagatgtgcaactacaccaagatcctgtccaccaagaagaacctggaccacgtgaacaagatcctgaaggccaagcggctgcagagacaatcaaaaacaggcaacaacttcgtgaagaagaggcgcgggcgtcccaggaagcagcccacccagttcgatgaggactccagagaccaaatgccggtgctggaaaaatgcatcgacctgcccagcaaaagaggccagaagcccagcctgagcccgctggtgctggagcccgccgccagccaagacaccatcatggccaccatcgaggcggtcatccacatggcccgggaggcgccgcccctgcccccgccaccgccgccgcccctgccgccaccgccgccaccacccctgcccccgccaccccctctacccaagaccccccgaggcggaaagaggaaacacaaaccgcaggcccccgctcagcccccacagcagtcgcccccgcagcagccccttccccaggaagaggaggtgaaagccaaaaggcagaggaagtcccgagggagtgagagcgaggtccttccctagggcgggtctgggcgtctgcacctggggcctagggaactgacacgtgggaagcgcagtgagccggggcgggggcggaatcccccgctgcagggacacccacgcccttctctccagaagccgggcaggcagaatccggccagacgacggggctgagccatcaggagctcttgggaaagcaaagcagggagacaccttcagaagaagcttgtctgagcttcaccgcagctcccaccacgcggcgcttcagtacggctggatcctccgcaggcgagcggaaggcccccaggaggagcaggctggtggcactctcctgacctcacgctgccaaggtgcgccctcgactcccgatttcatttgctggccaggaaaatcgaaagggaaacaccctcaattaggaaacattccaaggggagaaaagctgcaaattgctcaactggcattgctgtaacccgttccatttaattggtttttatttcttttgattttcaagctctgctaagctttggggtaccaacgtcatcttcaggtgacctgaatctttcccttaaccgtacagtttctcgatggaattgtgtgatcagaaggtggaattctagtgataggcgacctcagacccgcattcatgttctgtgtgcctcttctattgcacatacactgatttttagcattgtctattcctatttttcctttgcccattgtacttccatatatcttttcattaacttacttgctgccttttttttttcttggtacacatttaaataaagtaatccttaacctgtgctgtaaagttcacccttggcatgctgttccaagaacctgggtttgaatcccaatcgttgtgaaacatactcagtattgataaaacctttttaataagtgatgcagagcagccaaggatatgttgacccagatgtcaaccaggctatttttatacttaaaacatgtcagcagagcataggcagaataaaatggtttaaataccccacagcaaatagagtaactgacaaaccaccaaaaactgaaaccccagacccaccagaaagacaagtgtctagcaatgccttggtacctgatctttttcattcaaataattgtcataggttgttcaaaaaaaaaaaaaaaaaggaaacaaaaacacaatagaagtccattatcccttgataattatttcttaaaagcaaatgggagtaagtgttcttatctggaaaaataaataaataaaatgctcaaagggtatcaccacttcaattttatcaagccaccttggacaaagtatccaaattgtggttgccttaataaactaaaacattattgtacataatgtaattataaatctatcagtctgcatggatgcaaactgtgtgtgacaaatcgtcttttaaatggtcaatttcagctgtacatttctcatccaagttgtactctagccattggtttagcgtggacagatactccatctctattatccatttccacagcccaaataaaatatgttaagcaggctcaaa

SEQ ID NO: 277738 - DNA, 5134 bp, Homo sapiens
ctggcttcctgctctgccatcctggtctgcttcctgcttctatccccatcaaggcaccctctctggatccaaccaaccataagaggaaaaaaagacagtccattaaagcggtggtggaaaagatcatgccagagaaagccttggcttctggaatcaccatgagcagtgaagtagttaacaggatactttccaactctgaggggaataagaaggatccccgtgtccctaagttgagtaaaatgatagagaatgagtccccctcagttggccttgaaactggtggaaatgctgagaaagttatcccaggaggtgtgtctaagccgcggaagccacccatggtcatgacacctccaacgtgcacagatcactctccatccagaaagctgccagaaatccagcatccaaaatttgctgcaaaacgaaggtggacttgcagcaaaccaaaacctagcaccatgcttcgagaggcagttatggccacctctgataaactgatgctggagcccccgtctgcatatcccatcaccccatccagccctctctacaccaacacagacagtcttactgtgatcactccagtcaaaaagaagcggggacgaccaaagaagcagcctttgctcacagtcgagacgattcatgagggaacttccaccagccccgtcagtcccatcagccgagagtttcctggcactaagaaaagaaagcgacgacgcaatttagcgaagttggcccagctagtgccgggagaggacaaacccatgagcgagatgaaatttcacaagaaagttggaaagctcggcgtgttggataagaagaccatcaaaactatcaataagatgaagacactcaagaggaaaaacatcttgaatcagatcttgtcctgttccagcagcgttgctctgaaggcaaaagctcccccagagaccagccctggggcagcagccattgaaagcaaactgggcaagcagattaatgtcagcaagaggggaaccatctacattggcaagaagcggggcaggaagccaagagcagagctgccacccccatccgaagaacccaaaacagccatcaagcaccccaggcctgtttctagccagccggatgttccagccgtgccttccaactttcagtcacttgtggcgtcttcaccagcagctatgcacccactttcaacacagttaggtgggtccaatggcaacctgagccctgccagcactgaaaccaatttttcagagttgaaaactatgccaaatctccagcccatcagtgctcttccaaccaaaacccaaaagggaatacacagtggaacctggaagctgtctccacccagactgatggccaactccccttcacacctgtgcgagattggctccctaaaggaaatcacgctgtcccctgtgagcgagtcccacagtgaggagacgatccccagcgacagcggcattgggacagacaacaacagcacttctgaccaagcggagaagagctcagaatcccgaaggaggtactcttttgatttctgctccctggacaacccggaggccattccgtccgacaccagcacaaagaaccggcatggccaccggcaaaagcatctcattgtggacaactttctggcccacgaaagcctcaagaagccaaagcacaagaggaaacggaaaagcctgcaaaaccgcgatgacctccagtttctggcagacctggaggagctaatcaccaagttccaagtgttcagaatctcccaccggagttacaccttctaccacgagaatccatatcccagcatttttcggattaattttgatcactattacccggtgccatatatccagtatgacccgttgctctatcttcgtaggacttcagacttgaagtcaaagaagaagcgtggtaggcctgcaaaaaccaatgacaccatgacaaaggtgccttttttacaagggttcagctaccctattcccagtggaagttactatgcaccctatggaatgccttacacatcaatgcctatgatgaaccttggttattacggtcagtacccagctcctttgtacctatcgcacacgcttggagcagcttccccattcatgaggccaacagtgccaccacctcagttccacacaaactcccacataaagatgtccggtgcagctaagcataaagccaagcatggagtacacctgcagggacctgttagcatgggccttggtgacatgcagccttctctgaaccctcccaaggtaggcagtgccagtctgtccagtggtcggctccataagaggaaacacaaacacaagcataagcacaaggaagaccggatcctagggacccatgacaacctgagtggtctttttgcaggcaaagccacaggcttctccagccacatcctgagcgagcggctgagtagcgcagacaaagagctcccgctggtgagtgagaagaacaagcataaggagaaacagaagcaccagcacagcgaagccggccacaaagcttctaagaacaactttgaggtggacaccctgtctacactgtcactttccgacgcccagcattggacacaggccaaggaaaaaggagacttgagcagtgagcctgtggactcatgcacgaaaagatactctggcagtggcggggatggtggcagcacgagatcggagaacctggacgtgttcagtgaaatgaacccttcgaatgacaagtgggacagtgacgtgagtgggagtaaaaggaggagctatgaaggctttggaacgtacagggaaaaggacatccaagccttcaagatgaaccgcaaggagagaagttcttatgactcctccatgtctccagggatgccaagtccccacttaaaagtggaccagacagcagtgcatagtaagaacgaaggctcagtgcccaccatgatgaccaggaagaagccagccgcagttgacagtgttacaattccaccagccccagtgttatctctccttgctgcatctgcagcaacgtcggatgcagtcggctcctccctgaagaagaggttcaagcggcgggagatcgaagccatccagtgcgaagtgcggaagatgtgcaactacaccaagatcctgtccaccaagaagaacctggaccacgtgaacaagatcctgaaggccaagcggctgcagagacaatcaaaaacaggcaacaacttcgtgaagaagaggcgcgggcgtcccaggaagcagcccacccagttcgatgaggactccagagaccaaatgccggtgctggaaaaatgcatcgacctgcccagcaaaagaggccagaagcccagcctgagcccgctggtgctggagcccgccgccagccaagacaccatcatggccaccatcgaggcggtcatccacatggcccgggaggcgccgcccctgcccccgccaccgccgccgcccctgccgccaccgccgccaccacccctgcccccgccaccccctctacccaagaccccccgaggcggaaagaggaaacacaaaccgcaggcccccgctcagcccccacagcagtcgcccccgcagcagccccttccccaggaagaggaggtgaaagccaaaaggcagaggaagtcccgagggagtgagagcgaggtccttccctagggcgggtctgggcgtctgcacctggggcctagggaactgacacgtgggaagcgcagtgagccggggcgggggcggaatcccccgctgcagggacacccacgcccttctctccagaagccgggcaggcagaatccggccagacgacggggctgagccatcaggagctcttgggaaagcaaagcagggagacaccttcagaagaagcttgtctgagcttcaccgcagctcccaccacgcggcgcttcagtacggctggatcctccgcaggcgagcggaaggcccccaggaggagcaggctggtggcactctcctgacctcacgctgccaaggtgcgccctcgactcccgatttcatttgctggccaggaaaatcgaaagggaaacaccctcaattaggaaacattccaaggggagaaaagctgcaaattgctcaactggcattgctgtaacccgttccatttaattggtttttatttcttttgattttcaagctctgctaagctttggggtaccaacgtcatcttcaggtgacctgaatctttcccttaaccgtacagtttctcgatggaattgtgtgatcagaaggtggaattctagtgataggcgacctcagacccgcattcatgttctgtgtgcctcttctattgcacatacactgatttttagcattgtctattcctatttttcctttgcccattgtacttccatatatcttttcattaacttacttgctgccttttttttttcttggtacacatttaaataaagtaatccttaacctgtgctgtaaagttcacccttggcatgctgttccaagaacctgggtttgaatcccaatcgttgtgaaacatactcagtattgataaaacctttttaataagtgatgcagagcagccaaggatatgttgacccagatgtcaaccaggctatttttatacttaaaacatgtcagcagagcataggcagaataaaatggtttaaataccccacagcaaatagagtaactgacaaaccaccaaaaactgaaaccccagacccaccagaaagacaagtgtctagcaatgccttggtacctgatctttttcattcaaataattgtcataggttgttcaaaaaaaaaaaaaaaaaggaaacaaaaacacaatagaagtccattatcccttgataattatttcttaaaagcaaatgggagtaagtgttcttatctggaaaaataaataaataaaatgctcaaagggtatcaccacttcaattttatcaagccaccttggacaaagtatccaaattgtggttgccttaataaactaaaacattattgtacataatgtaattataaatctatcagtctgcatggatgcaaactgtgtgtgacaaatcgtcttttaaatggtcaatttcagctgtacatttctcatccaagttgtactctagccattggtttagcgtggacagatactccatctctattatccatttccacagcccaaataaaatatgttaagcaggctcaaa

SEQ ID NO: 277739 - DNA, 6554 bp, Homo sapiens
agctaggactgggagagataggagaagtaggactgctgtgattaggacggatcagacgaagaggggcgtttggtattgggttgcagatctgatctcttctgaacacctcatcgtgtctccatccctgggaatctgaccctagcaactggaccactttgttcttggaattttgggtgtcctcttttctcacctttcccttttcccttttccccttccccctcctgagaactccggaagactgtagagattgtcatggagtccagggaaaccttaagcagctcccggcaaagagggggcgagtcagacttcctgccggtctcctcagccaagcccccagctgctcctggctgtgcaggagaacctttgctctccactccaggacctgggaaggggatcccggtgggcggagagcgcatggagccagaggaggaggatgaactaggctcagggcgggatgtggattccaactccaacgcggacagtgagaaatgggtggcaggagatggtttggaagagcaggaattttctatcaaggaggcaaacttcacagagggaagtctgaagctaaagattcagaccacaaagcgggctaagaaacccccaaagaatttggagaactatatatgtccacctgagatcaagatcaccatcaagcagtctggggaccagaaggtgtcccgtgctggaaaaaatagcaaagccacgaaggaggaagaaagaagccactccaaaaagaagctcctcacagccagtgaccttgcagccagtgacctcaaaggatttcagccacaggcttacgaaaggccccagaaacattcaactctccattatgacacgggcctcccacaggacttcaccggtgacaccttaaaaccaaagcaccagcaaaaaagcagcagccagaaccacatggactggtccaccaactctgacagcggacccgtcactcagaattgcttcatcagtccagagtctggcagagaaactgcaagcaccagcaagatccccgctcttgagcccgtggcttcctttgcaaaggcccagggtaagaaaggcagtgcagggaacacgtggagtcagttgtctaacaataacaaagatctgctcttgggaggtgtggctccatccccaagcagccacagctcaccagccccacccagcagctctgctgagtgcaacgggcttcagcccttggtggatcaagatggaggaggtacaaaggagcccccagaaccacctacggtgggcagcaagaaaaagtccagtaaaaaagatgtgataagtcagaccataccaaacccagacctggattgggtcaagaatgcccagaaagcatttgacaatacagaagggaaaagggaaggttattccgcagatagtgcccaagaggcatcaccagccaggcagaacgtgagttctgccagtaatcctgaaaatgactcaagtcatgtccggattactatccccatcaaggcaccctctctggatccaaccaaccataagaggaaaaaaagacagtccattaaagcggtggtggaaaagatcatgccagagaaagccttggcttctggaatcaccatgagcagtgaagtagttaacaggatactttccaactctgaggggaataagaaggatccccgtgtccctaagttgagtaaaatgatagagaatgagtccccctcagttggccttgaaactggtggaaatgctgagaaagttatcccaggaggtgtgtctaagccgcggaagccacccatggtcatgacacctccaacgtgcacagatcactctccatccagaaagctgccagaaatccagcatccaaaatttgctgcaaaacgaaggtggacttgcagcaaaccaaaacctagcaccatgcttcgagaggcagttatggccacctctgataaactgatgctggagcccccgtctgcatatcccatcaccccatccagccctctctacaccaacacagacagtcttactgtgatcactccagtcaaaaagaagcggggacgaccaaagaagcagcctttgctcacagtcgagacgattcatgagggaacttccaccagccccgtcagtcccatcagccgagagtttcctggcactaagaaaagaaagcgacgacgcaatttagcgaagttggcccagctagtgccgggagaggacaaacccatgagcgagatgaaatttcacaagaaagttggaaagctcggcgtgttggataagaagaccatcaaaactatcaataagatgaagacactcaagaggaaaaacatcttgaatcagatcttgtcctgttccagcagcgttgctctgaaggcaaaagctcccccagagaccagccctggggcagcagccattgaaagcaaactgggcaagcagattaatgtcagcaagaggggaaccatctacattggcaagaagcggggcaggaagccaagagcagagctgccacccccatccgaagaacccaaaacagccatcaagcaccccaggcctgtttctagccagccggatgttccagccgtgccttccaactttcagtcacttgtggcgtcttcaccagcagctatgcacccactttcaacacagttaggtgggtccaatggcaacctgagccctgccagcactgaaaccaatttttcagagttgaaaactatgccaaatctccagcccatcagtgctcttccaaccaaaacccaaaagggaatacacagtggaacctggaagctgtctccacccagactgatggccaactccccttcacacctgtgcgagattggctccctaaaggaaatcacgctgtcccctgtgagcgagtcccacagtgaggagacgatccccagcgacagcggcattgggacagacaacaacagcacttctgaccaagcggagaagagctcagaatcccgaaggaggtactcttttgatttctgctccctggacaacccggaggccattccgtccgacaccagcacaaagaaccggcatggccaccggcaaaagcatctcattgtggacaactttctggcccacgaaagcctcaagaagccaaagcacaagaggaaacggaaaagcctgcaaaaccgcgatgacctccagtttctggcagacctggaggagctaatcaccaagttccaagtgttcagaatctcccaccggagttacaccttctaccacgagaatccatatcccagcatttttcggattaattttgatcactattacccggtgccatatatccagtatgacccgttgctctatcttcgtaggacttcagacttgaagtcaaagaagaagcgtggtaggcctgcaaaaaccaatgacaccatgacaaaggtgccttttttacaagggttcagctaccctattcccagtggaagttactatgcaccctatggaatgccttacacatcaatgcctatgatgaaccttggttattacggtcagtacccagctcctttgtacctatcgcacacgcttggagcagcttccccattcatgaggccaacagtgccaccacctcagttccacacaaactcccacataaagatgtccggtgcagctaagcataaagccaagcatggagtacacctgcagggacctgttagcatgggccttggtgacatgcagccttctctgaaccctcccaaggtaggcagtgccagtctgtccagtggtcggctccataagaggaaacacaaacacaagcataagcacaaggaagaccggatcctagggacccatgacaacctgagtggtctttttgcaggcaaagccacaggcttctccagccacatcctgagcgagcggctgagtagcgcagacaaagagctcccgctggtgagtgagaagaacaagcataaggagaaacagaagcaccagcacagcgaagccggccacaaagcttctaagaacaactttgaggtggacaccctgtctacactgtcactttccgacgcccagcattggacacaggccaaggaaaaaggagacttgagcagtgagcctgtggactcatgcacgaaaagatactctggcagtggcggggatggtggcagcacgagatcggagaacctggacgtgttcagtgaaatgaacccttcgaatgacaagtgggacagtgacgtgagtgggagtaaaaggaggagctatgaaggctttggaacgtacagggaaaaggacatccaagccttcaagatgaaccgcaaggagagaagttcttatgactcctccatgtctccagggatgccaagtccccacttaaaagtggaccagacagcagtgcatagtaagaacgaaggctcagtgcccaccatgatgaccaggaagaagccagccgcagttgacagtgttacaattccaccagccccagtgttatctctccttgctgcatctgcagcaacgtcggatgcagtcggctcctccctgaagaagaggttcaagcggcgggagatcgaagccatccagtgcgaagtgcggaagatgtgcaactacaccaagatcctgtccaccaagaagaacctggaccacgtgaacaagatcctgaaggccaagcggctgcagagacaatcaaaaacaggcaacaacttcgtgaagaagaggcgcgggcgtcccaggaagcagcccacccagttcgatgaggactccagagaccaaatgccggtgctggaaaaatgcatcgacctgcccagcaaaagaggccagaagcccagcctgagcccgctggtgctggagcccgccgccagccaagacaccatcatggccaccatcgaggcggtcatccacatggcccgggaggcgccgcccctgcccccgccaccgccgccgcccctgccgccaccgccgccaccacccctgcccccgccaccccctctacccaagaccccccgaggcggaaagaggaaacacaaaccgcaggcccccgctcagcccccacagcagtcgcccccgcagcagccccttccccaggaagaggaggtgaaagccaaaaggcagaggaagtcccgagggagtgagagcgaggtccttccctagggcgggtctgggcgtctgcacctggggcctagggaactgacacgtgggaagcgcagtgagccggggcgggggcggaatcccccgctgcagggacacccacgcccttctctccagaagccgggcaggcagaatccggccagacgacggggctgagccatcaggagctcttgggaaagcaaagcagggagacaccttcagaagaagcttgtctgagcttcaccgcagctcccaccacgcggcgcttcagtacggctggatcctccgcaggcgagcggaaggcccccaggaggagcaggctggtggcactctcctgacctcacgctgccaaggtgcgccctcgactcccgatttcatttgctggccaggaaaatcgaaagggaaacaccctcaattaggaaacattccaaggggagaaaagctgcaaattgctcaactggcattgctgtaacccgttccatttaattggtttttatttcttttgattttcaagctctgctaagctttggggtaccaacgtcatcttcaggtgacctgaatctttcccttaaccgtacagtttctcgatggaattgtgtgatcagaaggtggaattctagtgataggcgacctcagacccgcattcatgttctgtgtgcctcttctattgcacatacactgatttttagcattgtctattcctatttttcctttgcccattgtacttccatatatcttttcattaacttacttgctgccttttttttttcttggtacacatttaaataaagtaatccttaacctgtgctgtaaagttcacccttggcatgctgttccaagaacctgggtttgaatcccaatcgttgtgaaacatactcagtattgataaaacctttttaataagtgatgcagagcagccaaggatatgttgacccagatgtcaaccaggctatttttatacttaaaacatgtcagcagagcataggcagaataaaatggtttaaataccccacagcaaatagagtaactgacaaaccaccaaaaactgaaaccccagacccaccagaaagacaagtgtctagcaatgccttggtacctgatctttttcattcaaataattgtcataggttgttcaaaaaaaaaaaaaaaaaggaaacaaaaacacaatagaagtccattatcccttgataattatttcttaaaagcaaatgggagtaagtgttcttatctggaaaaataaataaataaaatgctcaaagggtatcaccacttcaattttatcaagccaccttggacaaagtatccaaattgtggttgccttaataaactaaaacattattgtacataatgtaattataaatctatcagtctgcatggatgcaaactgtgtgtgacaaatcgtcttttaaatggtcaatttcagctgtacatttctcatccaagttgtactctagccattggtttagcgtggacagatactccatctctattatccatttccacagcccaaataaaatatgttaagcaggctcaaa

SEQ ID NO: 277740 - DNA, 5352 bp, Homo sapiens
gcgtgagcctgtgcgtgtgctcacacgcgcattttggcagggctgaatcacaagaggactcgcagttgatacccagactcaccaaaaaattgagctgtgaatttggggaggcaggtacgtgctgggaaggaagctaaaggagaacaacagctttgtgtgctgatgaagtaaacagacagttgcagatctgatctcttctgaacacctcatcgtgtctccatccctgggaatctgaccctagcaactggaccactttgttcttggaattttgggtgtcctcttttctcacctttcccttttcccttttccccttccccctcctgagaactccggaagactgtagagattgtcatggagtccagggaaaccttaagcagctcccggcaaagagggggcgagtcagacttcctgccggtctcctcagccaagcccccagctgctcctggctgtgcaggagaacctttgctctccactccaggacctgggaaggggatcccggtgggcggagagcgcatggagccagaggaggaggatgaactaggctcagggcgggatgtggattccaactccaacgcggacagtgagaaatgggtggcaggagatggtttggaagagcaggaattttctatcaaggaggcaaacttcacagagggaagtctgaagctaaagattcagaccacaaagcgggctaagaaacccccaaagaatttggagaactatatatgtccacctgagatcaagatcaccatcaagcagtctggggaccagaaggtgtcccgtgctggaaaaaatagcaaagccacgaaggaggaagaaagaagccactccaaaaagaagctcctcacagccagtgaccttgcagccagtgacctcaaaggatttcagccacaggcttacgaaaggccccagaaacattcaactctccattatgacacgggcctcccacaggacttcaccggtgacaccttaaaaccaaagcaccagcaaaaaagcagcagccagaaccacatggactggtccaccaactctgacagcggacccgtcactcagaattgcttcatcagtccagagtctggcagagaaactgcaagcaccagcaagatccccgctcttgagcccgtggcttcctttgcaaaggcccagggtaagaaaggcagtgcagggaacacgtggagtcagttgtctaacaataacaaagatctgctcttgggaggtgtggctccatccccaagcagccacagctcaccagccccacccagcagctctgctgagtgcaacgggcttcagcccttggtggatcaagatggaggaggtacaaaggagcccccagaaccacctacggtgggcagcaagaaaaagtccagtaaaaaagatgtgataagtcagaccataccaaacccagacctggattgggtcaagaatgcccagaaagcatttgacaatacagaagggaaaagggaaggttattccgcagatagtgcccaagaggcatcaccagccaggcagaacgtgagttctgccagtaatcctgaaaatgactcaagtcatgtccggattactatccccatcaaggcaccctctctggatccaaccaaccataagaggaaaaaaagacagtccattaaagcggtggtggaaaagatcatgccagagaaagccttggcttctggaatcaccatgagcagtgaagtagttaacaggatactttccaactctgaggggaataagaaggatccccgtgtccctaagttgagtaaaatgatagagaatgagtccccctcagttggccttgaaactggtggaaatgctgagaaagttatcccaggaggtgtgtctaagccgcggaagccacccatggtcatgacacctccaacgtgcacagatcactctccatccagaaagctgccagaaatccagcatccaaaatttgctgcaaaacgaaggtggacttgcagcaaaccaaaacctagcaccatgcttcgagaggcagttatggccacctctgataaactgatgctggagcccccgtctgcatatcccatcaccccatccagccctctctacaccaacacagacagtcttactgtgatcactccagtcaaaaagaagcggggacgaccaaagaagcagcctttgctcacagtcgagacgattcatgagggaacttccaccagccccgtcagtcccatcagccgagagtttcctggcactaagaaaagaaagcgacgacgcaatttagcgaagttggcccagctagtgccgggagaggacaaacccatgagcgagatgaaatttcacaagaaagttggaaagctcggcgtgttggataagaagaccatcaaaactatcaataagatgaagacactcaagaggaaaaacatcttgaatcagatcttgtcctgttccagcagcgttgctctgaaggcaaaagctcccccagagaccagccctggggcagcagccattgaaagcaaactgggcaagcagattaatgtcagcaagaggggaaccatctacattggcaagaagcggggcaggaagccaagagcagagctgccacccccatccgaagaacccaaaacagccatcaagcaccccaggcctgtttctagccagccggatgttccagccgtgccttccaactttcagtcacttgtggcgtcttcaccagcagctatgcacccactttcaacacagttaggtgggtccaatggcaacctgagccctgccagcactgaaaccaatttttcagagttgaaaactatgccaaatctccagcccatcagtgctcttccaaccaaaacccaaaagggaatacacagtggaacctggaagctgtctccacccagactgatggccaactccccttcacacctgtgcgagattggctccctaaaggaaatcacgctgtcccctgtgagcgagtcccacagtgaggagacgatccccagcgacagcggcattgggacagacaacaacagcacttctgaccaagcggagaagagctcagaatcccgaaggaggtactcttttgatttctgctccctggacaacccggaggccattccgtccgacaccagcacaaagaaccggcatggccaccggcaaaagcatctcattgtggacaactttctggcccacgaaagcctcaagaagccaaagcacaagaggaaacggaaaagcctgcaaaaccgcgatgacctccagtttctggcagacctggaggagctaatcaccaagttccaagtgttcagaatctcccaccggagttacaccttctaccacgagaatccatatcccagcatttttcggattaattttgatcactattacccggtgccatatatccagtatgacccgttgctctatcttcgtaggacttcagacttgaagtcaaagaagaagcgtggtaggcctgcaaaaaccaatgacaccatgacaaaggtgccttttttacaagggttcagctaccctattcccagtggaagttactatgcaccctatggaatgccttacacatcaatgcctatgatgaaccttggttattacggtcagtacccagctcctttgtacctatcgcacacgcttggagcagcttccccattcatgaggccaacagtgccaccacctcagttccacacaaactcccacataaagatgtccggtgcagctaagcataaagccaagcatggagtacacctgcagggacctgttagcatgggccttggtgacatgcagccttctctgaaccctcccaaggtaggcagtgccagtctgtccagtggtcggctccataagaggaaacacaaacacaagcataagcacaaggaagaccggatcctagggacccatgacaacctgagtggtctttttgcaggcaaagccacaggcttctccagccacatcctgagcgagcggctgagtagcgcagacaaagagctcccgctggtgagtgagaagaacaagcataaggagaaacagaagcaccagcacagcgaagccggccacaaagcttctaagaacaactttgaggtggacaccctgtctacactgtcactttccgacgcccagcattggacacaggccaaggaaaaaggagacttgagcagtgagcctgtggactcatgcacgaaaagatactctggcagtggcggggatggtggcagcacgagatcggagaacctggacgtgttcagtgaaatgaacccttcgaatgacaagtgggacagtgacgtgagtgggagtaaaaggaggagctatgaaggctttggaacgtacagggaaaaggacatccaagccttcaagatgaaccgcaaggagagaagttcttatgactcctccatgtctccaggtaaggctgtttttcttcagaaatggattatcaagttatttcattgctgggctttgcacctcagacacatctgtggcacattgtgttcactagtttgcaaagaggtgggaatcaaattaaaatgggtctccttgcacatttgagtttgctgcacattttgtacattgtttacttggtatttactatcttccttctctcctggagccattgtttgagaaactgtgaagccataaccctaatagctgcctaggctgcagtcgtgcccactatggttatgctttttattaaagatgctgttcttaggtcctcatctgatctaatggtacagtttgctgtttggatacagcctctaaaactcattaggaatactaataagatccaagaatgccaagcctgggaggaaatgactagctaatttatctggcatgccagctccacaagtcacacatctaatgtgagaagtctactgcagagccattagaagctgatgaccagtgaatcctgaagtctaactcatcaggtagccacagccttgggccatattgtttccattttttttccatgggcatttgataagctgtcctgggcaggtccctaaaatgaaaacttgactacattcagatacttgtcattttcgtgcactaagtggaaggaggcaggctggaaggtgatatgtgcctcctgcttccagcagaccttataactgtgtctctttgcatgcccactagaaagggattttgctcactaatttaaactgaaatgctggttgctactagaaggatcctattccttgtcagttgctggcagaattcccttgccaacctccccaaccacacaaaatccttccctgctgttagggcctcacatttctgcaaaagtatccctttgaccctggccttacatcatatatgataagacccctataaagaccagagaagttagttattaggaaaatagtagaaacttcttacctaggagttgcagaagctaaaaaaaaaaaa

SEQ ID NO: 277741 - DNA, 3608 bp, Homo sapiens
gcgtgagcctgtgcgtgtgctcacacgcgcattttggcagggctgaatcacaagaggactcgcagttgatacccagactcaccaaaaaattgagctgtgaatttggggaggcaggtacgtgctgggaaggaagctaaaggagaacaacagctttgtgtgctgatgaagtaaacagacagttgcagatctgatctcttctgaacacctcatcgtgtctccatccctgggaatctgaccctagcaactggaccactttgttcttggaattttgggtgtcctcttttctcacctttcccttttcccttttccccttccccctcctgagaactccggaagactgtagagattgtcatggagtccagggaaaccttaagcagctcccggcaaagagggggcgagtcagacttcctgccggtctcctcagccaagcccccagctgctcctggctgtgcaggagaacctttgctctccactccaggacctgggaaggggatcccggtgggcggagagcgcatggagccagaggaggaggatgaactaggctcagggcgggatgtggattccaactccaacgcggacagtgagaaatgggtggcaggagatggtttggaagagcaggaattttctatcaaggaggcaaacttcacagagggaagtctgaagctaaagattcagaccacaaagcgggctaagaaacccccaaagaatttggagaactatatatgtccacctgagatcaagatcaccatcaagcagtctggggaccagaaggtgtcccgtgctggaaaaaatagcaaagccacgaaggaggaagaaagaagccactccaaaaagaagctcctcacagccagtgaccttgcagccagtgacctcaaaggatttcagccacaggcttacgaaaggccccagaaacattcaactctccattatgacacgggcctcccacaggacttcaccggtgacaccttaaaaccaaagcaccagcaaaaaagcagcagccagaaccacatggactggtccaccaactctgacagcggacccgtcactcagaattgcttcatcagtccagagtctggcagagaaactgcaagcaccagcaagatccccgctcttgagcccgtggcttcctttgcaaaggcccagggtaagaaaggcagtgcagggaacacgtggagtcagttgtctaacaataacaaagatctgctcttgggaggtgtggctccatccccaagcagccacagctcaccagccccacccagcagctctgctgagtgcaacgggcttcagcccttggtggatcaagatggaggaggtacaaaggagcccccagaaccacctacggtgggcagcaagaaaaagtccagtaaaaaagatgtgataagtcagaccataccaaacccagacctggattgggtcaagaatgcccagaaagcatttgacaatacagaagggaaaagggaaggttattccgcagatagtgcccaagaggcatcaccagccaggcagaacgtgagttctgccagtaatcctgaaaatgactcaagtcatgtccggattactatccccatcaaggcaccctctctggatccaaccaaccataagaggaaaaaaagacagtccattaaagcggtggtggaaaagatcatgccagagaaagccttggcttctggaatcaccatgagcagtgaagtagttaacaggatactttccaactctgaggggaataagaaggatccccgtgtccctaagttgagtaaaatgatagagaatgagtccccctcagttggccttgaaactggtggaaatgctgagaaagttatcccaggaggtgtgtctaagccgcggaagccacccatggtcatgacacctccaacgtgcacagatcactctccatccagaaagctgccagaaatccagcatccaaaatttgctgcaaaacgaaggtggacttgcagcaaaccaaaacctagcaccatgcttcgagaggcagttatggccacctctgataaactgatgctggagcccccgtctgcatatcccatcaccccatccagccctctctacaccaacacagacagtcttactgtgatcactccagtcaaaaagaagcggggacgaccaaagaagcagcctttgctcacagtcgagacgattcatgagggaacttccaccagccccgtcagtcccatcagccgagagtttcctggcactaagaaaagaaagcgacgacgcaatttagcgaagttggcccagctagtgccgggagaggacaaacccatgagcgagatgaaatttcacaagaaagttggaaagctcggcgtgttggataagaagaccatcaaaactatcaataagatgaagacactcaagaggaaaaacatcttgaatcagatcttgtcctgttccagcagcgttgctctgaaggcaaaagctcccccagagaccagccctggggcagcagccattgaaagcaaactgggcaagcagattaatgtcagcaagaggggaaccatctacattggcaagaagcggggcaggaagccaagagcagagctgccacccccatccgaagaacccaaaacagccatcaagcaccccaggcctgtttctagccagccggatgttccagccgtgccttccaactttcagtcacttgtggcgtcttcaccagcagctatgcacccactttcaacacagttaggtgggtccaatggcaacctgagccctgccagcactgaaaccaatttttcagagttgaaaactatgccaaatctccagcccatcagtgctcttccaaccaaaacccaaaagggaatacacagtggaacctggaagctgtctccacccagactgatggccaactccccttcacacctgtgcgagattggctccctaaaggaaatcacgctgtcccctgtgagcgagtcccacagtgaggagacgatccccagcgacagcggcattgggacagacaacaacagcacttctgaccaagcggagaagagctcagaatcccgaaggaggtactcttttgatttctgctccctggacaacccggaggccattccgtccgacaccagcacaaagaaccggcatggccaccggcaaaagcatctcattgtggacaactttctggcccacgaaagcctcaagaagccaaagcacaagaggaaacggaaaagcctgcaaaaccgcgatgacctccagtttctggcagacctggaggagctaatcaccaagttccaagtgttcagaatctcccaccggagttacaccttctaccacgagaatccatatcccagcatttttcggattaattttgatcactattacccggtgccatatatccagtatgacccgttgctctatcttcgtaggacttcagacttgaagtcaaagaagaagcgtggtaggcctgcaaaaaccaatgacaccatgacaaaggtgccttttttacaagggttcagctaccctattcccagtggaagttactatgcaccctatggaatgccttacacatcaatgcctatgatgaaccttggttattacggtcagtacccagctcctttgtacctatcgcggcttgtggcgtaacctcggggtcagcc

SEQ ID NO: 277742 - DNA, 1708 bp, Homo sapiens
gaggccaaacatggggcggggcggcgcggccggggaagcgtgatgaaggcctacgagtgcggcgcggcctgaaggggcacgcgggggacctgcaaagctagtgaggggcggggcaggcggcgcggtgggggcgggccgagcccggaggccagatgagcggacacagccccacgcgcggggccatgcaggtggccatgaacggtaaggcccgcaaagaggcggtgcagactgcggctaaggaactcctcaagttcgtgaaccggagtccctctcctttccatgctgtggctgaatgccgcaaccgccttctccaggctggcttcagtgaactcaaggagactgagaaatggaatattaagcccgagagcaagtacttcatgaccaggaactcctccaccatcatagcttttgctgtagggggccagtacgttcctggcaatggcttcagcctcatcggggcccacacggacagcccctgcctccgggtgaaacgtcggtctcgccgcagccaggtgggcttccagcaagtcggtgtggagacctatggtggtgggatctggagcacctggtttgaccgtgacctgactctggctggacgcgtcattgtcaagtgccctacctcaggtcggctggagcagcagctggtgcacgtggagcggcccattcttcgcatcccacacctggccatccatctgcagcgaaatatcaacgagaactttgggcccaacacagagatgcatctagtccccattcttgccacagccatccaggaggagctggagaaggggactcctgagccagggcctctcaatgctgtggatgagcggcaccattcggtcctcatgtccctgctctgtgcccatctggggctgagccccaaggacatagtggagatggagctctgccttgcagacacccagcctgcggtcttgggtggtgcctatgatgagttcatctttgctcctcggctggacaatctgcacagctgcttctgtgccctgcaggccttgatagattcctgtgcaggccctggctccctggccacagagcctcacgtgcgcatggtcacactctatgacaacgaagaggtggggtctgagagtgcacagggagcacagtcactgctgacagagctggtgctgcggcggatctcagcctcgtgccagcacccgacagccttcgaggaagccatacccaagtccttcatgatcagcgcagacatggcccatgctgtgcatcccaactacctggacaagcatgaggagaaccaccggcctttattccacaagggccccgtgatcaaggtgaacagcaagcaacgctatgcttcaaacgcggtgtcagaggccctgatccgagaggtggccaacaaagtcaaggtccccctgcaggatctcatggtccggaatgacaccccctgtggaaccaccattggacctatcttggcttctcggctggggctgcgggtgctggatttaggcagcccccaactggccatgcactctatccgggagatggcctgcaccacaggagtcctccagaccctcaccctcttcaagggcttctttgagctgttcccttctctaagccataatctcttagtggattgagccctcttggaaagacttctctgccatccctttgcacctgagaggggaagttctcagctgagctgaagctggattattaaagtggattgtcactcaga

SEQ ID NO: 277743 - DNA, 2566 bp, Homo sapiens
gaggccaaacatggggcggggcggcgcggccggggaagcgtgatgaaggcctacgagtgcggcgcggcctgaaggggcacgcgggggacctgcaaagctagtgaggggcggggcaggcggcgcggtgggggcgggccgagcccggaggccagatgagcggacacagccccacgcgcggggccatgcaggtggccatgaacggtaaggcccgcaaagaggcggtgcagactgcggctaaggaactcctcaagttcgtgaaccggagtccctctcctttccatgctgtggctgaatgccgcaaccgccttctccaggctggcttcagtgaactcaaggagactgagaaatggaatattaagcccgagagcaagtacttcatgaccaggaactcctccaccatcatagcttttgctgtagggggccagtacgttcctggcaatggcttcagcctcatcggggcccacacggacagcccctgcctccgggtgaaacgtcggtctcgccgcagccaggtgggcttccagcaagtcggtgtggagacctatggtggtgggatctggagcacctggtttgaccgtgacctgactctggctggacgcgtcattgtcaagtgccctacctcaggtcggctggagcagcagctggtgcacgtggagcggcccattcttcgcatcccacacctggccatccatctgcagcgaaatatcaacgagaactttgggcccaacacagagatgcatctagtccccattcttgccacagccatccaggaggagctggagaaggggactcctgagccagggcctctcaatgctgtggatgagcggcaccattcggtcctcatgtccctgctctgtgcccatctggggctgagccccaaggacatagtggagatggagctctgccttgcagacacccagcctgcggtcttgggtggtgcctatgatgagttcatctttgctcctcggctggacaatctgcacagctgcttctgtgccctgcaggccttgatagattcctgtgcaggccctggctccctggccacagagcctcacgtgcgcatggtcacactctatgacaacgaagaggtggggtctgagagtgcacagggagcacagtcactgctgacagagctggtgctgcggcggatctcagcctcgtgccagcacccgacagccttcgaggaagccatacccaagtccttcatgatcagcgcagacatggcccatgctgtgcatcccaactacctggacaagcatgaggagaaccaccggcctttattccacaagggccccgtgatcaaggtgaacagcaagcaacgctatgcttcaaacgcggtgtcagaggccctgatccgagaggtggccaacaaagtcaaggtccccctgcaggatctcatggtccggaatgacaccccctgtggaaccaccattggacctatcttggcttctcggctggggctgcgggtgctggatttaggcagcccccaactggccatgcactctatccgggagatggcctgcaccacaggagtcctccagaccctcaccctcttcaagggcttctttgagctgttcccttctctaagccataatctcttagtggattgagccctcttggaaagacttctctgccatccctttgcacctgagaggggaagttctcagctgagctgaagctggattattaaagtggattgtcactcagactctccgtgctacgcttatttggagactagaggagtgggagttgagcctggcttgaacctttggaaccagaaaagttggggagcaggtggaggaggccacactcctgggagctgatggttttaaatctggttttaaatctcttctctgtctcaagtccatgtctgaagtgggtgaagggtggactggatcctcaagcagaaggtcacttctcccacccctagtcctccacctgggaaatggcctcaacggtcttccctctttccatccccagaatgggtgtcccgctctgccttcagagatcctgttctgcactgggccaccttcagagctgctctgggcagacaaagctgtttctcaccctcccaaaatcccttcccatcccctctcaggagctgcaaagagaagggcacagtctatatcttatcacccttcatcatccacttctcagcagtccctggtattacttgattgtgaacatattatcaggaaaaaagattatcattgaaaaaattggaaaagtcaaagtctggccgggtgcagcggctcacatctgtattcccagcattttgggaggccaaggcaggtggatcacttgaggtcagagttcaagaccagccttgccaacatggtgaaacccatctctacttaaaaaaaaatacaaaaaaattagccaggcatggtggcacacacctgtaatctcagctattcaggagactgaggcaggagaatagcttgaaccaaggaggcgtaggttgcagtgagctgagatggagccaccacactccagcctgggcaacagagcaaggctctgtctcagagaaaaaaggccaggcgtgatgggtcatgcctgtagtccc

SEQ ID NO: 277744 - DNA, 1585 bp, Homo sapiens
gggacagtaagagtacatagttgatggggcagttgtgaagattaaacgaggtggctgtggcgagagacagcactttgtaccgtacccgtcggacccggtggccatgaacggtaaggcccgcaaagaggcggtgcagactgcggctaaggaactcctcaagttcgtgaaccggagtccctctcctttccatggctggcttcagtgaactcaaggagactgagaaatggaatattaagcccgagagcaagtacttcatgaccaggaactcctccaccatcatagcttttgctgtagggggccagtacgttcctggcaatggcttcagcctcatcggggcccacacggacagcccctgcctccgggtgaaacgtcggtctcgccgcagccaggtgggcttccagcaagtcggtgtggagacctatggtggtgggatctggagcacctggtttgaccgtgacctgactctggctggacgcgtcattgtcaagtgccctacctcaggtcggctggagcagcagctggtgcacgtggagcggcccattcttcgcatcccacacctggccatccatctgcagcgaaatatcaacgagaactttgggcccaacacagagatgcatctagtccccattcttgccacagccatccaggaggagctggagaaggggactcctgagccagggcctctcaatgctgtggatgagcggcaccattcggtcctcatgtccctgctctgtgcccatctggggctgagccccaaggacatagtggagatggagctctgccttgcagacacccagcctgcggtcttgggtggtgcctatgatgagttcatctttgctcctcggctggacaatctgcacagctgcttctgtgccctgcaggccttgatagattcctgtgcaggccctggctccctggccacagagcctcacgtgcgcatggtcacactctatgacaacgaagaggtggggtctgagagtgcacagggagcacagtcactgctgacagagctggtgctgcggcggatctcagcctcgtgccagcacccgacagccttcgaggaagccatacccaagtccttcatgatcagcgcagacatggcccatgctgtgcatcccaactacctggacaagcatgaggagaaccaccggcctttattccacaagggccccgtgatcaaggtgaacagcaagcaacgctatgcttcaaacgcggtgtcagaggccctgatccgagaggtggccaacaaagtcaaggtccccctgcaggatctcatggtccggaatgacaccccctgtggaaccaccattggacctatcttggcttctcggctggggctgcgggtgctggatttaggcagcccccaactggccatgcactctatccgggagatggcctgcaccacaggagtcctccagaccctcaccctcttcaagggcttctttgagctgttcccttctctaagccataatctcttagtggattgagccctcttggaaagacttctctgccatccctttgcacctgagaggggaagttctcagctgagctgaagctggattattaaagtggattgtcactcaga

SEQ ID NO: 277745 - DNA, 1244 bp, Homo sapiens
ggcacgaggctctctctctctctctctctctctctctctctctctctctctctctctctctctctctctctctctctctctctctctctctctcggagcacctggtttgaccgtgacctgactctggctggacgcgtcattgtcaagtgccctacctcaggtcggctggagcagcagctggtgcacgtggagcggcccattcttcgcatcccacacctggccatccatctgcagcgaaatatcaacgagaactttgggcccaacacagagatgcatctagtccccattcttgccacagccatccaggaggagctggagaaggggactcctgagccagggcctctcaatgctgtggatgagcggcaccattcggtcctcatgtccctgctctgtgcccatctggggctgagccccaaggacatagtggagatggagctctgccttgcagacacccagcctgcggtcttgggtggtgcctatgatgagttcatctttgctcctcggctggacaatctgcacagctgcttctgtgccctgcaggccttgatagattcctgtgcaggccctggctccctggccacagagcctcacgtgcgcatggtcacactctatgacaacgaagaggtggggtctgagagtgcacagggagcacagtcactgctgacagagctggtgctgcggcggatctcagcctcgtgccagcacccgacagccttcgaggaagccatacccaagtccttcatgatcagcgcagacatggcccatgctgtgcatcccaactacctggacaagcatgaggagaaccaccggcctttattccacaagggccccgtgatcaaggtgaacagcaagcaacgctatgcttcaaacgcggtgtcagaggccctgatccgagaggtggccaacaaagtcaaggtccccctgcaggatctcatggtccggaatgacaccccctgtggaaccaccattggacctatcttggcttctcggctggggctgcgggtgctggatttaggcagcccccaactggccatgcactctatccgggagatggcctgcaccacaggagtcctccagaccctcaccctcttcaagggcttctttgagctgttcccttctctaagccataatctcttagtggattgagccctcttggaaagacttctctgccatccctttgcacctgagaggggaagttctcagctgagctgaagctggattattaaagtggattgtcactcaga

SEQ ID NO: 277746 - DNA, 1765 bp, Homo sapiens
  misc_feature (1164)..(1164): n is a, c, g, or t
gaggccaaacatggggcggggcggcgcggccggggaagcgtgatgaaggcctacgagtgcggcgcggcctgaaggggcacgcgggggacctgcaaagctagtgaggggcggggcaggcggcgcggtgggggcgggccgagcccggaggccagatgagcggacacagccccacgcgcggggccatgcaggtggccatgaacggtaaggcccgcaaagaggcggtgcagactgcggctaaggaactcctcaagttcgtgaaccggagtccctctcctttccatgctgtggctgaatgccgcaaccgccttctccaggctggcttcagtgaactcaaggagactgagaaatggaatattaagcccgagagcaagtacttcatgaccaggaactcctccaccatcatagcttttgctgtagggggccagtacgttcctggcaatggcttcagcctcatcggggcccacacggacagcccctgcctccgggtgaaacgtcggtctcgccgcagccaggtgggcttccagcaagtcggtgtggagacctatggtggtgggatctggagcacctggtttgaccgtgacctgactctggctggacgcgtcattgtcaagtgccctacctcaggtcggctggagcagcagctggtgcacgtggagcggcccattcttcgcatcccacacctggccatccatctgcagcgaaatatcaacgagaactttgggcccaacacagagatgcatctagtccccattcttgccacagccatccaggaggagctggagaaggggactcctgagccagggcctctcaatgctgtggatgagcggcaccattcggtcctcatgtccctgctctgtgcccatctggggctgagccccaaggacatagtggagatggagctctgccttgcagacacccagcctgcggtgaggactggctgtaggaacctgtgggtgaagggcctccaggatcctggccacccctagcccgtcctgctgaagcacccatcacctccaccaagccctcagtaactctcatccccgtttttcccagtagacacatcccccactgcttctagggcggtggttctcaaaaagacaagttccctaccccagacctgcccactaggactatctgggaattggccctttttacagattcccnaagagtttcttctacaggtgggccctgtctgctttgacccacactgacactgaactgcttagggaaagaggcctggatgtggccatctgttctctgtctcccggttgctgatggtcagagattgctaaatctttggatgctgtgtcctgcttgaacacgtactaagtttctgttttttggctggtttcctctgtttacttctttggcctttttgatgacaattcagcccttccttttcttgacccacaggaagaggtcaagagctattggcctccacccttttgttcctcagcaccaacccagcccccttctccaatctctgcttggtcctgcctagcaaggaatcccagcactttgggaggctgaggcggggggaatcacatgaggtcaggagttcgagactagcctgaccaccatggtgaaaccctgtctctaataaaaatacaaaaattagctgggcctggtggtgcatgcctgtaatcccagctactcaggaggctgaggcacgagaatcctttgaacccgggaggcggaagttgcagtgagccgagatcgagccattgcacttcagactgggcaacaagagcgaaccttcatctca

SEQ ID NO: 277747 - DNA, 1251 bp, Homo sapiens
ggacgctgtgggtcgacccacgcgtcgcggacgcgtgggcgaagaggtggccaacaaagtcaaggtccccctgcaggatctcatggtccggaatgacaccccctgtggaaccaccattggacctatcttggcttctcggctggggctgcgggtgctggatttaggcagcccccaactggccatgcactctatccgggagatggcctgcaccacaggagtcctccagaccctcaccctcttcaagggcttctttgagctgttcccttctctaagccataatctcttagtggattgagccctcttggaaagacttctctgccatccctttgcacctgagaggggaagttctcagctgagctgaagctggattattaaagtggattgtcactcagactctccgtgctacgcttatttggagactagaggagtgggagttgagcctggcttgaacctttggaaccagaaaagttggggagcaggtggaggaggccacactcctgggagctgatggttttaaatctggttttaaatctcttctctgtctcaagtccatgtctgaagtgggtgaagggtggactggatcctcaagcagaaggtcacttctcccacccctagtcctccacctgggaaatggcctcaacggtcttccctctttccatccccagaatgggtgtcccgctctgccttcagagatcctgttctgcactgggccaccttcagagctgctctgggcagacaaagctgtttctcaccctcccaaaatcccttcccatcccctctcaggagctgcaaagagaagggcacagtctatatcttatcacccttcatcatccacttctcagcagtccctggtattacttgattgtgaacatattatcaggaaaaaagattatcattgaaaaaattggaaaagtcaaagtctggccgggtgcagcggctcacatctgtattcccagcattttgggaggccaaggcaggtggatcacttgaggtcagagttcaagaccagccttgccaacatggtgaaacccatctctacttaaaaaaaaatacaaaaaaattagccaggcatggtggcacacacctgtaatctcagctattcaggagactgaggcaggagaatagcttgaaccaaggaggcgtaggttgcagtgagctgagatggagccaccacactccagcctgggcaacagagcaaggctctgtctcagagaaaaaaggccaggcgtgatgggtcatgcctgtagtccc

SEQ ID NO: 277748 - DNA, 995 bp, Homo sapiens
cgggctgaagctttcaacggagtttcagccctgggtttgggtctctcggtggggacgggcggaagcagaggtggccatgaacggtaaggcccgcaaagaggcggtgcagactgcggctaaggaactcctcaagttcgtgaaccggagtccctctcctttccatgctgtggctgaatgccgcaaccgccttctccaggctggcttcagtgaactcaaggagactgagaaatggaatattaagcccgagagcaagtacttcatgaccaggaactcctccaccatcatagcttttgctgtagggggccagtacgttcctggcaatggcttcagcctcatcggggcccacacggacagcccctgcctccgggtgaaacgtcggtctcgccgcagccaggtgggcttccagcaagtcggtgtggagacctatggtggtgggatctggagcacctggtttgaccgtgacctgactctggctggacgcgtcattgtcaagtgccctacctcaggtcggctggagcagcagctggtgcacgtggagcggcccattcttcgcatcccacacctggccatccatctgcagcgaaatatcaacgagaactttgggcccaacacagagatgcatctagtccccattcttgccacagccatccaggaggagctggagaaggggactcctgagccagggcctctcaatgctgtggatgagcggcaccattcggtcctcatgtccctgctctgtgcccatctggggctgagccccaaggacatagtggagatggagctctgccttgcagacacccagcctgcggtcttgggtggtgcctatgatgagttcatctttgctcctcggctggacaatctgcacagctgcttctgtgccctgcaggcttgatgattccgtgcggccgggtcctggccagaggcccgtggcttggcaccttgacaccaagtggggtcgagcccggcccccctgtcaccgtctggggtccctcccg

SEQ ID NO: 277749 - DNA, 1676 bp, Homo sapiens
gaggccaaacatggggcggggcggcgcggccggggaagcgtgatgaaggcctacgagtgcggcgcggcctgaaggggcacgcgggggacctgcaaagctagtgaggggcggggcaggcggcgcggtgggggcgggccgagcccggaggccagatgagcggacacagccccacgcgcggggccatgcaggtggccatgaacggtaaggcccgcaaagaggcggtgcagactgcggctaaggaactcctcaagttcgtgaaccggagtccctctcctttccatggctggcttcagtgaactcaaggagactgagaaatggaatattaagcccgagagcaagtacttcatgaccaggaactcctccaccatcatagcttttgctgtagggggccagtacgttcctggcaatggcttcagcctcatcggggcccacacggacagcccctgcctccgggtgaaacgtcggtctcgccgcagccaggtgggcttccagcaagtcggtgtggagacctatggtggtgggatctggagcacctggtttgaccgtgacctgactctggctggacgcgtcattgtcaagtgccctacctcaggtcggctggagcagcagctggtgcacgtggagcggcccattcttcgcatcccacacctggccatccatctgcagcgaaatatcaacgagaactttgggcccaacacagagatgcatctagtccccattcttgccacagccatccaggaggagctggagaaggggactcctgagccagggcctctcaatgctgtggatgagcggcaccattcggtcctcatgtccctgctctgtgcccatctggggctgagccccaaggacatagtggagatggagctctgccttgcagacacccagcctgcggtcttgggtggtgcctatgatgagttcatctttgctcctcggctggacaatctgcacagctgcttctgtgccctgcaggccttgatagattcctgtgcaggccctggctccctggccacagagcctcacgtgcgcatggtcacactctatgacaacgaagaggtggggtctgagagtgcacagggagcacagtcactgctgacagagctggtgctgcggcggatctcagcctcgtgccagcacccgacagccttcgaggaagccatacccaagtccttcatgatcagcgcagacatggcccatgctgtgcatcccaactacctggacaagcatgaggagaaccaccggcctttattccacaagggccccgtgatcaaggtgaacagcaagcaacgctatgcttcaaacgcggtgtcagaggccctgatccgagaggtggccaacaaagtcaaggtccccctgcaggatctcatggtccggaatgacaccccctgtggaaccaccattggacctatcttggcttctcggctggggctgcgggtgctggatttaggcagcccccaactggccatgcactctatccgggagatggcctgcaccacaggagtcctccagaccctcaccctcttcaagggcttctttgagctgttcccttctctaagccataatctcttagtggattgagccctcttggaaagacttctctgccatccctttgcacctgagaggggaagttctcagctgagctgaagctggattattaaagtggattgtcactcaga

SEQ ID NO: 277750 - DNA, 1891 bp, Homo sapiens
gaggccaaacatggggcggggcggcgcggccggggaagcgtgatgaaggcctacgagtgcggcgcggcctgaaggggcacgcgggggacctgcaaagctagtgaggggcggggcaggcggcgcggtgggggcgggccgagcccggaggccagatgagcggacacagccccacgcgcggggccatgcaggtaagtggctcccgacggccccacttgaatttcgatcccagaccgggtccggcgccctccggggcccaagcttagcgcggtgctgcagtggggccgcctgacccaaagcgaaaccgaaagccccgcggagggtgacctgacgactttcccgggactggaagggggagtcctgcgagagactaggtggccatgaacggtaaggcccgcaaagaggcggtgcagactgcggctaaggaactcctcaagttcgtgaaccggagtccctctcctttccatgctgtggctgaatgccgcaaccgccttctccaggctggcttcagtgaactcaaggagactgagaaatggaatattaagcccgagagcaagtacttcatgaccaggaactcctccaccatcatagcttttgctgtagggggccagtacgttcctggcaatggcttcagcctcatcggggcccacacggacagcccctgcctccgggtgaaacgtcggtctcgccgcagccaggtgggcttccagcaagtcggtgtggagacctatggtggtgggatctggagcacctggtttgaccgtgacctgactctggctggacgcgtcattgtcaagtgccctacctcaggtcggctggagcagcagctggtgcacgtggagcggcccattcttcgcatcccacacctggccatccatctgcagcgaaatatcaacgagaactttgggcccaacacagagatgcatctagtccccattcttgccacagccatccaggaggagctggagaaggggactcctgagccagggcctctcaatgctgtggatgagcggcaccattcggtcctcatgtccctgctctgtgcccatctggggctgagccccaaggacatagtggagatggagctctgccttgcagacacccagcctgcggtcttgggtggtgcctatgatgagttcatctttgctcctcggctggacaatctgcacagctgcttctgtgccctgcaggccttgatagattcctgtgcaggccctggctccctggccacagagcctcacgtgcgcatggtcacactctatgacaacgaagaggtggggtctgagagtgcacagggagcacagtcactgctgacagagctggtgctgcggcggatctcagcctcgtgccagcacccgacagccttcgaggaagccatacccaagtccttcatgatcagcgcagacatggcccatgctgtgcatcccaactacctggacaagcatgaggagaaccaccggcctttattccacaagggccccgtgatcaaggtgaacagcaagcaacgctatgcttcaaacgcggtgtcagaggccctgatccgagaggtggccaacaaagtcaaggtccccctgcaggatctcatggtccggaatgacaccccctgtggaaccaccattggacctatcttggcttctcggctggggctgcgggtgctggatttaggcagcccccaactggccatgcactctatccgggagatggcctgcaccacaggagtcctccagaccctcaccctcttcaagggcttctttgagctgttcccttctctaagccataatctcttagtggattgagccctcttggaaagacttctctgccatccctttgcacctgagaggggaagttctcagctgagctgaagctggattattaaagtggattgtcactcaga

SEQ ID NO: 277751 - DNA, 1677 bp, Homo sapiens
tgcaagttggggcccaaggcaggggaaggatccggcaaaaaaggcacacggttcaggcctgtccactccagccttgggaggaggtgagcaggtcaccatggctcggagcctctccatcatgttcgtccccaacagctggctcaatggctaccacaaggtggccatgaacggtaaggcccgcaaagaggcggtgcagactgcggctaaggaactcctcaagttcgtgaaccggagtccctctcctttccatgctgtggctgaatgccgcaaccgccttctccaggctggcttcagtgaactcaaggagactgagaaatggaatattaagcccgagagcaagtacttcatgaccaggaactcctccaccatcatagcttttgctgtagggggccagtacgttcctggcaatggcttcagcctcatcggggcccacacggacagcccctgcctccgggtgaaacgtcggtctcgccgcagccaggtgggcttccagcaagtcggtgtggagacctatggtggtgggatctggagcacctggtttgaccgtgacctgactctggctggacgcgtcattgtcaagtgccctacctcaggtcggctggagcagcagctggtgcacgtggagcggcccattcttcgcatcccacacctggccatccatctgcagcgaaatatcaacgagaactttgggcccaacacagagatgcatctagtccccattcttgccacagccatccaggaggagctggagaaggggactcctgagccagggcctctcaatgctgtggatgagcggcaccattcggtcctcatgtccctgctctgtgcccatctggggctgagccccaaggacatagtggagatggagctctgccttgcagacacccagcctgcggtcttgggtggtgcctatgatgagttcatctttgctcctcggctggacaatctgcacagctgcttctgtgccctgcaggccttgatagattcctgtgcaggccctggctccctggccacagagcctcacgtgcgcatggtcacactctatgacaacgaagaggtggggtctgagagtgcacagggagcacagtcactgctgacagagctggtgctgcggcggatctcagcctcgtgccagcacccgacagccttcgaggaagccatacccaagtccttcatgatcagcgcagacatggcccatgctgtgcatcccaactacctggacaagcatgaggagaaccaccggcctttattccacaagggccccgtgatcaaggtgaacagcaagcaacgctatgcttcaaacgcggtgtcagaggccctgatccgagaggtggccaacaaagtcaaggtccccctgcaggatctcatggtccggaatgacaccccctgtggaaccaccattggacctatcttggcttctcggctggggctgcgggtgctggatttaggcagcccccaactggccatgcactctatccgggagatggcctgcaccacaggagtcctccagaccctcaccctcttcaagggcttctttgagctgttcccttctctaagccataatctcttagtggattgagccctcttggaaagacttctctgccatccctttgcacctgagaggggaagttctcagctgagctgaagctggattattaaagtggattgtcactcaga

SEQ ID NO: 277752 - DNA, 1571 bp, Homo sapiens
tgcaagttggggcccaaggcaggggaaggatccggcaaaaaaggcacacggttcaggcctgtccactccagccttgggaggaggtggccatgaacggtaaggcccgcaaagaggcggtgcagactgcggctaaggaactcctcaagttcgtgaaccggagtccctctcctttccatggctggcttcagtgaactcaaggagactgagaaatggaatattaagcccgagagcaagtacttcatgaccaggaactcctccaccatcatagcttttgctgtagggggccagtacgttcctggcaatggcttcagcctcatcggggcccacacggacagcccctgcctccgggtgaaacgtcggtctcgccgcagccaggtgggcttccagcaagtcggtgtggagacctatggtggtgggatctggagcacctggtttgaccgtgacctgactctggctggacgcgtcattgtcaagtgccctacctcaggtcggctggagcagcagctggtgcacgtggagcggcccattcttcgcatcccacacctggccatccatctgcagcgaaatatcaacgagaactttgggcccaacacagagatgcatctagtccccattcttgccacagccatccaggaggagctggagaaggggactcctgagccagggcctctcaatgctgtggatgagcggcaccattcggtcctcatgtccctgctctgtgcccatctggggctgagccccaaggacatagtggagatggagctctgccttgcagacacccagcctgcggtcttgggtggtgcctatgatgagttcatctttgctcctcggctggacaatctgcacagctgcttctgtgccctgcaggccttgatagattcctgtgcaggccctggctccctggccacagagcctcacgtgcgcatggtcacactctatgacaacgaagaggtggggtctgagagtgcacagggagcacagtcactgctgacagagctggtgctgcggcggatctcagcctcgtgccagcacccgacagccttcgaggaagccatacccaagtccttcatgatcagcgcagacatggcccatgctgtgcatcccaactacctggacaagcatgaggagaaccaccggcctttattccacaagggccccgtgatcaaggtgaacagcaagcaacgctatgcttcaaacgcggtgtcagaggccctgatccgagaggtggccaacaaagtcaaggtccccctgcaggatctcatggtccggaatgacaccccctgtggaaccaccattggacctatcttggcttctcggctggggctgcgggtgctggatttaggcagcccccaactggccatgcactctatccgggagatggcctgcaccacaggagtcctccagaccctcaccctcttcaagggcttctttgagctgttcccttctctaagccataatctcttagtggattgagccctcttggaaagacttctctgccatccctttgcacctgagaggggaagttctcagctgagctgaagctggattattaaagtggattgtcactcaga

SEQ ID NO: 277753 - DNA, 1368 bp, Homo sapiens
  misc_feature (30)..(30): n is a, c, g, or t
tctgtgcccatctggggctgtgccccaagnacatagtggagatggagctctgccttgcagacacccagcctgcggtcttgggtggtgcctatgatgagttcatctttgctcattgtttcccacacggacagcccctgtctgcgttgtgaaacgtcggtctcgccgcagccaggtgggcttccagcaagtcggtgtggagacctatggtggtgggatctggagcacctggtttgaccgtgacctgactctggctggacgcgtcattgtcaagtgccctacctcaggtcggctggagcagcagctggtgcacgtggagcggcccattcttcgcatcccacacctggccatccatctgcagcgaaatatcaacgagaactttgggcccaacacagagatgcatctagtccccattcttgccacagccatccaggaggagctggagaaggggactcctgagccagggcctctcaatgctgtggatgagcggcaccattcggtcctcatgtccctgctctgtgcccatctggggctgagccccaaggacatagtggagatggagctctgccttgcagacacccagcctgcggtcttgggtggtgcctatgatgagttcatctttgctcctcggctggacaatctgcacagctgcttctgtgccctgcaggccttgatagattcctgtgcaggccctggctccctggccacagagcctcacgtgcgcatggtcacactctatgacaacgaagaggtggggtctgagagtgcacagggagcacagtcactgctgacagagctggtgctgcggcggatctcagcctcgtgccagcacccgacagccttcgaggaagccatacccaagtccttcatgatcagcgcagacatggcccatgctgtgcatcccaactacctggacaagcatgaggagaaccaccggcctttattccacaagggccccgtgatcaaggtgaacagcaagcaacgctatgcttcaaacgcggtgtcagaggccctgatccgagaggtggccaacaaagtcaaggtccccctgcaggatctcatggtccggaatgacaccccctgtggaaccaccattggacctatcttggcttctcggctggggctgcgggtgctggatttaggcagcccccaactggccatgcactctatccgggagatggcctgcaccacaggagtcctccagaccctcaccctcttcaagggcttctttgagctgttcccttctctaagccataatctcttagtggattgagccctcttggaaagacttctctgccatccctttgcacctgagaggggaagttctcagctgagctgaagctggattattaaagtggattgtcactcaga

SEQ ID NO: 277754 - DNA, 1600 bp, Homo sapiens
gaggccaaacatggggcggggcggcgcggccggggaagcgtgatgaaggcctacgagtgcggcgcggcctgaaggggcacgcgggggacctgcaaagctagtgaggggcggggcaggcggcgcggtgggggcgggccgagcccggaggccagatgagcggacacagccccacgcgcggggccatgcaggtggccatgaacggtaaggcccgcaaagaggcggtgcagactgcggctaaggaactcctcaagttcgtgaaccggagtccctctcctttccatgctgtggctgaatgccgcaaccgccttctccaggctggcttcagtgaactcaaggagactgagaaatggaatattaagcccgagagcaagtacttcatgaccaggaactcctccaccatcatagcttttgctgtagggggccagtacgttcctggcaatggcttcagcctcatcggggcccacacggacagcccctgcctccgggtgaaacgtcggtctcgccgcagccaggtgggcttccagcaagtcggtgtggagacctatggtggtgggatctggagcacctggtttgaccgtgacctgactctggctggacgcgtcattgtcaagtgccctacctcaggtcggctggagcagcagctggtgcacgtggagcggcccattcttcgcatcccacacctggccatccatctgcagcgaaatatcaacgagaactttgggcccaacacagagatgcatctagtccccattcttgccacagccatccaggaggagctggagaaggggactcctgagccagggcctctcaatgctgtggtcttgggtggtgcctatgatgagttcatctttgctcctcggctggacaatctgcacagctgcttctgtgccctgcaggccttgatagattcctgtgcaggccctggctccctggccacagagcctcacgtgcgcatggtcacactctatgacaacgaagaggtggggtctgagagtgcacagggagcacagtcactgctgacagagctggtgctgcggcggatctcagcctcgtgccagcacccgacagccttcgaggaagccatacccaagtccttcatgatcagcgcagacatggcccatgctgtgcatcccaactacctggacaagcatgaggagaaccaccggcctttattccacaagggccccgtgatcaaggtgaacagcaagcaacgctatgcttcaaacgcggtgtcagaggccctgatccgagaggtggccaacaaagtcaaggtccccctgcaggatctcatggtccggaatgacaccccctgtggaaccaccattggacctatcttggcttctcggctggggctgcgggtgctggatttaggcagcccccaactggccatgcactctatccgggagatggcctgcaccacaggagtcctccagaccctcaccctcttcaagggcttctttgagctgttcccttctctaagccataatctcttagtggattgagccctcttggaaagacttctctgccatccctttgcacctgagaggggaagttctcagctgagctgaagctggattattaaagtggattgtcactcaga

SEQ ID NO: 277755 - DNA, 2095 bp, Homo sapiens
gaggccaaacatggggcggggcggcgcggccggggaagcgtgatgaaggcctacgagtgcggcgcggcctgaaggggcacgcgggggacctgcaaagctagtgaggggcggggcaggcggcgcggtgggggcgggccgagcccggaggccagatgagcggacacagccccacgcgcggggccatgcaggtggccatgaacggtaaggcccgcaaagaggcggtgcagactgcggctaaggaactcctcaagttcgtgaaccggagtccctctcctttccatgctgtggctgaatgccgcaaccgccttctccaggctggcttcagtgaactcaaggagactgagaaatggaatattaagcccgagagcaagtacttcatgaccaggaactcctccaccatcatagcttttgctgtagggggccagtacgttcctggcaatggcttcagcctcatcggggcccacacggacagcccctgcctccgggtgaaacgtcggtctcgccgcagccaggtgggcttccagcaagtcggtgtggagacctatggtggtgggatctggagcacctggtttgaccgtgacctgactctggctggacgcgtcattgtcaagtgccctacctcaggtcggctggagcagcagctggtgcacgtggagcggcccattcttcgcatcccacacctggccatccatctgcagcgaaatatcaacgagaactttgggcccaacacagagatgcatctagtccccattcttgccacagccatccaggaggagctggagaaggggactcctgagccagggcctctcaatgctgtggatgagcggcaccattcggtcctcatgtccctgctctgtgcccatctggggctgagccccaaggacatagtggagatggagctctgccttgcagacacccagcctgcggtcttgggtggtgcctatgatgagttcatctttgctcctcggctggacaatctgcacagctgcttctgtgccctgcaggccttgatagattcctgtgcaggccctggctccctggccacagagcctcacgtgcgcatggtcacactctatgacaacgaagagggcttctttgagctgttcccttctctaagccataatctcttagtggattgagccctcttggaaagacttctctgccatccctttgcacctgagaggggaagttctcagctgagctgaagctggattattaaagtggattgtcactcagactctccgtgctacgcttatttggagactagaggagtgggagttgagcctggcttgaacctttggaaccagaaaagttggggagcaggtggaggaggccacactcctgggagctgatggttttaaatctggttttaaatctcttctctgtctcaagtccatgtctgaagtgggtgaagggtggactggatcctcaagcagaaggtcacttctcccacccctagtcctccacctgggaaatggcctcaacggtcttccctctttccatccccagaatgggtgtcccgctctgccttcagagatcctgttctgcactgggccaccttcagagctgctctgggcagacaaagctgtttctcaccctcccaaaatcccttcccatcccctctcaggagctgcaaagagaagggcacagtctatatcttatcacccttcatcatccacttctcagcagtccctggtattacttgattgtgaacatattatcaggaaaaaagattatcattgaaaaaattggaaaagtcaaagtctggccgggtgcagcggctcacatctgtattcccagcattttgggaggccaaggcaggtggatcacttgaggtcagagttcaagaccagccttgccaacatggtgaaacccatctctacttaaaaaaaaatacaaaaaaattagccaggcatggtggcacacacctgtaatctcagctattcaggagactgaggcaggagaatagcttgaaccaaggaggcgtaggttgcagtgagctgagatggagccaccacactccagcctgggcaacagagcaaggctctgtctcagagaaaaaaggccaggcgtgatgggtcatgcctgtagtccc

SEQ ID NO: 277756 - DNA, 1237 bp, Homo sapiens
gaggccaaacatggggcggggcggcgcggccggggaagcgtgatgaaggcctacgagtgcggcgcggcctgaaggggcacgcgggggacctgcaaagctagtgaggggcggggcaggcggcgcggtgggggcgggccgagcccggaggccagatgagcggacacagccccacgcgcggggccatgcaggtggccatgaacggtaaggcccgcaaagaggcggtgcagactgcggctaaggaactcctcaagttcgtgaaccggagtccctctcctttccatgctgtggctgaatgccgcaaccgccttctccaggctggcttcagtgaactcaaggagactgagaaatggaatattaagcccgagagcaagtacttcatgaccaggaactcctccaccatcatagcttttgctgtagggggccagtacgttcctggcaatggcttcagcctcatcggggcccacacggacagcccctgcctccgggtgaaacgtcggtctcgccgcagccaggtgggcttccagcaagtcggtgtggagacctatggtggtgggatctggagcacctggtttgaccgtgacctgactctggctggacgcgtcattgtcaagtgccctacctcaggtcggctggagcagcagctggtgcacgtggagcggcccattcttcgcatcccacacctggccatccatctgcagcgaaatatcaacgagaactttgggcccaacacagagatgcatctagtccccattcttgccacagccatccaggaggagctggagaaggggactcctgagccagggcctctcaatgctgtggatgagcggcaccattcggtcctcatgtccctgctctgtgcccatctggggctgagccccaaggacatagtggagatggagctctgccttgcagacacccagcctgcggtcttgggtggtgcctatgatgagttcatctttgctcctcggctggacaatctgcacagctgcttctgtgccctgcaggccttgatagattcctgtgcaggccctggctccctggccacagagcctcacgtgcgcatggtcacactctatgacaacgaagagggcttctttgagctgttcccttctctaagccataatctcttagtggattgagccctcttggaaagacttctctgccatccctttgcacctgagaggggaagttctcagctgagctgaagctggattattaaagtggattgtcactcaga

SEQ ID NO: 277757 - DNA, 831 bp, Homo sapiens
ggaaacccaccagtactgttaagaatgtgagttagtttggtctcagcccactgtctggtgttcagtgacgaccccaggttaggggtgttgctaagaacacccagtgactcagtggggttttgggccagttgggcaatgggcccctctcactggcttccaagatcaggcccctaagcccagattcccagagtcaggactctactgtcgccaggtggggtctgagagtgcacagggagcacagtcactgctgacagagctggtgctgcggcggatctcagcctcgtgccagcacccgacagccttcgaggaagccatacccaagtccttcatgatcagcgcagacatggcccatgctgtgcatcccaactacctggacaagcatgaggagaaccaccggcctttattccacaagggccccgtgatcaaggtgaacagcaagcaacgctatgcttcaaacgcggtgtcagaggccctgatccgagaggtggccaacaaagtcaaggtccccctgcaggatctcatggtccggaatgacaccccctgtggaaccaccattggacctatcttggcttctcggctggggctgcgggtgctggatttaggcagcccccaactggccatgcactctatccgggagatggcctgcaccacaggagtcctccagaccctcaccctcttcaagggcttctttgagctgttcccttctctaagccataatctcttagtggattgagccctcttggaaagacttctctgccatccctttgcacctgagaggggaagttctcagctgagctgaagctggattattaaagtggattgtcactcaga

SEQ ID NO: 277758 - DNA, 1440 bp, Homo sapiens
tgtggaatacacctttgtctacaaacttgtttccatctattgctagaggctgcccggaaccctgtgtgtggaatgactctgaagtcccactgggctgggcgggaaagagtggtgatctattagtgatgtctgccatgggagggtggtgagtgtcgacaggcctgctcctgtttgctatgtctggcccttatctgtctcttacagggacaagcatgaggagaaccaccggcctttattccacaagggccccgtgatcaaggtgaacagcaagcaacgctatgcttcaaacgcggtgtcagaggccctgatccgagaggtggccaacaaagtcaaggtccccctgcaggatttaggcagcccccaactggccatgcactctatccgggagatggcctgcaccacaggagtcctccagaccctcaccctcttcaagggcttctttgagctgttcccttctctaagccataatctcttagtggattgagccctcttggaaagacttctctgccatccctttgcacctgagaggggaagttctcagctgagctgaagctggattattaaagtggattgtcactcagactctccgtgctacgcttatttggagactagaggagtgggagttgagcctggcttgaacctttggaaccagaaaagttggggagcaggtggaggaggccacactcctgggagctgatggttttaaatctggttttaaatctcttctctgtctcaagtccatgtctgaagtgggtgaagggtggactggatcctcaagcagaaggtcacttctcccacccctagtcctccacctgggaaatggcctcaacggtcttccctctttccatccccagaatgggtgtcccgctctgccttcagagatcctgttctgcactgggccaccttcagagctgctctgggcagacaaagctgtttctcaccctcccaaaatcccttcccatcccctctcaggagctgcaaagagaagggcacagtctatatcttatcacccttcatcatccacttctcagcagtccctggtattacttgattgtgaacatattatcaggaaaaaagattatcattgaaaaaattggaaaagtcaaagtctggccgggtgcagcggctcacatctgtattcccagcattttgggaggccaaggcaggtggatcacttgaggtcagagttcaagaccagccttgccaacatggtgaaacccatctctacttaaaaaaaaatacaaaaaaattagccaggcatggtggcacacacctgtaatctcagctattcaggagactgaggcaggagaatagcttgaaccaaggaggcgtaggttgcagtgagctgagatggagccaccacactccagcctgggcaacagagcaaggctctgtctcagagaaaaaaggccaggcgtgatgggtcatgcctgtagtccc

SEQ ID NO: 277759 - DNA, 138 bp, Homo sapiens
gtggcaggacatctccatctggtcactcactaattccaaactccatgttgcctcccattatggcttctttgagctgttcccttctctaagccataatctcttagtggattgagccctcttggaaagacttctctgcca

SEQ ID NO: 277760 - DNA, 2485 bp, Homo sapiens
gaggccaaacatggggcggggcggcgcggccggggaagcgtgatgaaggcctacgagtgcggcgcggcctgaaggggcacgcgggggacctgcaaagctagtgaggggcggggcaggcggcgcggtgggggcgggccgagcccggaggccagatgagcggacacagccccacgcgcggggccatgcaggtggccatgaacggtaaggcccgcaaagaggcggtgcagactgcggctaaggaactcctcaagttcgtgaaccggagtccctctcctttccatgctgtggctgaatgccgcaaccgccttctccaggctggcttcagtgaactcaaggagactgagaaatggaatattaagcccgagagcaagtacttcatgaccaggaactcctccaccatcatagcttttgctgtagggggccagtacgttcctggcaatggcttcagcctcatcggggcccacacggacagcccctgcctccgggtgaaacgtcggtctcgccgcagccaggtgggcttccagcaagtcggtgtggagacctatggtggtgggatctggagcacctggtttgaccgtgacctgactctggctggacgcgtcattgtcaagtgccctacctcaggtcggctggagcagcagctggtgcacgtggagcggcccattcttcgcatcccacacctggccatccatctgcagcgaaatatcaacgagaactttgggcccaacacagagatgcatctagtccccattcttgccacagccatccaggaggagctggagaaggggactcctgagccagggcctctcaatgctgtggatgagcggcaccattcggtcctcatgtccctgctctgtgcccatctggggctgagccccaaggacatagtggagatggagctctgccttgcagacacccagcctgcggtcttgggtggtgcctatgatgagttcatctttgctcctcggctggacaatctgcacagctgcttctgtgccctgcaggccttgatagattcctgtgcaggccctggctccctggccacagagcctcacgtgcgcatggtcacactctatgacaacgaagaggtggggtctgagagtgcacagggagcacagtcactgctgacagagctggtgctgcggcggatctcagcctcgtgccagcacccgacagccttcgaggaagccatacccaagtccttcatgatcagcgcagacatggcccatgctgtgcatcccaactacctggacaagcatgaggagaaccaccggcctttattccacaagggccccgtgatcaaggtgaacagcaagcaacgctatgcttcaaacgcggtgtcagaggccctgatccgagaggtggccaacaaagtcaaggtccccctgcaggatttaggcagcccccaactggccatgcactctatccgggagatggcctgcaccacaggagtcctccagaccctcaccctcttcaagggcttctttgagctgttcccttctctaagccataatctcttagtggattgagccctcttggaaagacttctctgccatccctttgcacctgagaggggaagttctcagctgagctgaagctggattattaaagtggattgtcactcagactctccgtgctacgcttatttggagactagaggagtgggagttgagcctggcttgaacctttggaaccagaaaagttggggagcaggtggaggaggccacactcctgggagctgatggttttaaatctggttttaaatctcttctctgtctcaagtccatgtctgaagtgggtgaagggtggactggatcctcaagcagaaggtcacttctcccacccctagtcctccacctgggaaatggcctcaacggtcttccctctttccatccccagaatgggtgtcccgctctgccttcagagatcctgttctgcactgggccaccttcagagctgctctgggcagacaaagctgtttctcaccctcccaaaatcccttcccatcccctctcaggagctgcaaagagaagggcacagtctatatcttatcacccttcatcatccacttctcagcagtccctggtattacttgattgtgaacatattatcaggaaaaaagattatcattgaaaaaattggaaaagtcaaagtctggccgggtgcagcggctcacatctgtattcccagcattttgggaggccaaggcaggtggatcacttgaggtcagagttcaagaccagccttgccaacatggtgaaacccatctctacttaaaaaaaaatacaaaaaaattagccaggcatggtggcacacacctgtaatctcagctattcaggagactgaggcaggagaatagcttgaaccaaggaggcgtaggttgcagtgagctgagatggagccaccacactccagcctgggcaacagagcaaggctctgtctcagagaaaaaaggccaggcgtgatgggtcatgcctgtagtccc

SEQ ID NO: 277761 - DNA, 1483 bp, Homo sapiens
ttatttcattgccgggcggccttagtgtagttactggcccgtcgtttgtacattatgctgtggctgaatgccgcaaccgccttctccaggctggcttcagtgaactcaaggagactgagaaatggaatattaagcccgagagcaagtacttcatgaccaggaactcctccaccatcatagcttttgctgtagggggccagtacgttcctggcaatggcttcagcctcatcggggcccacacggacagcccctgcctccgggtgaaacgtcggtctcgccgcagccaggtgggcttccagcaagtcggtgtggagacctatggtggtgggatctggagcacctggtttgaccgtgacctgactctggctggacgcgtcattgtcaagtgccctacctcaggtcggctggagcagcagctggtgcacgtggagcggcccattcttcgcatcccacacctggccatccatctgcagcgaaatatcaacgagaactttgggcccaacacagagatgcatctagtccccattcttgccacagccatccaggaggagctggagaaggggactcctgagccagggcctctcaatgctgtggatgagcggcaccattcggtcctcatgtccctgctctgtgcccatctggggctgagccccaaggacatagtggagatggagctctgccttgcagacacccagcctgcggtcttgggtggtgcctatgatgagttcatctttgctcctcggctggacaatctgcacagctgcttctgtgccctgcaggccttgatagattcctgtgcaggccctggctccctggccacagagcctcacgtgcgcatggtcacactctatgacaacgaagaggtggggtctgagagtgcacagggagcacagtcactgctgacagagctggtgctgcggcggatctcagcctcgtgccagcacccgacagccttcgaggaagccatacccaagtccttcatgatcagcgcagacatggcccatgctgtgcatcccaactacctggacaagcatgaggagaaccaccggcctttattccacaagggccccgtgatcaaggtgaacagcaagcaacgctatgcttcaaacgcggtgtcagaggccctgatccgagaggtggccaacaaagtcaaggtccccctgcaggatctcatggtccggaatgacaccccctgtggaaccaccattggacctatcttggcttctcggctggggctgcgggtgctggatttaggcagcccccaactggccatgcactctatccgggagatggcctgcaccacaggagtcctccagaccctcaccctcttcaagggcttctttgagctgttcccttctctaagccataatctcttagtggattgagccctcttggaaagacttctctgccatccctttgcacctgagaggggaagttctcagctgagctgaagctggattattaaagtggattgtcactcaga

SEQ ID NO: 277762 - DNA, 1649 bp, Homo sapiens
gaggccaaacatggggcggggcggcgcggccggggaagcgtgatgaaggcctacgagtgcggcgcggcctgaaggggcacgcgggggacctgcaaagctagtgaggggcggggcaggcggcgcggtgggggcgggccgagcccggaggccagatgagcggacacagccccacgcgcggggccatgcaggtggccatgaacggtaaggcccgcaaagaggcggtgcagactgcggctaaggaactcctcaagttcgtgaaccggagtccctctcctttccatgctgtggctgaatgccgcaaccgccttctccaggctggcttcagtgaactcaaggagactgagaaatggaatattaagcccgagagcaagtacttcatgaccaggaactcctccaccatcatagcttttgctgtagggggccagtacgttcctggcaatggcttcagcctcatcggggcccacacggacagcccctgcctccgggtgaaacgtcggtctcgccgcagccaggtgggcttccagcaagtcggtgtggagacctatggtggtgggatctggagcacctggtttgaccgtgacctgactctggctggacgcgtcattgtcaagtgccctacctcaggtcggctggagcagcagctggtgcacgtggagcggcccattcttcgcatcccacacctggccatccatctgcagcgaaatatcaacgagaactttgggcccaacacagagatgcatctagtccccattcttgccacagccatccaggaggagctggagaaggggactcctgagccagggcctctcaatgctgtggatgagcggcaccattcggtcctcatgtccctgctctgtgcccatctggggctgagccccaaggacatagtggagatggagctctgccttgcagacacccagcctgcggtcttgggtggtgcctatgatgagttcatctttgctcctcggctggacaatctgcacagctgcttctgtgccctgcaggccttgatagattcctgtgcaggccctggctccctggccacagagcctcacgtgcgcatggtcacactctatgacaacgaagaggtggggtctgagagtgcacagggagcacagtcactgctgacagagctggtgctgcggcggatctcagcctcgtgccagcacccgacagccttcgaggaagccatacccaagtccttcatgatcagcgcagacatggcccatgctgtgcatcccaactacctggacaagcatgaggagaaccaccggcctttattccacaagggcccgtgatcaaggtggcaaaggccccaacgttgtaggccctacgggctactacaacccttcggtgacgccataaaaactcttcaccaaagagcccttaaacccgcaaatctaccatcaacctttaaatcaacggccgacttagctttcaacatcgtcttattattgaaacccccctccatagcgaaccccgggtcaactacactaaggtctatttattgaggcccttacgagcgggcacccacccctgccaggggggaaccgctgccgtggccggcgacgccccacactcttcgcccattttgagtgccacacgcgccgcgcaaaagcacaaacaacaaggggcacggcgccgcatga

SEQ ID NO: 277763 - DNA, 1121 bp, Homo sapiens
gaggccaaacatggggcggggcggcgcggccggggaagcgtgatgaaggcctacgagtgcggcgcggcctgaaggggcacgcgggggacctgcaaagctagtgaggggcggggcaggcggcgcggtgggggcgggccgagcccggaggccagatgagcggacacagccccacgcgcggggccatgcaggtggccatgaacggtaaggcccgcaaagaggcggtgcagactgcggctaaggaactcctcaagttcgtgaaccggagtccctctcctttccatgctgtggctgaatgccgcaaccgccttctccaggctggcttcagtgaactcaaggagactgagaaatggaatattaagcccgagagcaagtacttcatgaccaggaactcctccaccatcatagcttttgctgtagggggccagtacgttcctggcaatggcttcagcctcatcggggcccacacggacagcccctgcctccgggtgaaacgtcggtctcgccgcagccaggtgggcttccagcaagtcggtgtggagacctatggtggtgggatctggagcacctggtttgaccgtgacctgactctggctggacgcgtcattgtcaagtgccctacctcaggtcggctggagcagcagctggtgcacgtggagcggcccattcttcgcatcccacacctggccatccatctgcagcgaaatatcaacgagaactttgggcccaacacagagatgcatctagtccccattcttgccacagccatccaggaggagctggagaaggggactcctgagccagggcctctcaatgctgtggatgagcggcaccattcggtcctcatgtccctgctctgtgcccatctggggctgagccccaaggacatagtggagatggagctctgccttgcagacacccagcctgcggtcttgggtggtgcctatgatgagttcatctttgctcctcggctggacaatctgcacagctgcttctgtgccctgcaggccttgataagattcctgtgcaaggcctgggtcctggcaagaacctcaagtgggctgtttccactctatgaaacaaaagtggggctaaatgcccaggccagcctgctgaaaactgtg

SEQ ID NO: 277764 - DNA, 469 bp, Homo sapiens
cattccctttgggcctgtcattacctctgcctcaccttgactctccccagggccccgtgatcaaggtgaacagcaagcaacgctatgcttcaaacgcggtgtcagaggccctgatccgagaggtggccaacaaagtcaaggtccccctgcaggatctcatggtccggaatgacaccccctgtggaaccaccattggacctatcttggcttctcggctggggctgcgggtgctggatttaggcagcccccaactggccatgcactctatccgggagatggcctgcaccacaggagtcctccagaccctcaccctcttcaagggcttctttgagctgttcccttctctaagccataatctcttagtggattgagccctcttggaaagacttctctgccatccctttgcacctgagaggggaagttctcagctgagctgaagctggattattaaagtggattgtcactcaga

SEQ ID NO: 277765 - DNA, 418 bp, Homo sapiens
ttgcctaggctggtcttgaacttctggcctcaagaaatcctcctcctgatcctcctacctcagccttccaaagtgttgggattacagcactggctagaacttccatccctgtggtgaataagagtgatgaaagtggacaccatcgtattattgaattgaagggacacctctgaaaacgtgtttagagagagagtgaagaatgagggtgtacctggcggagccaccatcctctgccacttctgaaacaagcaggtcttcaggcagtctcggggactgaggttgtaagttttatgtctcgacatcagttcctgcattggctccaatattacacacaactgcaagaagttcaaagacattggcatttcactacttcataacactaattacaataaataatgctaacagctggaatcaagta

SEQ ID NO: 277766 - DNA, 367 bp, Homo sapiens
ttactggcttttctttcttccctgtctcagatttctcacttcctcacaggacgtgtgggatcatctcccagatgaactaccagttcctaagtatttgtctgaagcactggctagaacttccatccctgtggtgaataagagtgatgaaagtggacaccatcgtattattgaattgaagggattcaaacctcttctgtgataatcatagaactgtagcatcagaaggcaattccctaagtgtggtctgcccacatccctggtggtaagccaaatgatcgtaagtggtagagcggcaattacttttaaaaaatttgacagtcatatatctatttcaatgtatagcaaatatagaattggaacatcaaac

SEQ ID NO: 277767 - DNA, 875 bp, Homo sapiens
gcgtcaagatcacggaattccaggctgggcgcagtggctcacgcctgtaatcccagcactttgggaggctgagaatatggggaagaaaaatgtcagctccagccaaagcccagcaccatcgcccttacccagaacactgtatgctacaagaatccatccacctacaccccttctccacctgggtgtctctcagacccagaaaatggtgccattggcccactgacaactaaatgtggggacaggtctcttacaagccactgggtagtaaaagcatcctgaggtggcataccatatcgcataattgcattaagaaaggcttttcgctgacgagcattaaaaccaagtacctaggggaagaagaaacccaggtgagaggcagcaggtcgcattccaccaaagatgcaatatctgacactcacccctccttagaatcgtatggcacttacttcaatattcccaccaacacgggccaacagaggaggcaatggcttatctttatcattccgcaggcccttacgactgggcctacggggagctgcaagaagaaaaagatgaatgagtgacacaggtaggatattaaacaaagcaacatttagaaaagcaacaaaaaaagcacagccctcaccttctgaacgttcatcaaagtcttcatcaccttcctctgaagccactgagtaatcggactggttgtcggactggtcgtcctgccaatctggagggagagagggcagatgagcggggcccactgctctagtggaacggcccatgggtggggggcggggccggccacacacacctcggtcctcctgggagccatcattgtagttgacctgtttacggattctttttcctttgcccagatttcgggctagatc

SEQ ID NO: 277768 - DNA, 751 bp, Homo sapiens
tttttttttgaagaatatgaacaacaaacaaatgttcaggaaatatgtgaaaaagaacagaatataaaactttatataatattccaattgtgtatgtacatagaaaagaagccaaaatataaaacaaattaacaattggtgcttctaattgaattatatattatttcatcgcctacaacataaatcactcccctttatttgtccttaaaagcatctctcttcatactttagaaggaacttcctagttctagcacttcaaaaagaacattataaattattttccatcaaaactttgatatagttaaacctataagataaccatcaattataatttctatttatttcccgttcagataagcacttcataaatgtttgctgacagattacaaaaattgtgcgcaaggactcactcacctcgacttgatccctttaaaaatctctaatacataagctgaaggctataaaggaaggattaataccattagtgatactcttggttggtttctactaaagttctctaatttctatctcctataaaacaggaacccctccttcttacttcagaaaaagtattctaaaatggcaagatctgcatgagtttagagtcagtcagatctgggttgacaactgaactctgccccttaccaactatgctacaagtcaagccagattccttatctataaggtgaagataccctgactcacaaaattactgtgatgagacatgcaataaaatactaattagagatta

SEQ ID NO: 277769 - DNA, 669 bp, Homo sapiens
gtagacctacatgtttgtaggctgaagagagtggagcagaagatatatattaaaaatatgaatgagtagaagtgattgaaactgcaatatccaaaacagggcaaaagaataataaaaaacagagctgaagggttagtcttggcaagggagaagctgaagatagctgatgattcagatattccgaggtgaaggagaaagttaaaggaacttgtgtcagatagcactgatgtcaataaatgaagtttagttcatttgttcatttatgctttcaaagatgccgaaacgcctgcctttatgtagcttacattccagtgggaggacagacaatacataaactgttttaacaagcagcaattatgataaacgaccaaaagactttccccagggaaaagaaaatccaatggtccagagaacttctacaatttattcctccacacttggagtcttcatgtctcgtaaagtttctccacattagtttcttctcggtacaactcaatagcctccataatcctctcagcctacagaggatgagaaaggaaagaagtcatcacaacatactccatcatcccaggacactgaaactggaagaactgaccagaaatttgccaaatgaaatagcttcaatctgtttaataaagacgtgcgaatagagtgccaaaaagcaaaaaa

SEQ ID NO: 277770 - DNA, 1923 bp, Homo sapiens
ttccatgaagcatcaccatgcaagtaaaaaggaagatacaattgtccctctaatctccggtcaaggtcatggaaacacttccctcagttgagaaaaaaactccaggacctccgtttggtactcagatttggaaaggcctttgcattgagtccaagcagctagtgagtgccccgggtgccatactcaagagccccagtgtgctacagatgcgccaattcattcagcatgaggtcataaagaatgaggtgaaactgaggctgcaggtttcccttaaggattacataaactatattctaaagaaagaagatgagctgcaggaaatgatggttaaagattccagaactgaggaggagagaggcaatgctgctgatctcctcaagctggttatgtctttccctaaaatggaggaaactacaaaaagtcatgttactgaagttgcagctcacctaactgatttattcaagcagtctttggctacgcctccaaaatgcccaccagacacatttggtaaagatttctttgaaaagacatggagacacacagcatcctcaaaacgctggaaagaaaagatagacaaaacgaggaaggaaattgagacaacacagaattacctaatggatattaagaaccgcataataccacccttttttaaatctgaattgaaccagttatatcagtctcagtataatcacctggacagtctttccaaaaaactgccttcttttacaaagaaaaatgaagatgcaaacgaaacagctgttcaagatacatctgatcttaatctagatttcaagccacataaggtttcagaacagaaatcctcaagtgtgcctagtcttccaaaaccagagatttctgcagataagaaggatttcactgctcagaaccaaactgaaaatttaacaaaatctcctgaagaagcagaatcttatgagcccgtgaaaattccaacccagtccttgctgcaggatgttgcgggacaaacaagaaaagaaaaagtgaagttgcctcattatttgctgagttccaagcctaagtctcaacctcttgcaaaggtgcaagattctgttggaggaaaagtgaacacatcctctgttgcatctgctgccattaataatgcaaagtcatccctttttgggttccatcttctcccatcatcagtcaagtttggagtgcttaaggaaggacatacctatgccacagttgtaaagctcaagaatgttggagtggacttctgcaggtttaaagtaaagcagcccccacccagcacaggactgaaagtgacttacaaacctggacctgtggcagctggtatgcagacagaactgaatatagagttatttgccacagctgttggagaggatggggccaagggatcagcacacatctctcacaatatcgagattatgacagagcatgaggttctgttcctacctgtggaagcaactgttttaacaagcagcaattatgataaacgaccaaaagactttccccagggaaaagaaaatccaatggtccagagaacttctacaatttattcctccacacttggagtcttcatgtctcgtaaagtttctccacattaggaacccctccttcttacttcagaaaaagtattctaaaatggcaagatctgcatgagtttagagtcagtcagatctgggttgacaactgaactctgccccttaccaactatgctacaagtcaagccagattccttatctataagtttcttctcggtacaactcaatagcctccataatcctctcagcctacagaggatgagaaaggaaagaagtcatcacaacatactccatcatcccaggacactgaaactggaagaactgaccagaaatttgccaaatgaaatagcttcaatctgtttaataaagacgtgcgaatagagtgccaaaaagcaaaaaa

SEQ ID NO: 277771 - DNA, 1804 bp, Homo sapiens
ttccatgaagcatcaccatgcaagtaaaaaggaagatacaattgtccctctaatctccggtcaaggtcatggaaacacttccctcagttgagaaaaaaactccaggacctccgtttggtactcagatttggaaaggcctttgcattgagtccaagcagctagtgagtgccccgggtgccatactcaagagccccagtgtgctacagatgcgccaattcattcagcatgaggtcataaagaatgaggtgaaactgaggctgcaggtttcccttaaggattacataaactatattctaaagaaagaagatgagctgcaggaaatgatggttaaagattccagaactgaggaggagagaggcaatgctgctgatctcctcaagctggttatgtctttccctaaaatggaggaaactacaaaaagtcatgttactgaagttgcagctcacctaactgatttattcaagcagtctttggctacgcctccaaaatgcccaccagacacatttggtaaagatttctttgaaaagacatggagacacacagcatcctcaaaacgctggaaagaaaagatagacaaaacgaggaaggaaattgagacaacacagaattacctaatggatattaagaaccgcataataccacccttttttaaatctgaattgaaccagttatatcagtctcagtataatcacctggacagtctttccaaaaaactgccttcttttacaaagaaaaatgaagatgcaaacgaaacagctgttcaagatacatctgatcttaatctagatttcaagccacataaggtttcagaacagaaatcctcaagtgtgcctagtcttccaaaaccagagatttctgcagataagaaggatttcactgctcagaaccaaactgaaaatttaacaaaatctcctgaagaagcagaatcttatgagcccgtgaaaattccaacccagtccttgctgcaggatgttgcgggacaaacaagaaaagaaaaagtgaagttgcctcattatttgctgagttccaagcctaagtctcaacctcttgcaaaggtgcaagattctgttggaggaaaagtgaacacatcctctgttgcatctgctgccattaataatgcaaagtcatccctttttgggttccatcttctcccatcatcagtcaagtttggagtgcttaaggaaggacatacctatgccacagttgtaaagctcaagaatgttggagtggacttctgcaggtttaaagtaaagcagcccccacccagcacaggactgaaagtgacttacaaacctggacctgtggcagctggtatgcagacagaactgaatatagagttatttgccacagctgttggagaggatggggccaagggatcagcacacatctctcacaatatcgagattatgacagagcatgaggttctgttcctacctgtggaagcaactgttttaacaagcagcaattatgataaacgaccaaaagactttccccagggaaaagaaaatccaatggtccagagaacttctacaatttattcctccacacttggagtcttcatgtctcgtaaagtttctccacattagctttgtgttccttcatttttgcagtttcttctcggtacaactcaatagcctccataatcctctcagcctacagaggatgagaaaggaaagaagtcatcacaacatactccatcatcccaggacactgaaactggaagaactgaccagaaatttgccaaatgaaatagcttcaatctgtttaataaagacgtgcgaatagagtgccaaaaagcaaaaaa

SEQ ID NO: 277772 - DNA, 812 bp, Homo sapiens
gtagacctacatgtttgtaggctgaagagagtggagcagaagatatatattaaaaatatgaatgagtagaagtgattgaaactgcaatatccaaaacagggcaaaagaataataaaaaacagagctgaagggttagtcttggcaagggagaagctgaagatagctgatgattcagatattccgaggtgaaggagaaagttaaaggaacttgtgtcagatagcactgatgtcaataaatgaagtttagttcatttgttcatttatgctttcaaagatgccgaaacgcctgcctttatgtagcttacattccagtgggaggacagacaatacataaactgttttaacaagcagcaattatgataaacgaccaaaagactttccccagggaaaagaaaatccaatggtccagagaacttctacaatttattcctccacacttggagtcttcatgtctcgtaaagtttctccacattaggaacccctccttcttacttcagaaaaagtattctaaaatggcaagatctgcatgagtttagagtcagtcagatctgggttgacaactgaactctgccccttaccaactatgctacaagtcaagccagattccttatctataagtttcttctcggtacaactcaatagcctccataatcctctcagcctacagaggatgagaaaggaaagaagtcatcacaacatactccatcatcccaggacactgaaactggaagaactgaccagaaatttgccaaatgaaatagcttcaatctgtttaataaagacgtgcgaatagagtgccaaaaagcaaaaaa

SEQ ID NO: 277773 - DNA, 1780 bp, Homo sapiens
ttccatgaagcatcaccatgcaagtaaaaaggaagatacaattgtccctctaatctccggtcaaggtcatggaaacacttccctcagttgagaaaaaaactccaggacctccgtttggtactcagatttggaaaggcctttgcattgagtccaagcagctagtgagtgccccgggtgccatactcaagagccccagtgtgctacagatgcgccaattcattcagcatgaggtcataaagaatgaggtgaaactgaggctgcaggtttcccttaaggattacataaactatattctaaagaaagaagatgagctgcaggaaatgatggttaaagattccagaactgaggaggagagaggcaatgctgctgatctcctcaagctggttatgtctttccctaaaatggaggaaactacaaaaagtcatgttactgaagttgcagctcacctaactgatttattcaagcagtctttggctacgcctccaaaatgcccaccagacacatttggtaaagatttctttgaaaagacatggagacacacagcatcctcaaaacgctggaaagaaaagatagacaaaacgaggaaggaaattgagacaacacagaattacctaatggatattaagaaccgcataataccacccttttttaaatctgaattgaaccagttatatcagtctcagtataatcacctggacagtctttccaaaaaactgccttcttttacaaagaaaaatgaagatgcaaacgaaacagctgttcaagatacatctgatcttaatctagatttcaagccacataaggtttcagaacagaaatcctcaagtgtgcctagtcttccaaaaccagagatttctgcagataagaaggatttcactgctcagaaccaaactgaaaatttaacaaaatctcctgaagaagcagaatcttatgagcccgtgaaaattccaacccagtccttgctgcaggatgttgcgggacaaacaagaaaagaaaaagtgaagttgcctcattatttgctgagttccaagcctaagtctcaacctcttgcaaaggtgcaagattctgttggaggaaaagtgaacacatcctctgttgcatctgctgccattaataatgcaaagtcatccctttttgggttccatcttctcccatcatcagtcaagtttggagtgcttaaggaaggacatacctatgccacagttgtaaagctcaagaatgttggagtggacttctgcaggtttaaagtaaagcagcccccacccagcacaggactgaaagtgacttacaaacctggacctgtggcagctggtatgcagacagaactgaatatagagttatttgccacagctgttggagaggatggggccaagggatcagcacacatctctcacaatatcgagattatgacagagcatgaggttctgttcctacctgtggaagcaactgttttaacaagcagcaattatgataaacgaccaaaagactttccccagggaaaagaaaatccaatggtccagagaacttctacaatttattcctccacacttggagtcttcatgtctcgtaaagtttctccacattagtttcttctcggtacaactcaatagcctccataatcctctcagcctacagaggatgagaaaggaaagaagtcatcacaacatactccatcatcccaggacactgaaactggaagaactgaccagaaatttgccaaatgaaatagcttcaatctgtttaataaagacgtgcgaatagagtgccaaaaagcaaaaaa

SEQ ID NO: 277774 - DNA, 1334 bp, Homo sapiens
ttccatgaagcatcaccatgcaagtaaaaaggaagatacaattgtccctctaatctccggtcaaggtcatggaaacacttccctcagttgagaaaaaaactccaggacctccgtttggtactcagatttggaaaggcctttgcattgagtccaagcagctagtgagtgccccgggtgccatactcaagagccccagtgtgctacagatgcgccaattcattcagcatgaggtcataaagaatgaggtgaaactgaggctgcaggtttcccttaaggattacataaactatattctaaagaaagaagatgagctgcaggaaatgatggttaaagattccagaactgaggaggagagaggcaatgctgctgatctcctcaagctggttatgtctttccctaaaatggaggaaactacaaaaagtcatgttactgaagttgcagctcacctaactgatttattcaagcagtctttggctacgcctccaaaatgcccaccagacacatttggtaaagatttctttgaaaagacatggagacacacagcatcctcaaaacgctggaaagaaaagatagacaaaacgaggaaggaaattgagacaacacagaattacctaatggatattaagaaccgcataataccacccttttttaaatctgaattgaaccagttatatcagtctcagtataatcacctggacagtctttccaaaaaactgccttcttttacaaagaaaaatgaagatgcaaacgaaacagctgttcaagatacatctgatcttaatctagatttcaagccacataaggtttcagaacagaaatcctcaagtgtgcctagtcttccaaaaccagagatttctgcagataagaaggatttcactgctcagaaccaaactgaaaatttaacaaaatctcctgaagaagcagaatcttatgagcccgtgaaaattccaacccagtccttgctgcaggatgttgcgggacaaacaagaaaagaaaaagtgaagttgcctcattatttgctgagttccaagcctaagtctcaacctcttgcaaaggtgcaagattctgttggaggaaaagtgaacacatcctctgttgcatctgctgccattaataatgcaaagtcatccctttttgggttccatcttctcccatcatcagtcaagtttggagtgcttaaggaaggacatacctatgccacagttgtaaagctcaagaatgttggagtggacttctgcaggtgaggccaagggaccaaaggtctgctcaggttacctttccctaccctgtgacttgtctttggtcacctccatcaataaatgtttattgaaccg

SEQ ID NO: 277775 - DNA, 1077 bp, Homo sapiens
tttttttttttaaaaccgctttattcaggttggctggtagtcacagactggatcatgtatacagggcaacccacccctaggcaaagccctcggcctctcccacctcccccacgtcatcactgagctgcggcagccagaggtgccagccaattccgaggagaattgggtccaatagaaatatttacaaataaccagggggcaggtgtgcccgtgatcgggaatcgtgagggaactgagtaccagggggcccttggctcccaacagccccaggccctggggcggacttggcacaggacccaagagggagctggggcattggggggccggcagagggggactcctgggagagccttgaaggccctcaaaggggtcctgctggtgcaaaactctgcctggggccatgggtccgagggaaaggcccctcccttctgactcgccgtgtgacagggcagagaatcctggatcccctgcatccctggagggtcgcacagggagctgaacaggaaggactcgccaggaggtggtggggcatctcgctgttcccctaggcctccatgagtgaccctgcagagccactgccccagaagggccctcctgggttccctgggtcttcaccaggggagaggccctagttctgctcagaagattcaagtccatattcagggaggggtcactgtccacacccccaggtccaagtgagggatggtaggaggagggaggcgaggctggggggccccggctcaggacaggatgggggacaagcaagcaaagcaaaacactggactccacagaagctggtgacaggaagggggtggccccgggccccagcatggtcctgccccagtgttcagggcggttggccccttggtgcccagggccaccttctccgagccaggtcaccgcaggggtctgaaagggcaggggtgggtggggcttacatgctgagcaaggggtggtggaaagagggccgacatggtggccacaggcggcctcggggatggggcgcggctggacgcaggcagtcggtccccggtggtccggcggctcctcatgcactctgtacagcgtgggggcgga

SEQ ID NO: 277776 - DNA, 988 bp, Homo sapiens
tttttttttttaaaaccgctttattcaggttggctggtagtcacagactggatcatgtatacagggcaacccacccctaggcaaagccctcggcctctcccacctcccccacgtcatcactgagctgcggcagccagagggaactgagtaccagggggcccttggctcccaacagccccaggccctggggcggacttggcacaggacccaagagggagctggggcattggggggccggcagagggggactcctgggagagccttgaaggccctcaaaggggtcctgctggtgcaaaactctgcctggggccatgggtccgagggaaaggcccctcccttctgactcgccgtgtgacagggcagagaatcctggatcccctgcatccctggagggtcgcacagggagctgaacaggaaggactcgccaggaggtggtggggcatctcgctgttcccctaggcctccatgagtgaccctgcagagccactgccccagaagggccctcctgggttccctgggtcttcaccaggggagaggccctagttctgctcagaagattcaagtccatattcagggaggggtcactgtccacacccccaggtccaagtgagggatggtaggaggagggaggcgaggctggggggccccggctcaggacaggatgggggacaagcaagcaaagcaaaacactggactccacagaagctggtgacaggaagggggtggccccgggccccagcatggtcctgccccagtgttcagggcggttggccccttggtgcccagggccaccttctccgagccaggtcaccgcaggggtctgaaagggcaggggtgggtggggcttacatgctgagcaaggggtggtggaaagagggccgacatggtggccacaggcggcctcggggatggggcgcggctggacgcaggcagtcggtccccggtggtccggcggctcctcatgcactctgtacagcgtgggggcgga

SEQ ID NO: 277777 - DNA, 935 bp, Homo sapiens
ctccgttgtcgagcgttttccgctgacggagccctcacctcagacaccggcggtagggctggatgcgggcccggcccaggaccggtcttctgtcctcacaccggggaggaccacgcaggaaggagctgagtcagagagaccgtgtgtaatttgctcagcgtcacacagatagtaaacggcagagccgctcttcctccctgtcccgccagctcctgccttctgctgtcttggatctcctatgcacgggaaacctgttgaagacgaggtctcactgtgttgctcaagctgtcctggaagtcctggactgaagtgatcctcccacctcggcctcccaaggtgctgggattacaggtgtgagccaccatgcccagccaaaaccttgatttttctgtcaccccctccactgcaccctgagaatcactgctgtaagtagactactgaagagagtatgttgaaaatgttctcatttggtaagaagtaattccaactacattcacgtgattatggtctctaaactaatatgacctaggagagagaccctagtgacattatgttaaccatttcttaaggaccttaaaccctagtgacattatgttaaccatttcttaaggaccttaaaccctagtgacattatgttaaccatttcttaaggaccttcgcccactgtgctgctgtggccacaaaagccatataatgttgggtgacctgaatatcaattaacacagtattataaaatcctctgcatctgcactttgaaaaagcatcacagggctgggagcagtggctcacgcctgtaatcccagcactttggaaggccaagacgagtgaattacctgaggtcaggagtttgagaccggcctggtcaacatggtgacaccccgtgtctactaaaaatacaaaaattagctgggcatggtggcaggcgcctgtaatcc

SEQ ID NO: 277778 - DNA, 403 bp, Homo sapiens
cataatatagtaaagtaccctcaatgccggcagcatgccttgatgactatccaacagctggtgctctccccaaatggggacgatgacatgggcactctcctggggctaatgcattcagccccaccgacggaattgcagttgaagactgatattttaagggccctcctgtcggtccttcgagaaagccatcgttcaagaacagtttttaggaaagttggaggatttgtgtacattacatccttgctcgttgctatggaaagatctttgagctgtccacccaagaatggctgggagaaagtgaaccagaatcaagtgtttgaacttcttcacactgtgttctgcacgttgactgcagcaatgcgctatgagccagccaactctcatttcttcaaaacagagattc

SEQ ID NO: 277779 - DNA, 252 bp, Homo sapiens
ctccacgtaggcctcgatgtgagacagcagcaccatccgcacatgctcttcatgaacttcaaacaactggagaagcacggggatcacccgtgactggaacagggctggtgagacgtgccttttgccttctgccatgattttaaggaactccccagccacgtggaacttttgtaaattgcccagtcttgggtatgtcttcatcagcagcgtgaaaacagagtaatacagtaaattggtaccagtagagtgggg

SEQ ID NO: 277780 - DNA, 489 bp, Homo sapiens
ttatctttttcattcattgttttatcttcagtgcctagaagagtgctggatacattgtaggtgctcaataactatttcttgaagattgaatgtttatttaaataaagggatgaagtcaatcaacttccaagaggaactaggaccccaaccaactactatgcgttgctctcagatggtgtgtaaggccacccttgctgatgaggctgcacgcgtaatgagctgagctgctgccttcagaagaagccagagaaaagaaccccaagacatgagactatccaggctacagcaactccagcagtctccttacctggcagaaaggagcacactctgctacaatgacatggaatttcctctttcgggcagcctctttgaggaaggcctctactgttcgggagaagccaatggtcatgatcacctcattggagtgaatgtgctccagagcctgggctgcaatgttctccattgtcccttctgtaagaacggttttgc

SEQ ID NO: 277781 - DNA, 821 bp, Homo sapiens
tcagtttgaagtagattggagacattttctcatgtttcagcctccttggaccaagcaaaataagctgacctttgaagagaacagatcttgagggggatctgtagatggacacagggagattccaggtgcctcagagggatcaacttgcagttccaagttgtcctcagggaaatcttgccattttttgggataatgaactgaattctcatcacagtggaatacgtatcatcggaagggatttttaaagggcagggtgagaagtggattgagaatttcgcatagcaccaaggttaaacagaagccaactacgaaacaaagccagaagggcactcaagcaaataatcaaaatcaaatccttaccacgctgccagggaccgatatatccagagcatgggaccaggagctggactcacggtgggatctctgatcagtcacagaaggagcttgacgagctcatggggtctctctccctaggtggagaagacagggctccaaatggacttccagtcccatccacgtcacagaggcaaattgtcagagacaaagacctaagccggtccttttccaggagtaaatgaccatcgtgcgcccatgggaagagtgctgcatccacggaggacatgggccaacagtgctctcaaatgggtttcatgaaagcatctgtgactcatccctgttcaagaatgttttcattacgattcagcagaagcgatgtgccaggtcagcaaatacaactgcaaaaccggggcctgccagcctggccaacacagcaagaccccgtctctactaaaaagtaaaattaaaattagctgagtatggtg

SEQ ID NO: 277782 - DNA, 616 bp, Homo sapiens
tcggaactgaggtagggacaatgttagatgagatccccctagtacataaggtgagttcgtcttgctctccaatgtgttcatccacaagtacagaagccaactacgaaacaaagccagaagggcactcaagcaaataatcaaaatcaaatccttaccacgctgccagggaccgatatatccagagcatgggaccaggagctggactcacggtgggatctctgatcagtcacagaaggagcttgacgagctcatggggtctctctccctaggtggagaagacagggctccaaatggacttccagtcccatccacgtcacagaggcaaattgtcagagacaaagacctaagccggtccttttccaggagtaaatgaccatcgtgcgcccatgggaagagtgctgcatccacggaggacatgggccaacagtgctctcaaatgggtttcatgaaagcatctgtgactcatccctgttcaagaatgttttcattacgattcagcagaagcgatgtgccaggtcagcaaatacaactgcaaaaccggggcctgccagcctggccaacacagcaagaccccgtctctactaaaaagtaaaattaaaattagctgagtatggtg

SEQ ID NO: 277783 - DNA, 2799 bp, Homo sapiens
acgcctcctaccaaaatcacagccccttgtggagcccgagctctcattcacagctttctagagaaatctgagcccgaacctgccagaataggggatctcacccacccagttcagcagcgaggacacctgcagaaatacattcccaaagcaaggctgggcggccgtgtgaagtaagcaatggcctcagttttgcttctgttttggatgaacaccaccacatagggcctgaatgtgaaagaagaccctctatttgtctgttccggggcagcctggtagtaaaacactgttgaatgggccacagtttcagcagaccatcaggtgaatgggaccagtctctcttcttccaaaatatcagaagttaaacacttggaacggagatttggccaagatgacccatttacaggctggactcagtccagagactatagagaaagctcgcctggaactgaatgaaaaccccgatgttttacatcaggatattcagcaagtcagggacatgatcatcaccaggcctgacattggatttttacgtacagatgatgccttcatcctgagatttctccgagccaggaagtttcaccaagcggatgcctttagactcctggctcagtatttccagtaccgccagctaaacctggacatgttcaaaaacttcaaggcagatgatcccggcattaagagggctctgatcgatgggttccccggggtgctggaaaaccgagaccattacggcaggaagattcttttgctgtttgcagccaattgggatcagagtaggaactccttcacagacatccttcgtgccatcctgctgtcattggaagtcctaatcgaagatccggagcttcagataaatggcttcattttaattatagactggagtaatttttccttcaaacaagcctccaaactgacaccttcaatccttaaactggccattgaagggttgcaggacagctttcctgcccgctttggaggagtccactttgtcaaccagccctggtacattcatgccctctacacactcatcaagccatttcttaaagacaagaccaggaaacggattttcctgcatggaaacaatttaaacagccttcaccagctaatacaccctgaatttttgccctctgaatttggaggaactcttcctccttatgacatgggaacttgggcccggacgttactcggtcccgactacagcgatgaaaatgactatactcacacatcctataatgcaatgcacgtgaagcatacgtcctcgaatctggagagagaatgctcacccaagctgatgaaaagatctcagtctgtggtagaagctgggaccctgaaacatgaggagaagggagagaatgagaacacccagccactcctggctctggactgaaccctgagtcaccccaatgctcctgcacactggccttcagtggtatcagccacccaggaagcacatgcacaactgacccatgcagacacgtgtgttctgcttgacacaaggtcctccactcctgaacccctgcagtgactgtcaccagccatcggtctgagcagccaaagttggacaaagacttgagagatgctttttttttcccccagtgaggggactggaggatgatgcaaggcatttatgtaaaaaagattctccctcctttcatatttattgtagtaaattgaaaaaataaagactaaatttgatggacacactgcattaggacaagaatttttctgaggtatcacacagggaccctctccagtttttgaaaattaagtgcatttccaagtaaatgtatcagagttaaactgtacagacaccactgtcaagtttcatgtagtacaaagccctgagacaatagtatctccagtaatttccattcttactgaattatttcctttgacctcatcaccagcatcgaattgttcagcctaagagcatgttctcataggtctgggtatttgcaaagtttgcttattttgatgatatcctgcaaaaaattattttgatgtcacatctcttgtcaggtcactagctgactgtcatgagctgacgttaaaggaagacacatggacgtgaaatacgattatttcatctgagcaatgtgagttaccacaggcagctcaaaagcccattagtgcagcatgtgtctgcagaggagatgtctcatgaaaatcacatgtcagtgattaatgaatccattccagttgcctcaactgggtcactacagcaaagaaaagtgctatcaaaccatttacccttgcccccacaaccctcctgcaaccattaaagatgtggagaaagaccatggttgttgctgagagggtaaatattcaatcatggagcatgacccatatggatggctaaatatgcaagtactgaagtaagagaagactagaaatgcaggatgaaatgtcaaaggtcattttatttacctagtctccttagaaatggagtccccaactactcattcaaaagaaatcagacataaaataaaccagacatcatatatgatatccttacttgtgccatgttttccaagaccagtgcatatttttagacatctcttattcgcccagccatctgcatgacatgggtatttattagtattaccagttggtgctcaaagtcaaacaaaaatattttagttaataatgggcagtaaaatatgattttacattattttaaatatttgggagagttaatttgttagctaaataattcaagggaaagagattattcaactggtcataatcacccctgataatattattactaatcttaattatttattacatcatctcttt

SEQ ID NO: 277784 - DNA, 2936 bp, Homo sapiens
acgcctcctaccaaaatcacagccccttgtggagcccgagctctcattcacagctttctagagaaatctgagcccgaacctgccagaataggggatctcacccacccagttcagcagcgaggacacctgcagaaatacattcccaaagcaaggctgggcggccgtgtgaaggcagttttcttagctgtgattcccactgctgccattgtctgtgcaatcacatccagaagaagggtcacggttacatggatctgctgggaaaacaattagtggaaaagggggcaaatagagttaatggccgtttttggtaagcaatggcctcagttttgcttctgttttggatgaacaccaccacatagggcctgaatgtgaaagaagaccctctatttgtctgttccggggcagcctggtagtaaaacactgttgaatgggccacagtttcagcagaccatcaggtgaatgggaccagtctctcttcttccaaaatatcagaagttaaacacttggaacggagatttggccaagatgacccatttacaggctggactcagtccagagactatagagaaagctcgcctggaactgaatgaaaaccccgatgttttacatcaggatattcagcaagtcagggacatgatcatcaccaggcctgacattggatttttacgtacagatgatgccttcatcctgagatttctccgagccaggaagtttcaccaagcggatgcctttagactcctggctcagtatttccagtaccgccagctaaacctggacatgttcaaaaacttcaaggcagatgatcccggcattaagagggctctgatcgatgggttccccggggtgctggaaaaccgagaccattacggcaggaagattcttttgctgtttgcagccaattgggatcagagtaggaactccttcacagacatccttcgtgccatcctgctgtcattggaagtcctaatcgaagatccggagcttcagataaatggcttcattttaattatagactggagtaatttttccttcaaacaagcctccaaactgacaccttcaatccttaaactggccattgaagggttgcaggacagctttcctgcccgctttggaggagtccactttgtcaaccagccctggtacattcatgccctctacacactcatcaagccatttcttaaagacaagaccaggaaacggattttcctgcatggaaacaatttaaacagccttcaccagctaatacaccctgaatttttgccctctgaatttggaggaactcttcctccttatgacatgggaacttgggcccggacgttactcggtcccgactacagcgatgaaaatgactatactcacacatcctataatgcaatgcacgtgaagcatacgtcctcgaatctggagagagaatgctcacccaagctgatgaaaagatctcagtctgtggtagaagctgggaccctgaaacatgaggagaagggagagaatgagaacacccagccactcctggctctggactgaaccctgagtcaccccaatgctcctgcacactggccttcagtggtatcagccacccaggaagcacatgcacaactgacccatgcagacacgtgtgttctgcttgacacaaggtcctccactcctgaacccctgcagtgactgtcaccagccatcggtctgagcagccaaagttggacaaagacttgagagatgctttttttttcccccagtgaggggactggaggatgatgcaaggcatttatgtaaaaaagattctccctcctttcatatttattgtagtaaattgaaaaaataaagactaaatttgatggacacactgcattaggacaagaatttttctgaggtatcacacagggaccctctccagtttttgaaaattaagtgcatttccaagtaaatgtatcagagttaaactgtacagacaccactgtcaagtttcatgtagtacaaagccctgagacaatagtatctccagtaatttccattcttactgaattatttcctttgacctcatcaccagcatcgaattgttcagcctaagagcatgttctcataggtctgggtatttgcaaagtttgcttattttgatgatatcctgcaaaaaattattttgatgtcacatctcttgtcaggtcactagctgactgtcatgagctgacgttaaaggaagacacatggacgtgaaatacgattatttcatctgagcaatgtgagttaccacaggcagctcaaaagcccattagtgcagcatgtgtctgcagaggagatgtctcatgaaaatcacatgtcagtgattaatgaatccattccagttgcctcaactgggtcactacagcaaagaaaagtgctatcaaaccatttacccttgcccccacaaccctcctgcaaccattaaagatgtggagaaagaccatggttgttgctgagagggtaaatattcaatcatggagcatgacccatatggatggctaaatatgcaagtactgaagtaagagaagactagaaatgcaggatgaaatgtcaaaggtcattttatttacctagtctccttagaaatggagtccccaactactcattcaaaagaaatcagacataaaataaaccagacatcatatatgatatccttacttgtgccatgttttccaagaccagtgcatatttttagacatctcttattcgcccagccatctgcatgacatgggtatttattagtattaccagttggtgctcaaagtcaaacaaaaatattttagttaataatgggcagtaaaatatgattttacattattttaaatatttgggagagttaatttgttagctaaataattcaagggaaagagattattcaactggtcataatcacccctgataatattattactaatcttaattatttattacatcatctcttt

SEQ ID NO: 277785 - DNA, 2348 bp, Homo sapiens
ttctcattcccctcctatccttccccccaagtctccaaagtccactgtatcattcttttttttttttgagacagactctcattctgtcacccaggctggagtgcagtggcacgatctcggctcactgcaagctccgcctcctgggttcatgccattctgctgccttagcctcctgagtagctggcattacaggtgcccgacgccacgtcaggctaattttttgtatttttagtagagatggggtttcaccgtgttagccaagatggtcttgatctcctgacctcgtgatccgcccgcctaggcctcccaaagtgctgggattccaggaactccttcacagacatccttcgtgccatcctgctgtcattggaagtcctaatcgaagatccggagcttcagataaatggcttcattttaattatagactggagtaatttttccttcaaacaagcctccaaactgacaccttcaatccttaaactggccattgaagggttgcaggacagctttcctgcccgctttggaggagtccactttgtcaaccagccctggtacattcatgccctctacacactcatcaagccatttcttaaagacaagaccaggaaacggattttcctgcatggaaacaatttaaacagccttcaccagctaatacaccctgaatttttgccctctgaatttggaggaactcttcctccttatgacatgggaacttgggcccggacgttactcggtcccgactacagcgatgaaaatgactatactcacacatcctataatgcaatgcacgtgaagcatacgtcctcgaatctggagagagaatgctcacccaagctgatgaaaagatctcagtctgtggtagaagctgggaccctgaaacatgaggagaagggagagaatgagaacacccagccactcctggctctggactgaaccctgagtcaccccaatgctcctgcacactggccttcagtggtatcagccacccaggaagcacatgcacaactgacccatgcagacacgtgtgttctgcttgacacaaggtcctccactcctgaacccctgcagtgactgtcaccagccatcggtctgagcagccaaagttggacaaagacttgagagatgctttttttttcccccagtgaggggactggaggatgatgcaaggcatttatgtaaaaaagattctccctcctttcatatttattgtagtaaattgaaaaaataaagactaaatttgatggacacactgcattaggacaagaatttttctgaggtatcacacagggaccctctccagtttttgaaaattaagtgcatttccaagtaaatgtatcagagttaaactgtacagacaccactgtcaagtttcatgtagtacaaagccctgagacaatagtatctccagtaatttccattcttactgaattatttcctttgacctcatcaccagcatcgaattgttcagcctaagagcatgttctcataggtctgggtatttgcaaagtttgcttattttgatgatatcctgcaaaaaattattttgatgtcacatctcttgtcaggtcactagctgactgtcatgagctgacgttaaaggaagacacatggacgtgaaatacgattatttcatctgagcaatgtgagttaccacaggcagctcaaaagcccattagtgcagcatgtgtctgcagaggagatgtctcatgaaaatcacatgtcagtgattaatgaatccattccagttgcctcaactgggtcactacagcaaagaaaagtgctatcaaaccatttacccttgcccccacaaccctcctgcaaccattaaagatgtggagaaagaccatggttgttgctgagagggtaaatattcaatcatggagcatgacccatatggatggctaaatatgcaagtactgaagtaagagaagactagaaatgcaggatgaaatgtcaaaggtcattttatttacctagtctccttagaaatggagtccccaactactcattcaaaagaaatcagacataaaataaaccagacatcatatatgatatccttacttgtgccatgttttccaagaccagtgcatatttttagacatctcttattcgcccagccatctgcatgacatgggtatttattagtattaccagttggtgctcaaagtcaaacaaaaatattttagttaataatgggcagtaaaatatgattttacattattttaaatatttgggagagttaatttgttagctaaataattcaagggaaagagattattcaactggtcataatcacccctgataatattattactaatcttaattatttattacatcatctcttt

SEQ ID NO: 277786 - DNA, 2940 bp, Homo sapiens
acgcctcctaccaaaatcacagccccttgtggagcccgagctctcattcacagctttctagagaaatctgagcccgaacctgccagaataggggatctcacccacccagttcagcagcgaggacacctgcagaaatacattcccaaagcaaggctgggcggccgtgtgaagtaagcaatggcctcagttttgcttctgttttggatgaacaccaccacatagggcctgaatgtgaaagaagaccctctatttgtctgttccggggcagcctggtagtaaaacactgttgaatgggccacagtttcagcagaccatcaggtgaatgggaccagtctctcttcttccaaaatatcagaagttaaacacttggaacggagatttggccaagatgacccatttacaggctggactcagtccagagactatagagaaagctcgcctggaactgaatgaaaaccccgatgttttacatcaggatattcagcaagtcagggacatgatcatcaccaggcctgacattggatttttacgtacagatgatgccttcatcctgagatttctccgagccaggaagtttcaccaagcggatgcctttagactcctggctcagtatttccagtaccgccagctaaacctggacatgttcaaaaacttcaaggcagatgatcccggcattaagagggctctgatcgatgggttccccggggtgctggaaaaccgagaccattacggcaggaagattcttttgctgtttgcagccaattgggatcagagtaggaactccttcacagacatccttcgtgccatcctgctgtcattggaagtcctaatcgaagatccggagcttcagataaatggcttcattttaattatagactggagtaatttttccttcaaacaagcctccaaactgacaccttcaatccttaaactggccattgaagggttgcagaagatggataaaatcaatgctgaggacctattcagaaggacagtgatgccagagctagttattcattgaactcattctgtgagaaatgtcagccaatctttggacagctttcctgcccgctttggaggagtccactttgtcaaccagccctggtacattcatgccctctacacactcatcaagccatttcttaaagacaagaccaggaaacggattttcctgcatggaaacaatttaaacagccttcaccagctaatacaccctgaatttttgccctctgaatttggaggaactcttcctccttatgacatgggaacttgggcccggacgttactcggtcccgactacagcgatgaaaatgactatactcacacatcctataatgcaatgcacgtgaagcatacgtcctcgaatctggagagagaatgctcacccaagctgatgaaaagttctgaaggttggaagggcaagatcaaggtgttggcaagatctcagtctgtggtagaagctgggaccctgaaacatgaggagaagggagagaatgagaacacccagccactcctggctctggactgaaccctgagtcaccccaatgctcctgcacactggccttcagtggtatcagccacccaggaagcacatgcacaactgacccatgcagacacgtgtgttctgcttgacacaaggtcctccactcctgaacccctgcagtgactgtcaccagccatcggtctgagcagccaaagttggacaaagacttgagagatgctttttttttcccccagtgaggggactggaggatgatgcaaggcatttatgtaaaaaagattctccctcctttcatatttattgtagtaaattgaaaaaataaagactaaatttgatggacacactgcattaggacaagaatttttctgaggtatcacacagggaccctctccagtttttgaaaattaagtgcatttccaagtaaatgtatcagagttaaactgtacagacaccactgtcaagtttcatgtagtacaaagccctgagacaatagtatctccagtaatttccattcttactgaattatttcctttgacctcatcaccagcatcgaattgttcagcctaagagcatgttctcataggtctgggtatttgcaaagtttgcttattttgatgatatcctgcaaaaaattattttgatgtcacatctcttgtcaggtcactagctgactgtcatgagctgacgttaaaggaagacacatggacgtgaaatacgattatttcatctgagcaatgtgagttaccacaggcagctcaaaagcccattagtgcagcatgtgtctgcagaggagatgtctcatgaaaatcacatgtcagtgattaatgaatccattccagttgcctcaactgggtcactacagcaaagaaaagtgctatcaaaccatttacccttgcccccacaaccctcctgcaaccattaaagatgtggagaaagaccatggttgttgctgagagggtaaatattcaatcatggagcatgacccatatggatggctaaatatgcaagtactgaagtaagagaagactagaaatgcaggatgaaatgtcaaaggtcattttatttacctagtctccttagaaatggagtccccaactactcattcaaaagaaatcagacataaaataaaccagacatcatatatgatatccttacttgtgccatgttttccaagaccagtgcatatttttagacatctcttattcgcccagccatctgcatgacatgggtatttattagtattaccagttggtgctcaaagtcaaacaaaaatattttagttaataatgggcagtaaaatatgattttacattattttaaatatttgggagagttaatttgttagctaaataattcaagggaaagagattattcaactggtcataatcacccctgataatattattactaatcttaattatttattacatcatctcttt

SEQ ID NO: 277787 - DNA, 1417 bp, Homo sapiens
acgcctcctaccaaaatcacagccccttgtggagcccgagctctcattcacagctttctagagaaatctgagcccgaacctgccagaataggggatctcacccacccagttcagcagcgaggacacctgcagaaatacattcccaaagcaaggctgggcggccgtgtgaagtaagcaatggcctcagttttgcttctgttttggatgaacaccaccacatagggcctgaatgtgaaagaagaccctctatttgtctgttccggggcagcctggtagtaaaacactgttgaatgggccacagtttcagcagaccatcaggtgaatgggaccagtctctcttcttccaaaatatcagaagttaaacacttggaacggagatttggccaagatgacccatttacaggctggactcagtccagagactatagagaaagctcgcctggaactgaatgaaaaccccgatgttttacatcaggatattcagcaagtcagggacatgatcatcaccaggcctgacattggatttttacgtacagatgatgccttcatcctgagatttctccgagccaggaagtttcaccaagcggatgcctttagactcctggctcagtatttccagtaccgccagctaaacctggacatgttcaaaaacttcaaggcagatgatcccggcattaagagggctctgatcgatgggttccccggggtgctggaaaaccgagaccattacggcaggaagattcttttgctgtttgcagccaattgggatcagagtaggaactccttcacagacatccttcgtgccatcctgctgtcattggaagtcctaatcgaagatccggagcttcagataaatggcttcattttaattatagactggagtaatttttccttcaaacaagcctccaaactgacaccttcaatccttaaactggccattgaagggttgcaggacagctttcctgcccgctttggaggagtccactttgtcaaccagccctggtacattcatgccctctacacactcatcaagccatttcttaaagacaagaccaggaaacggattttcctgcatggaaacaatttaaacagccttcaccagctaatacaccctgaatttttgccctctgaatttggaggaactcttcctccttatgacatgggaacttgggcccggacgttactcggtcccgactacagcgatgaaaatgactatactcacacatcctataatgcaatgcacgtgaagcatacgtcctcgaatctggagagagaatgctcacccaagctgatgaaaaggtaaggcctgggttatcagagcccccccccagtcagaggtcaatggaattttttatttggacctattgtgaattattaattaaagacctttatgggcagagaacttgaataaaataaa

SEQ ID NO: 277788 - DNA, 2193 bp, Homo sapiens
acgcctcctaccaaaatcacagccccttgtggagcccgagctctcattcacagctttctagagaaatctgagcccgaacctgccagaataggggatctcacccacccagttcagcagcgaggacacctgcagaaatacattcccaaagcaaggctgggcggccgtgtgaaggaactccttcacagacatccttcgtgccatcctgctgtcattggaagtcctaatcgaagatccggagcttcagataaatggcttcattttaattatagactggagtaatttttccttcaaacaagcctccaaactgacaccttcaatccttaaactggccattgaagggttgcaggacagctttcctgcccgctttggaggagtccactttgtcaaccagccctggtacattcatgccctctacacactcatcaagccatttcttaaagacaagaccaggaaacggattttcctgcatggaaacaatttaaacagccttcaccagctaatacaccctgaatttttgccctctgaatttggaggaactcttcctccttatgacatgggaacttgggcccggacgttactcggtcccgactacagcgatgaaaatgactatactcacacatcctataatgcaatgcacgtgaagcatacgtcctcgaatctggagagagaatgctcacccaagctgatgaaaagatctcagtctgtggtagaagctgggaccctgaaacatgaggagaagggagagaatgagaacacccagccactcctggctctggactgaaccctgagtcaccccaatgctcctgcacactggccttcagtggtatcagccacccaggaagcacatgcacaactgacccatgcagacacgtgtgttctgcttgacacaaggtcctccactcctgaacccctgcagtgactgtcaccagccatcggtctgagcagccaaagttggacaaagacttgagagatgctttttttttcccccagtgaggggactggaggatgatgcaaggcatttatgtaaaaaagattctccctcctttcatatttattgtagtaaattgaaaaaataaagactaaatttgatggacacactgcattaggacaagaatttttctgaggtatcacacagggaccctctccagtttttgaaaattaagtgcatttccaagtaaatgtatcagagttaaactgtacagacaccactgtcaagtttcatgtagtacaaagccctgagacaatagtatctccagtaatttccattcttactgaattatttcctttgacctcatcaccagcatcgaattgttcagcctaagagcatgttctcataggtctgggtatttgcaaagtttgcttattttgatgatatcctgcaaaaaattattttgatgtcacatctcttgtcaggtcactagctgactgtcatgagctgacgttaaaggaagacacatggacgtgaaatacgattatttcatctgagcaatgtgagttaccacaggcagctcaaaagcccattagtgcagcatgtgtctgcagaggagatgtctcatgaaaatcacatgtcagtgattaatgaatccattccagttgcctcaactgggtcactacagcaaagaaaagtgctatcaaaccatttacccttgcccccacaaccctcctgcaaccattaaagatgtggagaaagaccatggttgttgctgagagggtaaatattcaatcatggagcatgacccatatggatggctaaatatgcaagtactgaagtaagagaagactagaaatgcaggatgaaatgtcaaaggtcattttatttacctagtctccttagaaatggagtccccaactactcattcaaaagaaatcagacataaaataaaccagacatcatatatgatatccttacttgtgccatgttttccaagaccagtgcatatttttagacatctcttattcgcccagccatctgcatgacatgggtatttattagtattaccagttggtgctcaaagtcaaacaaaaatattttagttaataatgggcagtaaaatatgattttacattattttaaatatttgggagagttaatttgttagctaaataattcaagggaaagagattattcaactggtcataatcacccctgataatattattactaatcttaattatttattacatcatctcttt

SEQ ID NO: 277789 - DNA, 2838 bp, Homo sapiens
acgcctcctaccaaaatcacagccccttgtggagcccgagctctcattcacagctttctagagaaatctgagcccgaacctgccagaataggggatctcacccacccagttcagcagcgaggacacctgcagaaatacattcccaaagcaaggctgggcggccgtgtgaagtaagcaatggcctcagttttgcttctgttttggatgaacaccaccacatagggcctgaatgtgaaagaagaccctctatttgtctgttccggggcagcctggtagtaaaacactgttgaatgggccacagtttcagcagaccatcaggtgaatgggaccagtctctcttcttccaaaatatcagaagttaaacacttggaacggagatttggccaagatgacccatttacaggctggactcagtccagagactatagagaaagctcgcctggaactgaatgaaaaccccgatgttttacatcaggatattcagcaagtcagggacatgatcatcaccaggcctgacattggatttttacgtacagatgatgccttcatcctgagatttctccgagccaggaagtttcaccaagcggatgcctttagactcctggctcagtatttccagtaccgccagctaaacctggacatgttcaaaaacttcaaggcagatgatcccggcattaagagggctctgatcgatgggttccccggggtgctggaaaaccgagaccattacggcaggaagattcttttgctgtttgcagccaattgggatcagagtaggaactccttcacagacatccttcgtgccatcctgctgtcattggaagtcctaatcgaagatccggagcttcagataaatggcttcattttaattatagactggagtaatttttccttcaaacaagcctccaaactgacaccttcaatccttaaactggccattgaagggttgcaggacagctttcctgcccgctttggaggagtccactttgtcaaccagccctggtacattcatgccctctacacactcatcaagccatttcttaaagacaagaccaggaaacggattttcctgcatggaaacaatttaaacagccttcaccagctaatacaccctgaatttttgccctctgaatttggaggaactcttcctccttatgacatgggaacttgggcccggacgttactcggtcccgactacagcgatgaaaatgactatactcacacatcctataatgcaatgcacgtgaagcatacgtcctcgaatctggagagagaatgctcacccaagctgatgaaaagttctgaaggttggaagggcaagatcaaggtgttggcaagatctcagtctgtggtagaagctgggaccctgaaacatgaggagaagggagagaatgagaacacccagccactcctggctctggactgaaccctgagtcaccccaatgctcctgcacactggccttcagtggtatcagccacccaggaagcacatgcacaactgacccatgcagacacgtgtgttctgcttgacacaaggtcctccactcctgaacccctgcagtgactgtcaccagccatcggtctgagcagccaaagttggacaaagacttgagagatgctttttttttcccccagtgaggggactggaggatgatgcaaggcatttatgtaaaaaagattctccctcctttcatatttattgtagtaaattgaaaaaataaagactaaatttgatggacacactgcattaggacaagaatttttctgaggtatcacacagggaccctctccagtttttgaaaattaagtgcatttccaagtaaatgtatcagagttaaactgtacagacaccactgtcaagtttcatgtagtacaaagccctgagacaatagtatctccagtaatttccattcttactgaattatttcctttgacctcatcaccagcatcgaattgttcagcctaagagcatgttctcataggtctgggtatttgcaaagtttgcttattttgatgatatcctgcaaaaaattattttgatgtcacatctcttgtcaggtcactagctgactgtcatgagctgacgttaaaggaagacacatggacgtgaaatacgattatttcatctgagcaatgtgagttaccacaggcagctcaaaagcccattagtgcagcatgtgtctgcagaggagatgtctcatgaaaatcacatgtcagtgattaatgaatccattccagttgcctcaactgggtcactacagcaaagaaaagtgctatcaaaccatttacccttgcccccacaaccctcctgcaaccattaaagatgtggagaaagaccatggttgttgctgagagggtaaatattcaatcatggagcatgacccatatggatggctaaatatgcaagtactgaagtaagagaagactagaaatgcaggatgaaatgtcaaaggtcattttatttacctagtctccttagaaatggagtccccaactactcattcaaaagaaatcagacataaaataaaccagacatcatatatgatatccttacttgtgccatgttttccaagaccagtgcatatttttagacatctcttattcgcccagccatctgcatgacatgggtatttattagtattaccagttggtgctcaaagtcaaacaaaaatattttagttaataatgggcagtaaaatatgattttacattattttaaatatttgggagagttaatttgttagctaaataattcaagggaaagagattattcaactggtcataatcacccctgataatattattactaatcttaattatttattacatcatctcttt

SEQ ID NO: 277790 - DNA, 2737 bp, Homo sapiens
acgcctcctaccaaaatcacagccccttgtggagcccgagctctcattcacagctttctagagaaatctgagcccgaacctgccagaataggggatctcacccacccagttcagcagcgaggacacctgcagaaatacattcccaaagcaaggctgggcggccgtgtgaagtaagcaatggcctcagttttgcttctgttttggatgaacaccaccacatagggcctgaatgtgaaagaagaccctctatttgtctgttccggggcagcctggtagtaaaacactgttgaatgggccacagtttcagcagaccatcaggtgaatgggaccagtctctcttcttccaaaatatcagaagttaaacacttggaacggagatttggccaagatgacccatttacaggctggactcagtccagagactatagagaaagctcgcctggaactgaatgaaaaccccgatgttttacatcaggatattcagcaagtcagggacatgatcatcaccaggcctgacattggatttttacgtacagatgatgccttcatcctgagatttctccgagccaggaagtttcaccaagcggatgcctttagactcctggctcagtatttccagtaccgccagctaaacctggacatgttcaaaaacttcaaggcagatgatcccggcattaagagggctctgatcgatgggttccccggggtgctggaaaaccgagaccattacggcaggaagattcttttgctgtttgcagccaattgggatcagagtaggaactccttcacagacatccttcgtgccatcctgctgtcattggaagtcctaatcgaagatccggagcttcagataaatggcttcattttaatttttccttcaaacaagcctccaaactgacaccttcaatccttaaactggccattgaagggttgcagtccactttgtcaaccagccctggtacattcatgccctctacacactcatcaagccatttcttaaagacaagaccaggaaacggaatttaaacagccttcaccagctaatacaccctgaatttttgccctctgaatttggaggaactcttcctccttatgacatgggaacttgggcccggacgttactcggtcccgactacagcgatgaaaatgactatactcacacatcctataatgcaatgcacgtgaagcatacgtcctcgaatctggagagagaatgctcacccaagctgatgaaaagatctcagtctgtggtagaagctgggaccctgaaacatgaggagaagggagagaatgagaacacccagccactcctggctctggactgaaccctgagtcaccccaatgctcctgcacactggccttcagtggtatcagccacccaggaagcacatgcacaactgacccatgcagacacgtgtgttctgcttgacacaaggtcctccactcctgaacccctgcagtgactgtcaccagccatcggtctgagcagccaaagttggacaaagacttgagagatgctttttttttcccccagtgaggggactggaggatgatgcaaggcatttatgtaaaaaagattctccctcctttcatatttattgtagtaaattgaaaaaataaagactaaatttgatggacacactgcattaggacaagaatttttctgaggtatcacacagggaccctctccagtttttgaaaattaagtgcatttccaagtaaatgtatcagagttaaactgtacagacaccactgtcaagtttcatgtagtacaaagccctgagacaatagtatctccagtaatttccattcttactgaattatttcctttgacctcatcaccagcatcgaattgttcagcctaagagcatgttctcataggtctgggtatttgcaaagtttgcttattttgatgatatcctgcaaaaaattattttgatgtcacatctcttgtcaggtcactagctgactgtcatgagctgacgttaaaggaagacacatggacgtgaaatacgattatttcatctgagcaatgtgagttaccacaggcagctcaaaagcccattagtgcagcatgtgtctgcagaggagatgtctcatgaaaatcacatgtcagtgattaatgaatccattccagttgcctcaactgggtcactacagcaaagaaaagtgctatcaaaccatttacccttgcccccacaaccctcctgcaaccattaaagatgtggagaaagaccatggttgttgctgagagggtaaatattcaatcatggagcatgacccatatggatggctaaatatgcaagtactgaagtaagagaagactagaaatgcaggatgaaatgtcaaaggtcattttatttacctagtctccttagaaatggagtccccaactactcattcaaaagaaatcagacataaaataaaccagacatcatatatgatatccttacttgtgccatgttttccaagaccagtgcatatttttagacatctcttattcgcccagccatctgcatgacatgggtatttattagtattaccagttggtgctcaaagtcaaacaaaaatattttagttaataatgggcagtaaaatatgattttacattattttaaatatttgggagagttaatttgttagctaaataattcaagggaaagagattattcaactggtcataatcacccctgataatattattactaatcttaattatttattacatcatctcttt

SEQ ID NO: 277791 - DNA, 1661 bp, Homo sapiens
gcaccacacctaggtcggagcactgtcgtccttcagggctccagcctcttgatatttttgtacttcagtatcagctcgatagagcaaaagagagagaggacgagagagggggtcagagaaggggaagcaacggctctcacgttgggacaatattatctggaagctgaagaagaaactgaatactccttccttcctccccacccattcctttaaatccggagggggaaaaaatcccaaggtctgcaaaggcgcggcgctcggactataaaacacaacaaatcataaacccggcggagcagcagcggccgcgcgcgcctcccctcccaatgagttcctatttcgtgaactccaccttccccgtcactctggccagcgggcaggagtccttcctgggccagctaccgctctattcgtcgggctatgcggacccgctgagacattaccccgcgccctacgggccagggccgggccaggacaagggctttgccacttcctcctattacccgccggcgggcggtggctacggccgagcggcgccctgcgactacgggccggcgccggccttctaccgcgagaaagagtcggcctgcgcactctccggcgccgacgagcagcccccgttccaccccgagccgcggaagtcggactgcgcgcaggacaagagcgtgttcggcgagacagaagagcagaagtgctccactccggtctacccgtggatgcagcggatgaattcgtgcaacagttcctcctttgggcccagcggccggcgaggccgccagacatacacacgttaccagacgctggagctggagaaggagtttcactacaatcgctacctgacgcggcggcggcgcatcgagatcgcgcacgccctgtgcctgacggagaggcagatcaagatatggttccagaaccgacgcatgaagtggaaaaaggagagcaaactgctcagcgcgtctcagctcagtgccgaggaggaggaagaaaaacaggccgagtgaaggtgctggaaagggagggaggacgcgaggggaaaggcctgtggggagccacgggcgtcagagagacccgggaaggaaggctctcgggtgggggagccaggagacctgctctccggcgcagacaggcggggcccagcgctctcctggacgcccccgcccgcacagctcccggcgggtgctctgaggcctcactactcgagcccacccagcatcccgcgcgcccttccttcccgaggaactcgcctcagcctgatcaggcttcctggtgagaactgaggagcggactcacttgatgtttcctggaagcagagcaaaatgctcttgtccctgtcgcgtctcattttgtccatgtcccccgtgcacggttcaatggtagattcgctgtcccctcagcgggggccttgaagactccctgatcccagacctgtcgtctctcccaccccctccccaaagccactggaaggagcacatactacctagaagtaagaagaggagcctcagaagaaaacaaagttctattttattaattttctatgtgttgtgtttgtagtcttgtcttagctctggacgtgaaatacttcgatgatgatgatgatgatgatgatgataataataataataataacaacaacaacaacaataataaagatgtgaaaactc

SEQ ID NO: 277792 - DNA, 411 bp, Homo sapiens
ccttcagaaatagaagttggagtagtgacacttgaaaatcctatattcaggattctttcaagaagcaggaactgtccagttcctgcttcttgaaaatcctatagcccaggctattcttaagtcttttgggattgtagagggtactggagtgagggttgcaggcaggatagggatcagacaaataaagccacctaggctgagggatacccctcactccttcactccatatcaccaagtgaggagagggctagtctctttccccagtgccccttcccctgccaagggtgagcagctgcatactagaaccaggcagaatgttttgggcagccaccctcgtcgccgcctttcaagaagcagaactggccagttcctgcttcttgaaataatcacctgctcagtcccatctgcagg

SEQ ID NO: 277793 - DNA, 3800 bp, Homo sapiens
  misc_feature (2452)..(2452): n is a, c, g, or t
ccttcagaaatagaagttggagtagtgacacttgaaaatcctatattcaggattctttcaagaagcaggaactgtccagttcctgcttcttgaaaatcctatagcccaggctattcttaagtcttttgggattgtagagggtactggagtgagggttgcaggcaggatagggatcagacaaataaagccacctaggctgagggatacccctcactccttcactccatatcaccaagtgaggagagggctagtctctttccccagtgccccttcccctgccaagggtgagcagctgcatactagaaccaggcagaatgttttgggcagccaccctcgtcgccgcctttcaagaagctcctagtctagccacagagtcagaaggggaagcttgggctcagtccctcctgccagctcctcctcttctgggtcttctaggcagtgggatctggcctgccccctcagaccagaagggttgtggagaagcaggaacaataagccgaggcttggaggagacagagcagatctgataaacaggaaaaacgatgttcaaaacctggggaggagggtgtttcttctttgcttatcttagcggagaactcttctcaccttctaccgacacaaaaccctagaaacaaaccttctttagttctctctcaaggcgattcggagacatttacccaaccctccctggagagaaggggtcgaagcaacgcaggggttaacttttctgaaaacacaattaactttttccaatcctgcgtggggtgggggagagacatatttatttaatcacccgggagtggggtggtctcaatctaaacgttccctcctccctcaaaggcactgagcctgtttcacagatcctacgtaggtggaacaggacgcgttgtgttgttggggagagagaggagaaaggcgaaggagaaggaggaaaaaaaaaaggttgataggtttgtgcgcgggtccctcgtgcgggctgcgctcctcctgggtgctatttgacaattcctgcctctgccattggtcagtgttggatcagatggttgtatttccttctggccctcactggcacctcgccatcccccctcagctaaaacccaatctcggatatactactaataggcgcggcgctcggactataaaacacaacaaatcataaacccggcggagcagcagcggccgcgcgcgcctcccctcccaatgagttcctatttcgtgaactccaccttccccgtcactctggccagcgggcaggagtccttcctgggccagctaccgctctattcgtcgggctatgcggacccgctgagacattaccccgcgccctacgggccagggccgggccaggacaagggctttgccacttcctcctattacccgccggcgggcggtggctacggccgagcggcgccctgcgactacgggccggcgccggccttctaccgcgagaaagagtcggcctgcgcactctccggcgccgacgagcagcccccgttccaccccgagccgcggaagtcggactgcgcgcaggacaagagcgtgttcggcgagacagaagagcagaagtgctccactccggtctacccgtggatgcagcggatgaattcgtgcaacagtgagtgagacttcccgtcgccgtcgccccggctcccctgggcgcccaccccgggacacagaactagtgagcgccccctgccccaatctcccacagggtgctgggtgggcatctcagttaggagatagaagaagattgggcgccggccgggggtctctcgctgtgtcccctattaggcaggagttacaaagtttgcaaagtcccagccgcactgggagccatggggagcaagtgtgctctcctggggcgcctggccagagccggggttccaggacagggaagggagcaggagcctgcagtcactggcttggctttactttgagcccccaacccccctctcccagccctggtagggttccccaaccaaagacggctccattaaaaacggagtgcgtcatgcaagggggtagggggtgacgctgaagaggaagagttgagtctgtctgggactgtgtttccctgtggtggggagctggggcaagatgaggcaccaggaaaggggtggtagtcagaggagggaggaggaataaggggaaggaagagagagggagcaggcggagcgagagagggagaaacaggcgcggggtctcaggttggattatttgttggccttaagtcccaactgatgtccattagccggactcgaaagtgaggagccgttaatgtggactatggatcgatctacgtcattacggattaacggcctggatttatcattgggttggggggatgacggggggtgggaacaagatggatggaaagggagggaaagacaagatgcaactaggaagagacacacctgaccagcccctccccccaggctcaggtgggagttcnaactgctcctcccctcccccatctagagtctgacagacggcacaggcctaggagactaggagggaatctggagggggcgctggaggagtgcgaaacgggggaagggagccggcagaatagagggcatcccggtactggctggagtctgtgttcgagggtcgactaggggagggggtcctgggcccggtgaccgcaggcctcagcatctccactctgcgtaacaggttcctcctttgggcccagcggccggcgaggccgccagacatacacacgttaccagacgctggagctggagaaggagtttcactacaatcgctacctgacgcggcggcggcgcatcgagatcgcgcacgccctgtgcctgacggagaggcagatcaagatatggttccagaaccgacgcatgaagtggaaaaaggagagcaaactgctcagcgcgtctcagctcagtgccgaggaggaggaagaaaaacaggccgagtgaaggtgctggaaagggagggaggacgcgaggggaaaggcctgtggggagccacgggcgtcagagagacccgggaaggaaggctctcgggtgggggagccaggagacctgctctccggcgcagacaggcggggcccagcgctctcctggacgcccccgcccgcacagctcccggcgggtgctctgaggcctcactactcgagcccacccagcatcccgcgcgcccttccttcccgaggaactcgcctcagcctgatcaggcttcctggtgagaactgaggagcggactcacttgatgtttcctggaagcagagcaaaatgctcttgtccctgtcgcgtctcattttgtccatgtcccccgtgcacggttcaatggtagattcgctgtcccctcagcgggggccttgaagactccctgatcccagacctgtcgtctctcccaccccctccccaaagccactggaaggagcacatactacctagaagtaagaagaggagcctcagaagaaaacaaagttctattttattaattttctatgtgttgtgtttgtagtcttgtcttagctctggacgtgaaatacttcgatgatgatgatgatgatgatgatgataataataataataataacaacaacaacaacaataataaagatgtgaaaactcgacgctcggtcacctccaatcctcccctgccattttttcctctctcctcaacccccagcctctccatctttcctgagccagaattcttcagcaaaggcgagagccctggcccgccgaagcgagccctgttcgactgggaagttacagctgagataaaggctggagcgatcagtcctgcccaggccccagcgctgcgtttccctg

SEQ ID NO: 277794 - DNA, 3204 bp, Homo sapiens
  misc_feature (1856)..(1856): n is a, c, g, or t
gcaccacacctaggtcggagcactgtcgtccttcagggctccagcctcttgatatttttgtacttcagtatcagctcgatagagcaaaagagagagaggacgagagaggggggtgaggagaaaagagagagagcgcgagagggagagggagagaaggaggggtgggaattacacaaagagagaaccaaaaataattttgattcctaagttaatttgctcactgatctgggattttagtcaccatggagggtaaatggacaatctgcccaggactgcagcccgatactatttttcaaagccagaacttactccattttctatgcaaatgtcagaaaaatgaaacaccctctctcccaagtcagagaaggggaagcaacggctctcacgttgggacaatattatctggaagctgaagaagaaactgaatactccttccttcctccccacccattcctttaaatccggagggggaaaaaatcccaaggtctgcaaagctaaaacccaatctcggatatactactaataggcgcggcgctcggactataaaacacaacaaatcataaacccggcggagcagcagcggccgcgcgcgcctcccctcccaatgagttcctatttcgtgaactccaccttccccgtcactctggccagcgggcaggagtccttcctgggccagctaccgctctattcgtcgggctatgcggacccgctgagacattaccccgcgccctacgggccagggccgggccaggacaagggctttgccacttcctcctattacccgccggcgggcggtggctacggccgagcggcgccctgcgactacgggccggcgccggccttctaccgcgagaaagagtcggcctgcgcactctccggcgccgacgagcagcccccgttccaccccgagccgcggaagtcggactgcgcgcaggacaagagcgtgttcggcgagacagaagagcagaagtgctccactccggtctacccgtggatgcagcggatgaattcgtgcaacagtgagtgagacttcccgtcgccgtcgccccggctcccctgggcgcccaccccgggacacagaactagtgagcgccccctgccccaatctcccacagggtgctgggtgggcatctcagttaggagatagaagaagattgggcgccggccgggggtctctcgctgtgtcccctattaggcaggagttacaaagtttgcaaagtcccagccgcactgggagccatggggagcaagtgtgctctcctggggcgcctggccagagccggggttccaggacagggaagggagcaggagcctgcagtcactggcttggctttactttgagcccccaacccccctctcccagccctggtagggttccccaaccaaagacggctccattaaaaacggagtgcgtcatgcaagggggtagggggtgacgctgaagaggaagagttgagtctgtctgggactgtgtttccctgtggtggggagctggggcaagatgaggcaccaggaaaggggtggtagtcagaggagggaggaggaataaggggaaggaagagagagggagcaggcggagcgagagagggagaaacaggcgcggggtctcaggttggattatttgttggccttaagtcccaactgatgtccattagccggactcgaaagtgaggagccgttaatgtggactatggatcgatctacgtcattacggattaacggcctggatttatcattgggttggggggatgacggggggtgggaacaagatggatggaaagggagggaaagacaagatgcaactaggaagagacacacctgaccagcccctccccccaggctcaggtgggagttcnaactgctcctcccctcccccatctagagtctgacagacggcacaggcctaggagactaggagggaatctggagggggcgctggaggagtgcgaaacgggggaagggagccggcagaatagagggcatcccggtactggctggagtctgtgttcgagggtcgactaggggagggggtcctgggcccggtgaccgcaggcctcagcatctccactctgcgtaacaggttcctcctttgggcccagcggccggcgaggccgccagacatacacacgttaccagacgctggagctggagaaggagtttcactacaatcgctacctgacgcggcggcggcgcatcgagatcgcgcacgccctgtgcctgacggagaggcagatcaagatatggttccagaaccgacgcatgaagtggaaaaaggagagcaaactgctcagcgcgtctcagctcagtgccgaggaggaggaagaaaaacaggccgagtgaaggtgctggaaagggagggaggacgcgaggggaaaggcctgtggggagccacgggcgtcagagagacccgggaaggaaggctctcgggtgggggagccaggagacctgctctccggcgcagacaggcggggcccagcgctctcctggacgcccccgcccgcacagctcccggcgggtgctctgaggcctcactactcgagcccacccagcatcccgcgcgcccttccttcccgaggaactcgcctcagcctgatcaggcttcctggtgagaactgaggagcggactcacttgatgtttcctggaagcagagcaaaatgctcttgtccctgtcgcgtctcattttgtccatgtcccccgtgcacggttcaatggtagattcgctgtcccctcagcgggggccttgaagactccctgatcccagacctgtcgtctctcccaccccctccccaaagccactggaaggagcacatactacctagaagtaagaagaggagcctcagaagaaaacaaagttctattttattaattttctatgtgttgtgtttgtagtcttgtcttagctctggacgtgaaatacttcgatgatgatgatgatgatgatgatgataataataataataataacaacaacaacaacaataataaagatgtgaaaactcgacgctcggtcacctccaatcctcccctgccattttttcctctctcctcaacccccagcctctccatctttcctgagccagaattcttcagcaaaggcgagagccctggcccgccgaagcgagccctgttcgactgggaagttacagctgagataaaggctggagcgatcagtcctgcccaggccccagcgctgcgtttccctg

SEQ ID NO: 277795 - DNA, 2551 bp, Homo sapiens
aactatcaggagggttcaaagcccacaactggaagaagaatgatttcttccttgtgcccagatttactgggacagttcctgcttcttgaaaatcctatagcccaggctattcttaagtcttttgggattgtagagggtactggagtgagggttgcaggcaggatagggatcagacaaataaagccacctaggctgagggatacccctcactccttcactccatatcaccaagtgaggagagggctagtctctttccccagtgccccttcccctgccaagggtgagcagctgcatactagaaccaggcagaatgttttgggcagccaccctcgtcgccgcctttcaagaagctcctagtctagccacagagtcagaaggggaagcttgggctcagtccctcctgccagctcctcctcttctgggtcttctaggcagtgggatctggcctgccccctcagaccagaagggttgtggagaagcaggaacaataagccgaggcttggaggagacagagcagatctgataaacaggaaaaacgatgttcaaaacctggggaggagggtgtttcttctttgcttatcttagcggagaactcttctcaccttctaccgacacaaaaccctagaaacaaaccttctttagttctctctcaaggcgattcggagacatttacccaaccctccctggagagaaggggtcgaagcaacgcaggggttaacttttctgaaaacacaattaactttttccaatcctgcgtggggtgggggagagacatatttatttaatcacccgggagtggggtggtctcaatctaaacgttccctcctccctcaaaggcactgagcctgtttcacagatcctacgtaggtggaacaggacgcgttgtgttgttggggagagagaggagaaaggcgaaggagaaggaggaaaaaaaaaaggttgataggtttgtgcgcgggtccctcgtgcgggctgcgctcctcctgggtgctatttgacaattcctgcctctgccattggtcagtgttggatcagatggttgtatttccttctggccctcactggcacctcgccatcccccctcagctaaaacccaatctcggatatactactaataggcgcggcgctcggactataaaacacaacaaatcataaacccggcggagcagcagcggccgcgcgcgcctcccctcccaatgagttcctatttcgtgaactccaccttccccgtcactctggccagcgggcaggagtccttcctgggccagctaccgctctattcgtcgggctatgcggacccgctgagacattaccccgcgccctacgggccagggccgggccaggacaaggcgtgttcggcgagacagaagagcagaagtgctccactccggtctacccgtggatgcagcggatgaattcgtgcaacagttcctcctttgggcccagcggccggcgaggccgccagacatacacacgttaccagacgctggagctggagaaggagtttcactacaatcgctacctgacgcggcggcggcgcatcgagatcgcgcacgccctgtgcctgacggagaggcagatcaagatatggttccagaaccgacgcatgaagtggaaaaaggagagcaaactgctcagcgcgtctcagctcagtgccgaggaggaggaagaaaaacaggccgagtgaaggtgctggaaagggagggaggacgcgaggggaaaggcctgtggggagccacgggcgtcagagagacccgggaaggaaggctctcgggtgggggagccaggagacctgctctccggcgcagacaggcggggcccagcgctctcctggacgcccccgcccgcacagctcccggcgggtgctctgaggcctcactactcgagcccacccagcatcccgcgcgcccttccttcccgaggaactcgcctcagcctgatcaggcttcctggtgagaactgaggagcggactcacttgatgtttcctggaagcagagcaaaatgctcttgtccctgtcgcgtctcattttgtccatgtcccccgtgcacggttcaatggtagattcgctgtcccctcagcgggggccttgaagactccctgatcccagacctgtcgtctctcccaccccctccccaaagccactggaaggagcacatactacctagaagtaagaagaggagcctcagaagaaaacaaagttctattttattaattttctatgtgttgtgtttgtagtcttgtcttagctctggacgtgaaatacttcgatgatgatgatgatgatgatgatgataataataataataataacaacaacaacaacaataataaagatgtgaaaactcgacgctcggtcacctccaatcctcccctgccattttttcctctctcctcaacccccagcctctccatctttcctgagccagaattcttcagcaaaggcgagagccctggcccgccgaagcgagccctgttcgactgggaagttacagctgagataaaggctggagcgatcagtcctgcccaggccccagcgctgcgtttccctg

SEQ ID NO: 277796 - DNA, 3413 bp, Homo sapiens
aactatcaggagggttcaaagcccacaactggaagaagaatgatttcttccttgtgcccagatttactgggacagttcctgcttcttgaaaatcctatagcccaggctattcttaagtcttttgggattgtagagggtactggagtgagggttgcaggcaggatagggatcagacaaataaagccacctaggctgagggatacccctcactccttcactccatatcaccaagtgaggagagggctagtctctttccccagtgccccttcccctgccaagggtgagcagctgcatactagaaccaggcagaatgttttgggcagccaccctcgtcgccgcctttcaagaagctcctagtctagccacagagtcagaaggggaagcttgggctcagtccctcctgccagctcctcctcttctgggtcttctaggcagtgggatctggcctgccccctcagaccagaagggttgtggagaagcaggaacaataagccgaggcttggaggagacagagcagatctgataaacaggaaaaacgatgttcaaaacctggggaggagggtgtttcttctttgcttatcttagcggagaactcttctcaccttctaccgacacaaaaccctagaaacaaaccttctttagttctctctcaaggcgattcggagacatttacccaaccctccctggagagaaggggtcgaagcaacgcaggggttaacttttctgaaaacacaattaactttttccaatcctgcgtggggtgggggagagacatatttatttaatcacccgggagtggggtggtctcaatctaaacgttccctcctccctcaaaggcactgagcctgtttcacagatcctacgtaggtggaacaggacgcgttgtgttgttggggagagagaggagaaaggcgaaggagaaggaggaaaaaaaaaaggttgataggtttgtgcgcgggtccctcgtgcgggctgcgctcctcctgggtgctatttgacaattcctgcctctgccattggtcagtgttggatcagatggttgtatttccttctggccctcactggcacctcgccatcccccctcagctaaaacccaatctcggatatactactaataggcgcggcgctcggactataaaacacaacaaatcataaacccggcggagcagcagcggccgcgcgcgcctcccctcccaatgagttcctatttcgtgaactccaccttccccgtcactctggccagcgggcaggagtccttcctgggccagctaccgctctattcgtcgggctatgcggacccgctgagacattaccccgcgccctacgggccagggccgggccaggacaagggctttgccacttcctcctattacccgccggcgggcggtggctacggccgagcggcgccctgcgactacgggccggcgccggccttctaccgcgagaaagagtcggcctgcgcactctccggcgccgacgagcagcccccgttccaccccgagccgcggaagtcggactgcgcgcaggacaagagcgtgttcggcgagacagaagagcagaagtgctccactccggtctacccgtggatgcagcggatgaattcgtgcaacagtgagtgagacttcccgtcgccgtcgccccggctcccctgggcgcccaccccgggacacagaactagtgagcgccccctgccccaatctcccacagggtgctgggtgggcatctcagttaggagatagaagaagattgggcgccggccgggggtctctcgctgtgtcccctattaggcaggagttacaaagtttgcaaagtcccagccgcactgggagccatggggagcaagtgtgctctcctggggcgcctggccagagccggggttccaggacagggaagggagcaggagcctgcagtcactggcttggctttactttgagcccccaacccccctctcccagccctggtagggttccccaaccaaagacggctccattaaaaacggagtgcgtcatgcaagggggtagggggtgacgctgaagaggaagagttgagtctgtctgggactgtgtttccctgtggtggggagctggggcaagatgaggcaccaggaaaggggtggtagtcagaggagggaggaggaataaggggaaggaagagagagggagcaggcggagcgagagagggagaaacaggcgcggggtctcaggttggattatttgttggccttaagtcccaactgatgtccattagccggactcgaaagtgaggagccgttaatgtggactatggatcgatctacgtcattacggattaacggcctggatttatcattgggttggggggatgacggggggtgggaacaagatggatggaaagggagggaaagacaagatgcaactaggaagagacacacctgaccagcccctccccccaggctcaggttcctcctttgggcccagcggccggcgaggccgccagacatacacacgttaccagacgctggagctggagaaggagtttcactacaatcgctacctgacgcggcggcggcgcatcgagatcgcgcacgccctgtgcctgacggagaggcctgtggggagccacgggcgtcagagagacccgggaaggaaggctctcgggtgggggagccaggagacctgctctccggcgcagacaggcggggcccagcgctctcctggacgcccccgcccgcacagctcccggcgggtgctctgaggcctcactactcgagcccacccagcatcccgcgcgcccttccttcccgaggaactcgcctcagcctgatcaggcttcctggtgagaactgaggagcggactcacttgatgtttcctggaagcagagcaaaatgctcttgtccctgtcgcgtctcattttgtccatgtcccccgtgcacggttcaatggtagattcgctgtcccctcagcgggggccttgaagactccctgatcccagacctgtcgtctctcccaccccctccccaaagccactggaaggagcacatactacctagaagtaagaagaggagcctcagaagaaaacaaagttctattttattaattttctatgtgttgtgtttgtagtcttgtcttagctctggacgtgaaatacttcgatgatgatgatgatgatgatgatgataataataataataataacaacaacaacaacaataataaagatgtgaaaactcgacgctcggtcacctccaatcctcccctgccattttttcctctctcctcaacccccagcctctccatctttcctgagccagaattcttcagcaaaggcgagagccctggcccgccgaagcgagccctgttcgactgggaagttacagctgagataaaggctggagcgatcagtcctgcccaggccccagcgctgcgtttccctg

SEQ ID NO: 277797 - DNA, 695 bp, Homo sapiens
aactatcaggagggttcaaagcccacaactggaagaagaatgatttcttccttgtgcccagatttactgggacagttcctgcttcttgaaaatcctatagcccaggctattcttaagtcttttgggattgtagagggtactggagtgagggttgcaggcaggatagggatcagacaaataaagccacctaggctgagggatacccctcactccttcactccatatcaccaagtgaggagagggctagtctctttccccagtgccccttcccctgccaagggtgagcagctgcatactagaaccaggcagaatgttttgggcagccaccctcgtcgccgcctttcaagaagctcctagtctagccacagagtcagaaggggaagcttgggctcagtccctcctgccagctcctcctcttctgggtcttctaggcagtgggatctggcctgccccctcagaccagaagggttgtggagaagcaggaacaataagccgaggcttggaggagacagagcagatctgataaacaggaaaaacgatgttcaaaacctggggaggagggaacgtctagattgagaccaccccactcccgggtgattaaataaatatgtctctcccccaacccacgcaggattggaaaaagttaattctgttttcagacaagttcacccctgcgtagcttcgaccccttctct

SEQ ID NO: 277798 - DNA, 598 bp, Homo sapiens
gcaccacacctaggtcggagcactgtcgtccttcagggctccagcctcttgatatttttgtacttcagtatcagctcgatagagcaaaagagagagaggacgagagaggggggtgaggagaaaagagagagagcgcgagagggagagggagagaaggaggggtgggaattacacaaagagagaaccaaaaataattttgattcctaagttaatttgctcactgatctgggattttagtcaccatggagggtaaatggacaatctgcccaggactgcagcccgatactatttttcaaagccagaacttactccattttctatgcaaatgtcagaaaaatgaaacaccctctctcccaagtcagagaaggggaagcaacggctctcacgttgggacaatattatctggaagctgaagaagaaactgaatactccttccttcctccccacccattcgtttttctccctcctcccccgttccaagacggggctgaaccccacctctgggcgctgcagggagaagcttcccaggaaattcagtggtggagatatgggtggctgcttcctggagggggagccaaggcagggaaagcgggaagag

SEQ ID NO: 277799 - DNA, 226 bp, Homo sapiens
ccttcagaaatagaagttggagtagtgacacttgaaaatcctatattcaggattctttcaagaagcaggaactgtccagttcctgcttcttgaaaatcctatagcccaggctattcttaagtcttttgggattgtagagggtactggagtgagggttgcaggcaggatagggatattcttcactcatatcatctccgtgagcagctgcatactagaccaggcagta

SEQ ID NO: 277800 - DNA, 625 bp, Homo sapiens
taaatccggagggggaaaaaatcccaaggtctgcaaaggtaagggagattctacaattttcttcttgttcttttgcatcgcttttgtagggtgggggtggggcttgggtttttctccctcctcccccgttccaagacggggctgaaccccacctctgggcgctgcagggagaagcttcccaggaaattcagtggtggagatatgggtggctgcttcctggagggggagccaaggcagggaaagcgggaagaggaatcaaaagagggccaggagaccagctctaagtcgcctttttaagcttggaggagagactcaagcaaggggggtgcgaaagagaggatggggggtatctgggcttcagtggcacccaaagaagccagtggttctggcctccgcgggcttgcccctccccctcctgccatccctcccttgtctcggcctctggctattgccccagcgcagttctcttgcctggtgcggatatcgctgggttcccggcagcactggcatgtgaggcggtggcgctaagggacgtcctggtttctatagggcctggaatctccgccgaggccggcgagggagaggaaacggctagagaaacacagaaaagacaatttacagagaa

SEQ ID NO: 277801 - DNA, 674 bp, Homo sapiens
atctgggcttcagtggcacccaaagaagccagtggttctggcctccgcgggcttgcccctccccctcctgccatccctcccttgtctcggcctctggctattgccccagcgcagttctcttgcctggtgcggatatcgctgggttcccggcagcactggcatgtgaggcggtggcgctaagggacgtcctggtttctatagggcctggaatctccgccgaggccggcgagggagaggaaacggctagagaaacacagaaaagacaatttacagagaaatgtttactatctcccttcggagacatttttgaaattaaagggctgtgggtggaaacaccaaaaatgagggagactcccccctcaccaggaagcctgcccgagaatgcccaagtatctcgccactcccgcaggagggagcctcgctctacagggagacagttttgtggttttaatgcggtaggttacagctgttggtttctgcgtgatactgattctattacttgcgttgtattggtatgggatgtgtggatttcggtggaggaaaaaattgccatgtgtgtgtctgatatgataacatttcaaactttcctgggtccagacatggtgattgtgaagaagctgttaagtgcctttttgttttaggcttgtaaataaaaataaaagagaaagaaatga

SEQ ID NO: 277802 - DNA, 3796 bp, Homo sapiens
  misc_feature (2448)..(2448): n is a, c, g, or t
aactatcaggagggttcaaagcccacaactggaagaagaatgatttcttccttgtgcccagatttactgggacagttcctgcttcttgaaaatcctatagcccaggctattcttaagtcttttgggattgtagagggtactggagtgagggttgcaggcaggatagggatcagacaaataaagccacctaggctgagggatacccctcactccttcactccatatcaccaagtgaggagagggctagtctctttccccagtgccccttcccctgccaagggtgagcagctgcatactagaaccaggcagaatgttttgggcagccaccctcgtcgccgcctttcaagaagctcctagtctagccacagagtcagaaggggaagcttgggctcagtccctcctgccagctcctcctcttctgggtcttctaggcagtgggatctggcctgccccctcagaccagaagggttgtggagaagcaggaacaataagccgaggcttggaggagacagagcagatctgataaacaggaaaaacgatgttcaaaacctggggaggagggtgtttcttctttgcttatcttagcggagaactcttctcaccttctaccgacacaaaaccctagaaacaaaccttctttagttctctctcaaggcgattcggagacatttacccaaccctccctggagagaaggggtcgaagcaacgcaggggttaacttttctgaaaacacaattaactttttccaatcctgcgtggggtgggggagagacatatttatttaatcacccgggagtggggtggtctcaatctaaacgttccctcctccctcaaaggcactgagcctgtttcacagatcctacgtaggtggaacaggacgcgttgtgttgttggggagagagaggagaaaggcgaaggagaaggaggaaaaaaaaaaggttgataggtttgtgcgcgggtccctcgtgcgggctgcgctcctcctgggtgctatttgacaattcctgcctctgccattggtcagtgttggatcagatggttgtatttccttctggccctcactggcacctcgccatcccccctcagctaaaacccaatctcggatatactactaataggcgcggcgctcggactataaaacacaacaaatcataaacccggcggagcagcagcggccgcgcgcgcctcccctcccaatgagttcctatttcgtgaactccaccttccccgtcactctggccagcgggcaggagtccttcctgggccagctaccgctctattcgtcgggctatgcggacccgctgagacattaccccgcgccctacgggccagggccgggccaggacaagggctttgccacttcctcctattacccgccggcgggcggtggctacggccgagcggcgccctgcgactacgggccggcgccggccttctaccgcgagaaagagtcggcctgcgcactctccggcgccgacgagcagcccccgttccaccccgagccgcggaagtcggactgcgcgcaggacaagagcgtgttcggcgagacagaagagcagaagtgctccactccggtctacccgtggatgcagcggatgaattcgtgcaacagtgagtgagacttcccgtcgccgtcgccccggctcccctgggcgcccaccccgggacacagaactagtgagcgccccctgccccaatctcccacagggtgctgggtgggcatctcagttaggagatagaagaagattgggcgccggccgggggtctctcgctgtgtcccctattaggcaggagttacaaagtttgcaaagtcccagccgcactgggagccatggggagcaagtgtgctctcctggggcgcctggccagagccggggttccaggacagggaagggagcaggagcctgcagtcactggcttggctttactttgagcccccaacccccctctcccagccctggtagggttccccaaccaaagacggctccattaaaaacggagtgcgtcatgcaagggggtagggggtgacgctgaagaggaagagttgagtctgtctgggactgtgtttccctgtggtggggagctggggcaagatgaggcaccaggaaaggggtggtagtcagaggagggaggaggaataaggggaaggaagagagagggagcaggcggagcgagagagggagaaacaggcgcggggtctcaggttggattatttgttggccttaagtcccaactgatgtccattagccggactcgaaagtgaggagccgttaatgtggactatggatcgatctacgtcattacggattaacggcctggatttatcattgggttggggggatgacggggggtgggaacaagatggatggaaagggagggaaagacaagatgcaactaggaagagacacacctgaccagcccctccccccaggctcaggtgggagttcnaactgctcctcccctcccccatctagagtctgacagacggcacaggcctaggagactaggagggaatctggagggggcgctggaggagtgcgaaacgggggaagggagccggcagaatagagggcatcccggtactggctggagtctgtgttcgagggtcgactaggggagggggtcctgggcccggtgaccgcaggcctcagcatctccactctgcgtaacaggttcctcctttgggcccagcggccggcgaggccgccagacatacacacgttaccagacgctggagctggagaaggagtttcactacaatcgctacctgacgcggcggcggcgcatcgagatcgcgcacgccctgtgcctgacggagaggcagatcaagatatggttccagaaccgacgcatgaagtggaaaaaggagagcaaactgctcagcgcgtctcagctcagtgccgaggaggaggaagaaaaacaggccgagtgaaggtgctggaaagggagggaggacgcgaggggaaaggcctgtggggagccacgggcgtcagagagacccgggaaggaaggctctcgggtgggggagccaggagacctgctctccggcgcagacaggcggggcccagcgctctcctggacgcccccgcccgcacagctcccggcgggtgctctgaggcctcactactcgagcccacccagcatcccgcgcgcccttccttcccgaggaactcgcctcagcctgatcaggcttcctggtgagaactgaggagcggactcacttgatgtttcctggaagcagagcaaaatgctcttgtccctgtcgcgtctcattttgtccatgtcccccgtgcacggttcaatggtagattcgctgtcccctcagcgggggccttgaagactccctgatcccagacctgtcgtctctcccaccccctccccaaagccactggaaggagcacatactacctagaagtaagaagaggagcctcagaagaaaacaaagttctattttattaattttctatgtgttgtgtttgtagtcttgtcttagctctggacgtgaaatacttcgatgatgatgatgatgatgatgatgataataataataataataacaacaacaacaacaataataaagatgtgaaaactcgacgctcggtcacctccaatcctcccctgccattttttcctctctcctcaacccccagcctctccatctttcctgagccagaattcttcagcaaaggcgagagccctggcccgccgaagcgagccctgttcgactgggaagttacagctgagataaaggctggagcgatcagtcctgcccaggccccagcgctgcgtttccctg

SEQ ID NO: 277803 - DNA, 2735 bp, Homo sapiens
aactatcaggagggttcaaagcccacaactggaagaagaatgatttcttccttgtgcccagatttactgggacagttcctgcttcttgaaaatcctatagcccaggctattcttaagtcttttgggattgtagagggtactggagtgagggttgcaggcaggatagggatcagacaaataaagccacctaggctgagggatacccctcactccttcactccatatcaccaagtgaggagagggctagtctctttccccagtgccccttcccctgccaagggtgagcagctgcatactagaaccaggcagaatgttttgggcagccaccctcgtcgccgcctttcaagaagctcctagtctagccacagagtcagaaggggaagcttgggctcagtccctcctgccagctcctcctcttctgggtcttctaggcagtgggatctggcctgccccctcagaccagaagggttgtggagaagcaggaacaataagccgaggcttggaggagacagagcagatctgataaacaggaaaaacgatgttcaaaacctggggaggagggtgtttcttctttgcttatcttagcggagaactcttctcaccttctaccgacacaaaaccctagaaacaaaccttctttagttctctctcaaggcgattcggagacatttacccaaccctccctggagagaaggggtcgaagcaacgcaggggttaacttttctgaaaacacaattaactttttccaatcctgcgtggggtgggggagagacatatttatttaatcacccgggagtggggtggtctcaatctaaacgttccctcctccctcaaaggcactgagcctgtttcacagatcctacgtaggtggaacaggacgcgttgtgttgttggggagagagaggagaaaggcgaaggagaaggaggaaaaaaaaaaggttgataggtttgtgcgcgggtccctcgtgcgggctgcgctcctcctgggtgctatttgacaattcctgcctctgccattggtcagtgttggatcagatggttgtatttccttctggccctcactggcacctcgccatcccccctcagctaaaacccaatctcggatatactactaataggcgcggcgctcggactataaaacacaacaaatcataaacccggcggagcagcagcggccgcgcgcgcctcccctcccaatgagttcctatttcgtgaactccaccttccccgtcactctggccagcgggcaggagtccttcctgggccagctaccgctctattcgtcgggctatgcggacccgctgagacattaccccgcgccctacgggccagggccgggccaggacaagggctttgccacttcctcctattacccgccggcgggcggtggctacggccgagcggcgccctgcgactacgggccggcgccggccttctaccgcgagaaagagtcggcctgcgcactctccggcgccgacgagcagcccccgttccaccccgagccgcggaagtcggactgcgcgcaggacaagagcgtgttcggcgagacagaagagcagaagtgctccactccggtctacccgtggatgcagcggatgaattcgtgcaacagttcctcctttgggcccagcggccggcgaggccgccagacatacacacgttaccagacgctggagctggagaaggagtttcactacaatcgctacctgacgcggcggcggcgcatcgagatcgcgcacgccctgtgcctgacggagaggcagatcaagatatggttccagaaccgacgcatgaagtggaaaaaggagagcaaactgctcagcgcgtctcagctcagtgccgaggaggaggaagaaaaacaggccgagtgaaggtgctggaaagggagggaggacgcgaggggaaaggcctgtggggagccacgggcgtcagagagacccgggaaggaaggctctcgggtgggggagccaggagacctgctctccggcgcagacaggcggggcccagcgctctcctggacgcccccgcccgcacagctcccggcgggtgctctgaggcctcactactcgagcccacccagcatcccgcgcgcccttccttcccgaggaactcgcctcagcctgatcaggcttcctggtgagaactgaggagcggactcacttgatgtttcctggaagcagagcaaaatgctcttgtccctgtcgcgtctcattttgtccatgtcccccgtgcacggttcaatggtagattcgctgtcccctcagcgggggccttgaagactccctgatcccagacctgtcgtctctcccaccccctccccaaagccactggaaggagcacatactacctagaagtaagaagaggagcctcagaagaaaacaaagttctattttattaattttctatgtgttgtgtttgtagtcttgtcttagctctggacgtgaaatacttcgatgatgatgatgatgatgatgatgataataataataataataacaacaacaacaacaataataaagatgtgaaaactcgacgctcggtcacctccaatcctcccctgccattttttcctctctcctcaacccccagcctctccatctttcctgagccagaattcttcagcaaaggcgagagccctggcccgccgaagcgagccctgttcgactgggaagttacagctgagataaaggctggagcgatcagtcctgcccaggccccagcgctgcgtttccctg

SEQ ID NO: 277804 - DNA, 2531 bp, Homo sapiens
aactatcaggagggttcaaagcccacaactggaagaagaatgatttcttccttgtgcccagatttactgggacagttcctgcttcttgaaaatcctatagcccaggctattcttaagtcttttgggattgtagagggtactggagtgagggttgcaggcaggatagggatcagacaaataaagccacctaggctgagggatacccctcactccttcactccatatcaccaagtgaggagagggctagtctctttccccagtgccccttcccctgccaagggtgagcagctgcatactagaaccaggcagaatgttttgggcagccaccctcgtcgccgcctttcaagaagctcctagtctagccacagagtcagaaggggaagcttgggctcagtccctcctgccagctcctcctcttctgggtcttctaggcagtgggatctggcctgccccctcagaccagaagggttgtggagaagcaggaacaataagccgaggcttggaggagacagagcagatctgataaacaggaaaaacgatgttcaaaacctggggaggagggtgtttcttctttgcttatcttagcggagaactcttctcaccttctaccgacacaaaaccctagaaacaaaccttctttagttctctctcaaggcgattcggagacatttacccaaccctccctggagagaaggggtcgaagcaacgcaggggttaacttttctgaaaacacaattaactttttccaatcctgcgtggggtgggggagagacatatttatttaatcacccgggagtggggtggtctcaatctaaacgttccctcctccctcaaaggcactgagcctgtttcacagatcctacgtaggtggaacaggacgcgttgtgttgttggggagagagaggagaaaggcgaaggagaaggaggaaaaaaaaaaggttgataggtttgtgcgcgggtccctcgtgcgggctgcgctcctcctgggtgctatttgacaattcctgcctctgccattggtcagtgttggatcagatggttgtatttccttctggccctcactggcacctcgccatcccccctcagctaaaacccaatctcggatatactactaataggcgcggcgctcggactataaaacacaacaaatcataaacccggcggagcagcagcggccgcgcgcgcctcccctcccaatgagttcctatttcgtgaactccaccttccccgtcactctggccagcgggcaggagtccttcctgggccagctaccgctctattcgtcgggctatgcggacccgctgagacattaccccgcgccctacgggccagggccgggccaggacaagggctttgccacttcctcctattacccgccggcgggcggtggctacggccgagcggcgccctgcgactacgggccggcgccggccttctaccgcgagaaagagtcggcctgcgcactctccggcgccgacgagcagcccccgttccaccccgagccgcggaagtcggactgcgcgcaggacaagagcgtgttcggcgagacagaagagcagaagtgctccactccggtctacccgtggatgcagcggatgaattcgtgcaacagttcctcctttgggcccagcggccggcgaggccgccagacatacacacgttaccagacgctggagctggagaaggagtttcactacaatcgctacctgacgcggcggcggcgcatcgagatcgcgcacgccctgtgcctgacggagaggcagatcaagatatggttccagaaccgacgcatgaagtggaaaaaggagagcaaactgctcagcgcgtctcagctcagtgccgaggaggaggaagaaaaacaggccgagtgaaggtgctggaaagggagggaggacgcgaggggaaaggcctgtggggagccacgggcgtcagagagacccgggaaggaaggctctcgggtgggggagccaggagacctgctctccggcgcagacaggcggggcccagcgctctcctggacgcccccgcccgcacagctcccggcgggtgctctgaggcctcactactcgagcccacccagcatcccgcgcgcccttccttcccgaggaactcgcctcagcctgatcaggcttcctggtgagaactgaggagcggactcacttgatgtttcctggaagcagagcaaaatgctcttgtccctgtcgcgtctcattttgtccatgtcccccgtgcacggttcaatggtagattcgctgtcccctcagcgggggccttgaagactccctgatcccagacctgtcgtctctcccaccccctccccaaagccactggaaggagcacatactacctagaagtaagaagaggagcctcagaagaaaacaaagttctattttattaattttctatgtgttgtgtttgtagtcttgtcttagctctggacgtgaaatacttcgatgatgatgatgatgatgatgatgataataataataataataacaacaacaacaacaataataaagatgtgaaaactc

SEQ ID NO: 277805 - DNA, 3165 bp, Homo sapiens
  misc_feature (1817)..(1817): n is a, c, g, or t
atctgggcttcagtggcacccaaagaagccagtggttctggcctccgcgggcttgcccctccccctcctgccatccctcccttgtctcggcctctggctattgccccagcgcagttctcttgcctggtgcggatatcgctgggttcccggcagcactggcatgtgaggcggtggcgctaagggacgtcctggtttctatagggcctggaatctccgccgaggccggcgagggagaggaaacggctagagaaacacagaaaagacaatttacagagaaatgtttactatctcccttcggagacatttttgaaattaaagggctgtgggtggaaacaccaaaaatgagggagactcccccctcaccaggaagcctgcccgagaatgcccaagtatctcgccactcccgcaggagggagcctcgctctacagggagacagttttgtggttttaatgcgctaaaacccaatctcggatatactactaataggcgcggcgctcggactataaaacacaacaaatcataaacccggcggagcagcagcggccgcgcgcgcctcccctcccaatgagttcctatttcgtgaactccaccttccccgtcactctggccagcgggcaggagtccttcctgggccagctaccgctctattcgtcgggctatgcggacccgctgagacattaccccgcgccctacgggccagggccgggccaggacaagggctttgccacttcctcctattacccgccggcgggcggtggctacggccgagcggcgccctgcgactacgggccggcgccggccttctaccgcgagaaagagtcggcctgcgcactctccggcgccgacgagcagcccccgttccaccccgagccgcggaagtcggactgcgcgcaggacaagagcgtgttcggcgagacagaagagcagaagtgctccactccggtctacccgtggatgcagcggatgaattcgtgcaacagtgagtgagacttcccgtcgccgtcgccccggctcccctgggcgcccaccccgggacacagaactagtgagcgccccctgccccaatctcccacagggtgctgggtgggcatctcagttaggagatagaagaagattgggcgccggccgggggtctctcgctgtgtcccctattaggcaggagttacaaagtttgcaaagtcccagccgcactgggagccatggggagcaagtgtgctctcctggggcgcctggccagagccggggttccaggacagggaagggagcaggagcctgcagtcactggcttggctttactttgagcccccaacccccctctcccagccctggtagggttccccaaccaaagacggctccattaaaaacggagtgcgtcatgcaagggggtagggggtgacgctgaagaggaagagttgagtctgtctgggactgtgtttccctgtggtggggagctggggcaagatgaggcaccaggaaaggggtggtagtcagaggagggaggaggaataaggggaaggaagagagagggagcaggcggagcgagagagggagaaacaggcgcggggtctcaggttggattatttgttggccttaagtcccaactgatgtccattagccggactcgaaagtgaggagccgttaatgtggactatggatcgatctacgtcattacggattaacggcctggatttatcattgggttggggggatgacggggggtgggaacaagatggatggaaagggagggaaagacaagatgcaactaggaagagacacacctgaccagcccctccccccaggctcaggtgggagttcnaactgctcctcccctcccccatctagagtctgacagacggcacaggcctaggagactaggagggaatctggagggggcgctggaggagtgcgaaacgggggaagggagccggcagaatagagggcatcccggtactggctggagtctgtgttcgagggtcgactaggggagggggtcctgggcccggtgaccgcaggcctcagcatctccactctgcgtaacaggttcctcctttgggcccagcggccggcgaggccgccagacatacacacgttaccagacgctggagctggagaaggagtttcactacaatcgctacctgacgcggcggcggcgcatcgagatcgcgcacgccctgtgcctgacggagaggcagatcaagatatggttccagaaccgacgcatgaagtggaaaaaggagagcaaactgctcagcgcgtctcagctcagtgccgaggaggaggaagaaaaacaggccgagtgaaggtgctggaaagggagggaggacgcgaggggaaaggcctgtggggagccacgggcgtcagagagacccgggaaggaaggctctcgggtgggggagccaggagacctgctctccggcgcagacaggcggggcccagcgctctcctggacgcccccgcccgcacagctcccggcgggtgctctgaggcctcactactcgagcccacccagcatcccgcgcgcccttccttcccgaggaactcgcctcagcctgatcaggcttcctggtgagaactgaggagcggactcacttgatgtttcctggaagcagagcaaaatgctcttgtccctgtcgcgtctcattttgtccatgtcccccgtgcacggttcaatggtagattcgctgtcccctcagcgggggccttgaagactccctgatcccagacctgtcgtctctcccaccccctccccaaagccactggaaggagcacatactacctagaagtaagaagaggagcctcagaagaaaacaaagttctattttattaattttctatgtgttgtgtttgtagtcttgtcttagctctggacgtgaaatacttcgatgatgatgatgatgatgatgatgataataataataataataacaacaacaacaacaataataaagatgtgaaaactcgacgctcggtcacctccaatcctcccctgccattttttcctctctcctcaacccccagcctctccatctttcctgagccagaattcttcagcaaaggcgagagccctggcccgccgaagcgagccctgttcgactgggaagttacagctgagataaaggctggagcgatcagtcctgcccaggccccagcgctgcgtttccctg

SEQ ID NO: 277806 - DNA, 745 bp, Homo sapiens
ctcccagagtgctctgggccggagaaacctcccgcaggctcccgggccaggcgtgcaaggccccctctcctgccagggcccaggacgctgcgggccccagcggaggggaaggggactaagtaggggaagaagctgtaaacagccccagcgtccgggcctcgcctcgaagagccgcgcttcccaggcccagccgcgggccgcccaggcccccagcctgccccggggccgccgcgcccggggtccgggacaccggaggggagtcgggtcccctccccggagagctccgggagctcgcggagcggccccaggagcagagaagggggaagtcaggacttacctgtcattactttctacgccatcttggatccacttgtcaacgtccccacaaagcattatggacgccccgcgtctgcattgaatcaacccgaggtttccttgccgcccgcggcgcggcgcggagctgctcgcggatttatttgtgcgcgtggatgtgagcgtttctgctcctgcggccgcgcttccaggaagcccgcgagcggccggggtcgccttcagaggccgcgcagaccagctccgcacccgccgcccggagaggtgcctctgccctgggaaaccgccccggggccgttgggctccgggaactgggaggacgccgtgtccccgagtccaccagcgtcgaagcacgatttacacaccacacaattgaggccaatgccaaaagacacaaaaaaactctcaggagcga

SEQ ID NO: 277807 - DNA, 816 bp, Homo sapiens
ctcccagagtgctctgggccggagaaacctcccgcaggctcccgggccaggcgtgcaaggccccctctcctgccagggcccaggacgctgcgggccccagcggaggggaaggggactaagtaggggaagaagctgtaaacagccccagcgtccgggcctcgcctcgaagagccgcgcttcccaggcccagccgcgggccgcccaggcccccagcctgccccggggccgccgcgcccggggtccgggacaccggaggggagtcgggtcccctccccggagagctccgggagctcgcggagcggccccaggagcagagaagggggaagtcaggacttacctgtcattactttctacgccatcttggatccacttgtcaacgtccccacaaagcattatgggtcctactgcaactcgaatggcacttaggctccacaagaccaacttcctatttctacatcagtgaaggttcggagtggagcttttcattcagcaaagacagcaggaagcacagggttcggtgatgaattctcacgtgcaggtacctcttcagtagaaaaattcaataaggtttctgacactttctacctatgggccagttacatacagaagagaaaactgaaactgaaaactggtttgtcatttttacagaaagtcactgcaaagaaggagaattccaagtgcaaatgacttgagcttgacggaaaggtaaaaatatccctatgattctcttcacaagaaggtagccaagtatttattggatgcaagacagtttgtttaaggagcctaaaaaagcaaagatgcagcggtgagaaagaa

SEQ ID NO: 277808 - DNA, 268 bp, Homo sapiens
cgggtggactgccgaccccggcgcccgcagctggccccttcccctcccccgggctgacggcattgaaaattcacccgcatttttaaaacgtggctttggggttttctccctttctcctgccccggcctccctgcccccacgcccggtcctctcgcctcgccgcgttcctgcccgggcagacgccccgcgtctgcattgaatcaacccgaggtttccttgccgcccgcggcgcggcgcggagctgctcgcggatttatttgtgcgcgtg

SEQ ID NO: 277809 - DNA, 381 bp, Homo sapiens
gaattcactaagcctcttgaggaccagacggtcgaagagggagccactgcagtgctggagtgtgaagtctccagagaaaatgctaaggtgaaatggttcaaaaatgggacagaaatcctcaaaagcaagaagtatgaaattgttgctgatggcagggtcagaaaacttgttatacatgactgtaccccagaggatattaaaacatacacttgtgatgctaaggattttaagacttcctgtaacctgaatgtcgtgcctcctcatgtggaattcttaagaccactcaccgaccttcaagttagagaaaaagaaatggctcgatttgagtgtgaactttcccgagaaaatgctaaggtctgtgactgtatacctgtcatcttg

SEQ ID NO: 277810 - DNA, 528 bp, Homo sapiens
actttatttctgctacaaattatataataccttttaagacagagtccaattatccatttttatatatgataaactattttatacagtaccttggaggtaataggttcttgatatctatctaatatctgtttggctgaagacactgataaggaggaatgcatgcataattcagtgaatacccaacctttataataataaggtatttcctatccttccataaaattataatttttttgtgatagatacttgctgttttattattctgtctgatattccgtagatagccaataacatttacatttattcaatctgaagttactgcacatatactatgtgtcaggtatttttttagatttggctaggtgctttcaaagatgaatgaagatgctctttgtcttaataaatttaactctgattttgaagatagaattaataaagtagagatgcattttgacttccatgttttcctcactcgtgtaatttctgcactatatatgattactcaagttgaactttaaaggatatttg

SEQ ID NO: 277811 - DNA, 1223 bp, Homo sapiens
cttgtcatttttgaagctaaacgtattctggtgcttctgaggtctggaacgagccacgttgcctttctgggagctcatcgccgaaatcaaagccacccctcgccgggagcaggcaaaaggatgaggggaaagaaaaccaacgaactactcccaggaattgacgcttctgtcaatgacccggaagaaacaaacgcagcctttccgccccggctctgggtcagcccacgtgactcttctgggaggtcaaagagcatcgctctgccctccctgctgttaagccaagccactccacgcggcgcagcctcgacccctccggctccgcgcagcctctttctcaaacccggagaacaagtcccactttcttcgaaatgagaattcccccattggcccgaatgtgtagtccatcaaatcaaaggggcggggaacctttgttcctattggttcttcttttccgcaatccccgcctcctgctgagcgagctcagcctctccttgagctcagagcgcctcccaccctgccgggcggcctctgattggtggaagtgaggcaaggctgggctccgtctctccccccgcccgctagtaggctggagccggggtcagctttggcaccttcctccagtcagtggccaactcctggctcagtggggattgtgctcgtcccctccgttcccctccagtcttcctcccgctaccggaacgagcctcgcgcttggcaggctgaggaggagcaaagaaagcaggattaaagagaaggaagacctggctaggtctgggtggcgtctgcagtgccagaaagggaggcggtggcggcggcggctgcgaccacggccgcgcgggacgtgaggcccgagagcaaccgacgggcagcggcggccgctccagcgccccgcaccggggccgttagtcagcagaacgcgagctcttgtggaggagcagggccggcgcgaggcgagactcgggagcgtgagcggggcccctggggcgccgccgtccttcttcgccccggcgccgggggctgtagccctggtccccgctcctctgtcgggccagtctgcaggcggagagagtcggacggcgcccggagcgcggatctcgccttgtggaggacagcgcgtcggctgcggttctctctcgaccccttctgcccggcgcttcggcccgggccgctcaggtgcaggtgcgtgcggcctcggggtttggggacgccgcagcccggctcgg

SEQ ID NO: 277812 - DNA, 3686 bp, Homo sapiens
cttgtcatttttgaagctaaacgtattctggtgcttctgaggtctggaacgagccacgttgcctttctgggagctcatcgccgaaatcaaagccacccctcgccgggagcaggcaaaaggatgaggggaaagaaaaccaacgaactactcccaggaattgacgcttctgtcaatgacccggaagaaacaaacgcagcctttccgccccggctctgggtcagcccacgtgactcttctgggaggtcaaagagcatcgctctgccctccctgctgttaagccaagccactccacgcggcgcagcctcgacccctccggctccgcgcagcctctttctcaaacccggagaacaagtcccactttcttcgaaatgagaattcccccattggcccgaatgtgtagtccatcaaatcaaaggggcggggaacctttgttcctattggttcttcttttccgcaatccccgcctcctgctgagcgagctcagcctctccttgagctcagagcgcctcccaccctgccgggcggcctctgattggtggaagtgaggcaaggctgggctccgtctctccccccgcccgctagtaggctggagccggggtcagctttggcaccttcctccagtcagtggccaactcctggctcagtggggattgtgctcgtcccctccgttcccctccagtcttcctcccgctaccggaacgagcctcgcgcttggcaggctgaggaggagcaaagaaagcaggattaaagagaaggaagacctggctaggtctgggtggcgtctgcagtgccagaaagggaggcggtggcggcggcggctgcgaccacggccgcgcgggacgtgaggcccgagagcaaccgacgggcagcggcggccgctccagcgccccgcaccggggccgttagtcagcagaacgcgagctcttgtggaggagcagggccggcgcgaggcgagactcgggagcgtgagcggggcccctggggcgccgccgtccttcttcgccccggcgccgggggctgtagccctggtccccgctcctctgtcgggccagtctgcaggcggagagagtcggacggcgcccggagcgcggatctcgccttgtggaggacagcgcgtcggctgcggttctctctcgaccccttctgcccggcgcttcggcccgggccgctcaggtgcagagcatgaataatctttcatttagtgagctatgttgcctcttctgctgtccaccttgtccagggaagattgcttcaaaattagcgtttttgccacctgatccaacttacacactgatgtgtgatgaaagcggaagccgttggactttacatctgtctgaacgagcagactggcagtattcttctagagaaaaagatgctattgagtgtttcatgactagaaccagtaaaggcaacagaattgcttgtatgtttgtacgttgttcacccaatgcgaaatacactttactcttctcacatggaaatgctgttgatcttggtcaaatgagcagcttttacataggactaggatcacggattaattgtaatatattctcatatgattattctggatatggtgccagttccgggaaacccacagagaagaacctctatgcagacattgaagctgcttggcttgctcttaggacaagatatggcattcgccctgaaaatgtgattatatatggccaaagtatagggacagtaccgtctgtggatcttgctgctcgatatgagagtgctgctgttattcttcattctcctctgacttcgggaatgcgagttgcctttcctgataccaagaagacctactgttttgatgcattcccaaacattgacaaaatctctaagataacctctccagtattaataattcatgggactgaagatgaagtcattgacttttcacatggcctcgcattgtttgaacgttgccaaagacctgtggagcctctctgggttgaaggagcaggtcacaatgatgtggaactttatggacagtatcttgaaaggttgaaacagtttgtgtcacaggaactggtaaatttgtaaaatattctgtaaatttgctactgggttttcctttcttgctgaactgcactctttggtaaataacataaaacctgaaggttttgtttgcaaatcatgtcagttgccttcataaatgtacaggtaatgatttgttaacagacttaatgaaggttttaattaccagaactaaaaactggaaataacagtaccgtgcagtcaggctgtgtaatttatattttttctgtgaatttttttttaacatcaagatgagtactgtatgagattttaattctataaaatcaaatgctgtaaaagtattgccaaatgcttttgcatactagaaacaaatttataaatatttttaaaacatctcaatatattaaatcttatcctggaatacaactgtaatattttgaaaaaagctatgtatctaaagcaatttaagtactcataatggaatgaactgtaaaagagatttaaaaccatgcaagttcactaggaattaacctaaaccctgttgtacagggatagaggtttaaagttattttattgtaaaatacattgaattttctgtatactctgattacatacatttatcctttaaaaaagatgtaaatcttaatttttatgccatctattaatttaccaatgagttaccttgtaaatgagaagtcatgatagcactgaattttaactagttttgacttctaagtttggtactgtgaggcaagtacttaaaattttcatgctggttacttaaaaggcatttagagatttcaagaatgattttgtatacgatgttttaaattttgactgatctcatagtcttcatagaattgcagtagtcttcattgtatgaaatcccgaaagtccatgagttgatcttaaagaccactaacagactggctatcagatcccttttcactttggctatttttttcattttttgagatggagtcttgctgtgtcactgaggctggagtgcagtggcgcgatcttgactcactgcaacctctgcctcccaggatcaagtgattctcctgcctcagcctcctgagtagctggtattacagatgcttgccaccacgcctggctaatttttgtatttttagtagagacagggttttgccatgttgatcaggctggtcttgaactcctgacctcatgatctgcccttggcctcccaaagtgtcggaattacaggcatgagccactgcgcctggcccactttagctatttttaaaaataggacctattgttttggattactatctgagaatttcatggattcactcctgggtataggagataagaatacgtttaattcataacttttatattaaccaatatagtaaaaaaataaagctcacacatacaaaaactaagttgcctttccttgaatgaaccctgtctgaataaaacaatgaaaaataaaaataaaattaatggtatgtagtctaatttgtaaatgaatgaatatggaaataatacacactgtggatatattttaaggccttatgtagttttaattgttctgctcgttccgtggttatgtttaagactatagtatatgactctcttcaaagtatatcaagtattgtgaatgctttggttcagatgtgtcaaattaacagtaaaacaacaaatatacccactga

SEQ ID NO: 277813 - DNA, 4034 bp, Homo sapiens
cttgtcatttttgaagctaaacgtattctggtgcttctgaggtctggaacgagccacgttgcctttctgggagctcatcgccgaaatcaaagccacccctcgccgggagcaggcaaaaggatgaggggaaagaaaaccaacgaactactcccaggaattgacgcttctgtcaatgacccggaagaaacaaacgcagcctttccgccccggctctgggtcagcccacgtgactcttctgggaggtcaaagagcatcgctctgccctccctgctgttaagccaagccactccacgcggcgcagcctcgacccctccggctccgcgcagcctctttctcaaacccggagaacaagtcccactttcttcgaaatgagaattcccccattggcccgaatgtgtagtccatcaaatcaaaggggcggggaacctttgttcctattggttcttcttttccgcaatccccgcctcctgctgagcgagctcagcctctccttgagctcagagcgcctcccaccctgccgggcggcctctgattggtggaagtgaggcaaggctgggctccgtctctccccccgcccgctagtaggctggagccggggtcagctttggcaccttcctccagtcagtggccaactcctggctcagtggggattgtgctcgtcccctccgttcccctccagtcttcctcccgctaccggaacgagcctcgcgcttggcaggctgaggaggagcaaagaaagcaggattaaagagaaggaagacctggctaggtctgggtggcgtctgcagtgccagaaagggaggcggtggcggcggcggctgcgaccacggccgcgcgggacgtgaggcccgagagcaaccgacgggcagcggcggccgctccagcgccccgcaccggggccgttagtcagcagaacgcgagctcttgtggaggagcagggccggcgcgaggcgagactcgggagcgtgagcggggcccctggggcgccgccgtccttcttcgccccggcgccgggggctgtagccctggtccccgctcctctgtcgggccagtctgcaggcggagagagtcggacggcgcccggagcgcggatctcgccttgtggaggacagcgcgtcggctgcggttctctctcgaccccttctgcccggcgcttcggcccgggccgctcaggtgcagagcatgaataatctttcatttagtgagctatgttgcctcttctgctgtccaccttgtccagggaagattgcttcaaaattagcgtttttgccacctgatccaacttacacactgatgtgtgatgaaagcggaagccgttggactttacatctgtctgaacgagcagactggcagtattcttctagagaaaaagatgctattgagtgtttcatgactagaaccagtaaaggcaacagaattgcttgtatgtttgtacgttgttcacccaatgcgaaatacactttactcttctcacatggaaatgctgttgatcttggtcaaatgagcagcttttacataggactaggatcacggattaattgtaatatattctcatatgattattctggatatggtgccagttccgggaaacccacagagaagaacctctatgcagacattgaagctgcttggcttgctcttaggacaagatatggcattcgccctgaaaatgtgattatatatggccaaagtatagggacagtaccgtctgtggatcttgctgctcgatatgagagtgctgctgttattcttcattctcctctgacttcgggaatgcgagttgcctttcctgataccaagaagacctactgttttgatgcattcccaaacattgacaaaatctctaagataacctctccagtattaataattcatgggactgaagatgaagtcattgacttttcacatggcctcgcattgtttgaacgttgccaaagacctgtggagcctctctgggttgaaggagcaggtcacaatgatgtggaactttatggacagtatcttgaaaggttgaaacagtttgtgtcacaggaactggtaaatttgtaaaatattctgtaaatttgctactgggttttcctttcttgctgaactgcactctttggtaaataacataaaacctgaaggttttgtttgcaaatcatgtcagttgccttcataaatgtacaggtaatgatttgttaacagacttaatgaaggttttaattaccagaactaaaaactggaaataacagtaccgtgcagtcaggctgtgtaatttatattttttctgtgaatttttttttaacatcaagatgagtactgtatgagattttaattctataaaatcaaatgctgtaaaagtattgccaaatgcttttgcatactagaaacaaatttataaatatttttaaaacatctcaatatattaaatcttatcctggaatacaactgtaatattttgaaaaaagctatgtatctaaagcaatttaagtactcataatggaatgaactgtaaaagagatttaaaaccatgcaagttcactaggaattaacctaaaccctgttgtacagggatagaggtttaaagttattttattgtaaaatacattgaattttctgtatactctgattacatacatttatcctttaaaaaagatgtaaatcttaatttttatgccatctattaatttaccaatgagttaccttgtaaatgagaagtcatgatagcactgaattttaactagttttgacttctaagtttggtactgtgaggcaagtacttaaaattttcatgctggttacttaaaaggcatttagagatttcaagaatgattttgtatacgatgttttaaattttgactgatctcatagtcttcatagaattgcagtagtcttcattgtatgaaatcccgaaagtccatgagttgatcttaaagaccactaacagactggctatcagatcccttttcactttggctatttttttcattttttgagatggagtcttgctgtgtcactgaggctggagtgcagtggcgcgatcttgactcactgcaacctctgcctcccaggatcaagtgattctcctgcctcagcctcctgagtagctggtattacagatgcttgccaccacgcctggctaatttttgtatttttagtagagacagggttttgccatgttgatcaggctggtcttgaactcctgacctcatgatctgcccttggcctcccaaagtgtcggaattacaggcatgagccactgcgcctggcccactttagctatttttaaaaataggacctattgttttggattactatctgagaatttcatggattcactcctgggtataggagataagaatacgtttaattcataacttttatattaaccaatatagtaaaaaaataaagctcacacatacaaaaactaagttgcctttccttgaatgaaccctgtctgaataaaacaatgaaaaataaaaataaaattaatggtatgtagtctaatttgtaaatgaatgaatatggaaataatacacactgtggatatattttaaggccttatgtagttttaattgttctgctcgttccgtggttatgtttaagactatagtatatgactctcttcaaagtatatcaagtattgtgaatgctttggttcagatgtgtcaaattaacagtaaaacaacaaatatacccactgacctgtgcttatttgcctttttccatgctccccacccccacactagaaagagtgaaaaaaaattacccttcgtttttataggacatagtttgaaaatttttaaaattatatcatcacttttttggagaggtctttctttctcaagattgtcttgtaacctatacagtttcttctttgtacagcatacaacccagggcttagctaaatgttttctttgattacctggggaaatctaaatattgatcctattcattcagtgttcgttcattcaacagacagttactgaatgtataaatcatgcaaaaacctgtgctaggtaaagacagactgtgtcctcatagatttcatg

SEQ ID NO: 277814 - DNA, 2677 bp, Homo sapiens
aactccgtctcaaaaaaaaaaaagaagccaaaaatctgtttggaatcatacctaaaatagtaatagtcattaaccaccaataaaatttacccatgtctgtgttttaactttttattgtatgagtctacattcagttattaaaatatttgctatctccttttctttttcagagcatgaataatctttcatttagtgagctatgttgcctcttctgctgtccaccttgtccagggaagattgcttcaaaattagcgtttttgccacctgatccaacttacacactgatgtgtgatgaaagcggaagccgttggactttacatctgtctgaacgagcagactggcagtattcttctagagaaaaagatgctattgagtgtttcatgactagaaccagtaaaggcaacagaattgcttgtatgtttgtacgttgttcacccaatgcgaaatacactttactcttctcacatggaaatgctgttgatcttggtcaaatgagcagcttttacataggactaggatcacggattaattgtaatatattctcatatgattattctggatatggtgccagttccgggaaacccacagagaagaacctctatgcagacattgaagctgcttggcttgctcttaggacaagatatggcattcgccctgaaaatgtgattatatatggccaaagtatagggacagtaccgtctgtggatcttgctgctcgatatgagagtgctgctgttattcttcattctcctctgacttcgggaatgcgagttgcctttcctgataccaagaagacctactgttttgatgcattcccaaacattgacaaaatctctaagataacctctccagtattaataattcatgggactgaagatgaagtcattgacttttcacatggcctcgcattgtttgaacgttgccaaagacctgtggagcctctctgggttgaaggagcaggtcacaatgatgtggaactttatggacagtatcttgaaaggttgaaacagtttgtgtcacaggaactggtaaatttgtaaaatattctgtaaatttgctactgggttttcctttcttgctgaactgcactctttggtaaataacataaaacctgaaggttttgtttgcaaatcatgtcagttgccttcataaatgtacaggtaatgatttgttaacagacttaatgaaggttttaattaccagaactaaaaactggaaataacagtaccgtgcagtcaggctgtgtaatttatattttttctgtgaatttttttttaacatcaagatgagtactgtatgagattttaattctataaaatcaaatgctgtaaaagtattgccaaatgcttttgcatactagaaacaaatttataaatatttttaaaacatctcaatatattaaatcttatcctggaatacaactgtaatattttgaaaaaagctatgtatctaaagcaatttaagtactcataatggaatgaactgtaaaagagatttaaaaccatgcaagttcactaggaattaacctaaaccctgttgtacagggatagaggtttaaagttattttattgtaaaatacattgaattttctgtatactctgattacatacatttatcctttaaaaaagatgtaaatcttaatttttatgccatctattaatttaccaatgagttaccttgtaaatgagaagtcatgatagcactgaattttaactagttttgacttctaagtttggtactgtgaggcaagtacttaaaattttcatgctggttacttaaaaggcatttagagatttcaagaatgattttgtatacgatgttttaaattttgactgatctcatagtcttcatagaattgcagtagtcttcattgtatgaaatcccgaaagtccatgagttgatcttaaagaccactaacagactggctatcagatcccttttcactttggctatttttttcattttttgagatggagtcttgctgtgtcactgaggctggagtgcagtggcgcgatcttgactcactgcaacctctgcctcccaggatcaagtgattctcctgcctcagcctcctgagtagctggtattacagatgcttgccaccacgcctggctaatttttgtatttttagtagagacagggttttgccatgttgatcaggctggtcttgaactcctgacctcatgatctgcccttggcctcccaaagtgtcggaattacaggcatgagccactgcgcctggcccactttagctatttttaaaaataggacctattgttttggattactatctgagaatttcatggattcactcctgggtataggagataagaatacgtttaattcataacttttatattaaccaatatagtaaaaaaataaagctcacacatacaaaaactaagttgcctttccttgaatgaaccctgtctgaataaaacaatgaaaaataaaaataaaattaatggtatgtagtctaatttgtaaatgaatgaatatggaaataatacacactgtggatatattttaaggccttatgtagttttaattgttctgctcgttccgtggttatgtttaagactatagtatatgactctcttcaaagtatatcaagtattgtgaatgctttggttcagatgtgtcaaattaacagtaaaacaacaaatatacccactga

SEQ ID NO: 277815 - DNA, 2728 bp, Homo sapiens
cttgtcatttttgaagctaaacgtattctggtgcttctgaggtctggaacgagccacgttgcctttctgggagctcatcgccgaaatcaaagccacccctcgccgggagcaggcaaaaggatgaggggaaagaaaaccaacgaactactcccaggaattgacgcttctgtcaatgacccggaagaaacaaacgcagcctttccgccccggctctgggtcagcccacgtgactcttctgggaggtcaaagagcatcgctctgccctccctgctgttaagccaagccactccacgcggcgcagcctcgacccctccggctccgcgcagcctctttctcaaacccggagaacaagtcccactttcttcgaaatgagaattcccccattggcccgaatgtgtagtccatcaaatcaaaggggcggggaacctttgttcctattggttcttcttttccgcaatccccgcctcctgctgagcgagctcagcctctccttgagctcagagcgcctcccaccctgccgggcggcctctgattggtggaagtgaggcaaggctgggctccgtctctccccccgcccgctagtaggctggagccggggtcagctttggcaccttcctccagtcagtggccaactcctggctcagtggggattgtgctcgtcccctccgttcccctccagtcttcctcccgctaccggaacgagcctcgcgcttggcaggctgaggaggagcaaagaaagcaggattaaagagaaggaagacctggctaggtctgggtggcgtctgcagtgccagaaagggaggcggtggcggcggcggctgcgaccacggccgcgcgggacgtgaggcccgagagcaaccgacgggcagcggcggccgctccagcgccccgcaccggggccgttagtcagcagaacgcgagctcttgtggaggagcagggccggcgcgaggcgagactcgggagcgtgagcggggcccctggggcgccgccgtccttcttcgccccggcgccgggggctgtagccctggtccccgctcctctgtcgggccagtctgcaggcggagagagtcggacggcgcccggagcgcggatctcgccttgtggaggacagcgcgtcggctgcggttctctctcgaccccttctgcccggcgcttcggcccgggccgctcaggtgcagagcatgaataatctttcatttagtgagctatgttgcctcttctgctgtccaccttgtccagggaagattgcttcaaaattagcgtttttgccacctgatccaacttacacactgatgtgtgatgaaagcggaagccgttggactttacatctgtctgaacgagcagactggcagtattcttctagagaaaaagatgctattgagtgtttcatgactagaaccagtaaaggcaacagaattgcttgtatgtttgtacgttgttcacccaatgcgaaatacactttactcttctcacatggaaatgctgttgatcttggtcaaatgagcagcttttacataggactaggatcacggattaattgtaatatattctcatatgattattctggatatggtgccagttccgggaaacccacagagaagaacctctatgcagacattgaagctgcttggcttgctcttaggacaagatatggcattcgccctgaaaatgtgattatatatggccaaagtatagggacagtaccgtctgtggatcttgctgctcgatatgagagtgctgctgttattcttcattctcctctgacttcgggaatgcgagttgcctttcctgataccaagaagacctactgttttgatgcattcccaaacattgacaaaatctctaagataacctctccagtattaataattcatgggactgaagatgaagtcattgacttttcacatggcctcgcattgtttgaacgttgccaaagacctgtggagcctctctgggttgaaggagcaggtcacaatgatgtggaactttatggacagtatcttgaaaggttgaaacagtttgtgtcacaggaactggtgcagaaacataaagaagggaagtgattttctcaaggtctacagttttcaatgacggtactatgtattccattatcttctctttaccaaacttaactggattaatataccaatgatcctttcaaattatatgacataaacttatttgctctccaatgttagtcacaattgtatttttttaatgggtaggttcctccttgtcagttattcattgaatagtaaattggtagattgtgccaattaattctcaagttcatgattatttaaagaatttaatactaattcattttactaggcacagttacagttagttatgttgaaacctagtgaggatggtagccacagacacatgaataaacaagtgtttacttcagaagctgatttactataaattgtaacacacagaataagcaattacattgaaaaaagtatcaatatagttactacgaattagcttttagcttgttgctttgttttaaaataggcaatttattcaaacatgataacatgttgtattctgataatgtgcaccccaaatgtccagtaaccaaaaaagtaacaatttatgcttacgatacttggaattaggctttgagtttgagcttgcagaatggagaagacatttgtctatcgtatctctaaatggattatgcctctgactgaatagttgaatgagtaatgctaaggaagg

SEQ ID NO: 277816 - DNA, 3455 bp, Homo sapiens
cttgtcatttttgaagctaaacgtattctggtgcttctgaggtctggaacgagccacgttgcctttctgggagctcatcgccgaaatcaaagccacccctcgccgggagcaggcaaaaggatgaggggaaagaaaaccaacgaactactcccaggaattgacgcttctgtcaatgacccggaagaaacaaacgcagcctttccgccccggctctgggtcagcccacgtgactcttctgggaggtcaaagagcatcgctctgccctccctgctgttaagccaagccactccacgcggcgcagcctcgacccctccggctccgcgcagcctctttctcaaacccggagaacaagtcccactttcttcgaaatgagaattcccccattggcccgaatgtgtagtccatcaaatcaaaggggcggggaacctttgttcctattggttcttcttttccgcaatccccgcctcctgctgagcgagctcagcctctccttgagctcagagcgcctcccaccctgccgggcggcctctgattggtggaagtgaggcaaggctgggctccgtctctccccccgcccgctagtaggctggagccggggtcagctttggcaccttcctccagtcagtggccaactcctggctcagtggggattgtgctcgtcccctccgttcccctccagtcttcctcccgctaccggaacgagcctcgcgcttggcaggctgaggaggagcaaagaaagcaggattaaagagaaggaagacctggctaggtctgggtggcgtctgcagtgccagaaagggaggcggtggcggcggcggctgcgaccacggccgcgcgggacgtgaggcccgagagcaaccgacgggcagcggcggccgctccagcgccccgcaccggggccgttagtcagcagaacgcgagctcttgtggaggagcagggccggcgcgaggcgagactcgggagcgtgagcggggcccctggggcgccgccgtccttcttcgccccggcgccgggggctgtagccctggtccccgctcctctgtcgggccagtctgcaggcggagagagtcggacggcgcccggagcgcggatctcgccttgtggaggacagcgcgtcggctgcggttctctctcgaccccttctgcccggcgcttcggcccgggccgctcaggtgcagagcatgaataatctttcatttagtgagctatgttgcctcttctgctgtccaccttgtccagggaagattgcttcaaaattagcgtttttgccacctgatccaacttacacactgatgtgtgatgaaagcggaagccgttggactttacatctgtctgaacgagcagactggcagtattcttctagagaaaaagatgctattgagtgtttcatgactagaaccagtaaaggcaacagaattgcttgtatgtttgtacgttgttcacccaatgcgaaatacactttactcttctcacatggaaatgctgttgatcttggtcaaatgagcagcttttacataggactaggatcacggattaattgtaatatattctcatatgattattctggatatggtgccagttccgggaaacccacagagaagaacctctatgcagacattgaagctgcttggcttgctcttaggacaagatatggcattcgccctgaaaatgtgattatatatggccaaagtatagggacagtaccgtctgtggatcttgctgctcgatatgagagtgctgctgttattcttcattctcctctgacttcgggaatgcgagttgcctttcctgataccaagaagacctactgttttgatgcattcccaaacattgacaaaatctctaagataacctctccagtattaataattcatgggactgaagatgaagtcattgacttttcacatggcctcgcattgtttgaacgttgccaaagacctgtggagcctctctgggttgaaggagcaggtcacaatgatgtggaactttatggacagtatcttgaaaggttgaaacagtttgtgtcacaggaactggtaaatttgtaaaatattctgtaaatttgctactgggttttcctttcttgctgaactgcactctttggtaaataacataaaacctgaaggttttgtttgcaaatcatgtcagttgccttcataaatgtacaggtaatgatttgttaacagacttaatgaaggttttaattaccagaactaaaaactggaaataacagtaccgtgcagtcaggctgtgtaatttatattttttctgtgaatttttttttaacatcaagatgagtactgtatgagattttaattctataaaatcaaatgctgtaaaagtattgccaaatgcttttgcatactagaaacaaatttataaatatttttaaaacatctcaatatattaaatcttatcctggaatacaactgtaatattttgaaaaaagctatgtatctaaagcaatttaagtactcataatggaatgaactgtaaaagagatttaaaaccatgcaagttcactaggaattaacctaaaccctgttgtacagggatagaggtttaaagttattttattgtaaaatacattgaattttctgtatactctgattacatacatttatcctttaaaaaagatgtaaatcttaatttttatgccatctattaatttaccaatgagttaccttgtaaatgagaagtcatgatagcactgaattttaactagttttgacttctaagtttggtactgtgaggcaagtacttaaaattttcatgctggttacttaaaaggcatttagagatttcaagaatgattttgtatacgatgttttaaattttgactgatctcatagtcttcatagaattgcagtagtcttcattgtatgaaatcccgaaagtccatgagttgatcttaaagaccactaacagactggctatcagatcccttttcactttggctatttttttcattttttgagatggagtcttgctgtgtcactgaggctggagtgcagtggcgcgatcttgactcactgcaacctctgcctcccaggatcaagtgattctcctgcctcagcctcctgagtagctggtattacagatgcttgccaccacgcctggctaatttttgtatttttagtagagacagggttttgccatgttgatcaggctggtcttgaactcctgacctcatgatctgcccttggcctcccaaagtgtcggaattacaggcatgagccactgcgcctggcccactttagctatttttaaaaataggacctattgttttggattactatctgagaatttcatggattcactcctgggtataggagataagaatacgtttaattcataacttttatattaaccaatatagtaaaaaaataaagctcacacatacaaaaactaagttgcctttccttgaatgaaccctgtctgaataaaacaatga

SEQ ID NO: 277817 - DNA, 1901 bp, Homo sapiens
  misc_feature (740)..(740): n is a, c, g, or t
cctaagtgggcaactctctggcatccttaatattcttctatagaaattgtgatgaaagaacagataagcctaagtaaatctagcgtgtggagctcctttaaaatgtgaagaccttgccaactggttaaaaataaaacttggttttgtcctaaatatccttgctgggcctattatacataaaaaaaggggccacagcccatttgcaaggcttctgaatgaactccattcattctgtacttggaaatgtctcttcagccacaaaaagaaacaatagttataacctaatttctttggtgccaatatcagcagaagaagagccaagagaccattatgaaaactctagtaagttctcttggtgattatataatgctgtattcattgatcatatttctgtatttaaataagtacattttttaaaacatcataaagtggatcagtaatgctgtaatatcacatttcatgtattatacaacatttttgaaatggagtactccaaagtaatttgcttcttatggttaccaaagtttaaagaataccctaacatgcactccaagattttaagaggaaaggctttgtgtttttcattactgtattatgaaatctgagagtgcaaaactagttttcttaggtaaaccccgtaatcagtttccacatttacctgtaaaagtcagtggagggcatacatctggaagtagtagtggcggtacacaatgtgtgttaatatgatttccaaggggtanctagagtaaactttcttaatcacagatctgatctgagcatgccactcctttcttaaaatcttttgttgattttccatttccctaaaaggaaggcccactggagcatgggccttgcaaagtcctctttctggcttctgcctgcctgccttttcagcttcatctctgccatcttccctgaatgaacttttgtcagtggcctcgctctttctacctatgagatgttgtttctgcatgttcttgcatggaattctcttcctcccaaccctgtttcattcctttaatctgtacaactctttcttatcctgaagtctttatgttaaggttgccttttcaggaagacttttaattgtattagctaattaattaattaatagtctgaggtatttggagctgagattctatggggattagttgctggagggtagtttagagccagattgcgaaggactttctaaactgtgctttcaaggttttgaacaggaaaatgatgtagactttctgttttttgtaagtttggaggatggcttgtgtcttaaaagaatatgtaacataaccatctaatttgtgagtagtggactaaggaaacaccactctaacctttttctctctgcgataatcccatcttcagcctctcaagcactgtgaaaaatcactttctcttgttgtattcttggagcccctgctaattcattattgaaaaatacctgctgcctgcatttggccttatgttgtcatttacttggtacttcctaagcgtggctactccaatgaagctttagtatatgtactgaaagaagatcctctcatactgccacagccaagagataaggttgtaaatctttattgggagaagccgtcaaggacagttctgtgaaatgaaaggatctctggatcaccacaaagtctggctcagtgactatggctttgcaaacactaaacattcctgtctcaagtcctgtagatggcttgaaatagtatacataagcatgccttataaacatcttcagtctttatcaactctttggagattcagccattcttttttgtactttagggaattaaatcattttataatgtataaatctgagcatggccgatggcagaagaaattttgtcatacgtttttaaagaaataaaaatgtattatgttttaaaaatcat

SEQ ID NO: 277818 - DNA, 557 bp, Homo sapiens
ttgtgtttaaaaaaaattagttacatgaagtagtcatccacatgacataagagacctaattttaataggaaataatattaaaaatgtaactcctagaaaatgttagtgatcatcatcttcctttattttttttcctaggtacttcctaagcgtggctactccaatgaagctttagtatatgtactgaaagaagatcctctcatactgccacagccaagagataaggttgtaaatctttattgggagaagccgtcaaggacagttctgtgaaatgaaaggatctctggatcaccacaaagtctggctcagtgactatggctttgcaaacactaaacattcctgtctcaagtcctgtagatggcttgaaatagtatacataagcatgccttataaacatcttcagtctttatcaactctttggagattcagccattcttttttgtactttagggaattaaatcattttataatgtataaatctgagcatggccgatggcagaagaaattttgtcatacgtttttaaagaaataaaaatgtattatgttttaaaaatcat

SEQ ID NO: 277819 - DNA, 609 bp, Homo sapiens
gggctactgggctgcggagaccagagcccggctccactgaagaaacccgccggctgctggggcagggcggcgaaaggtcagtcggccgagaggagtccgtggagccaccgtttcatagcctcagggaaaggatcgggcgtgctcacgagccctctaacccatggcttaaacacccgcttcctaagcctgggtacttcctaagcgtggctactccaatgaagctttagtatatgtactgaaagaagatcctctcatactgccacagccaagagataaggttgtaaatctttattgggagaagccgtcaaggacagttctgtgaaatgaaaggatctctggatcaccacaaagtctggctcagtgactatggctttgcaaacactaaacattcctgtctcaagtcctgtagatggcttgaaatagtatacataagcatgccttataaacatcttcagtctttatcaactctttggagattcagccattcttttttgtactttagggaattaaatcattttataatgtataaatctgagcatggccgatggcagaagaaattttgtcatacgtttttaaagaaataaaaatgtattatgttttaaaaatcat

SEQ ID NO: 277820 - DNA, 1005 bp, Homo sapiens
gatgaaaaaataaacattcagaggtgaagtcacccaagaaccctcacctattcctgaatatatcacatgtggtgataaacatgaagatgtatgaaaaattgtgttcgttgagagaaaatggaaggcttttcattctacttccacattttcattccagcagcttttctgttttggaagatgagtactgaatcttgcaatgaaatttttttaacttaaacaagacaaggaaaatgaagcgcagagacgttaaataactctctcaaggtcatgcagctgagaagagatgagacttgaactccagtgccagccctgttaatcactattctatggaatgatagggtatgcataaatgttcatgtgggctctggagtataccaggaactgaagtaaggtacatggacgtcttgaatattgtaactgagatgggcaagcctacacctttgcaaataaaggaggattgggaaagattaagcctctcaagcactgtgaaaaatcactttctcttgttgtattcttggagcccctgctaattcattattgaaaaatacctgctgcctgcatttggccttatgttgtcatttacttggtacttcctaagcgtggctactccaatgaagctttagtatatgtactgaaagaagatcctctcatactgccacagccaagagataaggttgtaaatctttattgggagaagccgtcaaggacagttctgtgaaatgaaaggatctctggatcaccacaaagtctggctcagtgactatggctttgcaaacactaaacattcctgtctcaagtcctgtagatggcttgaaatagtatacataagcatgccttataaacatcttcagtctttatcaactctttggagattcagccattcttttttgtactttagggaattaaatcattttataatgtataaatctgagcatggccgatggcagaagaaattttgtcatacgtttttaaagaaataaaaatgtattatgttttaaaaatcat

SEQ ID NO: 277821 - DNA, 1847 bp, Homo sapiens
  misc_feature (686)..(686): n is a, c, g, or t
cctaagtgggcaactctctggcatccttaatattcttctatagaaattgtgatgaaagaacagataagcctaagtaaatctagcgtgtggagctcctttaaaatgtgaagaccttgccaactggttaaaaataaaacttggttttgtcctaaatatccttgctgggcctattatacataaaaaaaggggccacagcccatttgcaaggcttctgaatgaactccattcattctgtacttggaaatgtctcttcagccacaaaaagaaacaatagttataacctaatttctttggtgccaatatcagcagaagaagagccaagagaccattatgaaaactctagtaagttctcttggtgattatataatgctgtattcattgatcatatttctgtatttaaataagtacattttttaaacatttttgaaatggagtactccaaagtaatttgcttcttatggttaccaaagtttaaagaataccctaacatgcactccaagattttaagaggaaaggctttgtgtttttcattactgtattatgaaatctgagagtgcaaaactagttttcttaggtaaaccccgtaatcagtttccacatttacctgtaaaagtcagtggagggcatacatctggaagtagtagtggcggtacacaatgtgtgttaatatgatttccaaggggtanctagagtaaactttcttaatcacagatctgatctgagcatgccactcctttcttaaaatcttttgttgattttccatttccctaaaaggaaggcccactggagcatgggccttgcaaagtcctctttctggcttctgcctgcctgccttttcagcttcatctctgccatcttccctgaatgaacttttgtcagtggcctcgctctttctacctatgagatgttgtttctgcatgttcttgcatggaattctcttcctcccaaccctgtttcattcctttaatctgtacaactctttcttatcctgaagtctttatgttaaggttgccttttcaggaagacttttaattgtattagctaattaattaattaatagtctgaggtatttggagctgagattctatggggattagttgctggagggtagtttagagccagattgcgaaggactttctaaactgtgctttcaaggttttgaacaggaaaatgatgtagactttctgttttttgtaagtttggaggatggcttgtgtcttaaaagaatatgtaacataaccatctaatttgtgagtagtggactaaggaaacaccactctaacctttttctctctgcgataatcccatcttcagcctctcaagcactgtgaaaaatcactttctcttgttgtattcttggagcccctgctaattcattattgaaaaatacctgctgcctgcatttggccttatgttgtcatttacttggtacttcctaagcgtggctactccaatgaagctttagtatatgtactgaaagaagatcctctcatactgccacagccaagagataaggttgtaaatctttattgggagaagccgtcaaggacagttctgtgaaatgaaaggatctctggatcaccacaaagtctggctcagtgactatggctttgcaaacactaaacattcctgtctcaagtcctgtagatggcttgaaatagtatacataagcatgccttataaacatcttcagtctttatcaactctttggagattcagccattcttttttgtactttagggaattaaatcattttataatgtataaatctgagcatggccgatggcagaagaaattttgtcatacgtttttaaagaaataaaaatgtattatgttttaaaaatcat

SEQ ID NO: 277822 - DNA, 1362 bp, Homo sapiens
gggctactgggctgcggagaccagagcccggctccactgaagaaacccgccggctgctggggcagggcggcgaaaggtcagtcggccgagaggagtccgtggagccaccgtttcatagcctcagggaaaggatcgggcgtgctcacgagccctctaacccatggcttaaacacccgcttcctaagcctggttcctgaatatatcacatgtggtgataaacatgaagatgtatgaaaaattgtgttcgttgagagaaaatggaaggcttttcattctacttccacattttcattccagcagcttttctgttttggaagatgagtactgaatcttgcaatgaaatttttttaacttaaacaaggttcttatgcctttgtttgaaaaacatggttccctgtgaaattttacatgtagaagaaagcttcacactacgagagctctcaggatataattatttcagacagatactgggaacataagatggcttatcaatctaagatggccttcctgtccttcggattgaactgaaaccatccctgattccagggataggtagatgatccaggtttggacaatcaaaatattgaaccaccctggacctacaagtgtttctgggatgggaacatgcaaacgttggtccaaattgttgttctaggcagcccagtacatttctccaatgcctgatggaatgatagggtatgcataaatgttcatgtgggctctggagtataccaggaactgaagtaaggtacatggacgtcttgaatattgtaactgagatgggcaagcctacacctttgcaaataaaggaggattgggaaagattaagcctctcaagcactgtgaaaaatcactttctcttgttgtattcttggagcccctgctaattcattattgaaaaatacctgctgcctgcatttggccttatgttgtcatttacttggtacttcctaagcgtggctactccaatgaagctttagtatatgtactgaaagaagatcctctcatactgccacagccaagagataaggttgtaaatctttattgggagaagccgtcaaggacagttctgtgaaatgaaaggatctctggatcaccacaaagtctggctcagtgactatggctttgcaaacactaaacattcctgtctcaagtcctgtagatggcttgaaatagtatacataagcatgccttataaacatcttcagtctttatcaactctttggagattcagccattcttttttgtactttagggaattaaatcattttataatgtataaatctgagcatggccgatggcagaagaaattttgtcatacgtttttaaagaaataaaaatgtattatgttttaaaaatcat

SEQ ID NO: 277823 - DNA, 1211 bp, Homo sapiens
  misc_feature (24)..(24): n is a, c, g, or t
gcctagcggcactgactctcttanctaccagcgctaacgttcctgaatatatcacatgtggtgataaacatgaagatgtatgaaaaattgtgttcgttgagagaaaatggaaggcttttcattctacttccacattttcattccagcagcttttctgttttggaagatgagtactgaatcttgcaatgaaatttttttaacttaaacaaggttcttatgcctttgtttgaaaaacatggttccctgtgaaattttacatgtagaagaaagcttcacactacgagagctctcaggatataattatttcagacagatactgggaacataagatggcttatcaatctaagatggccttcctgtccttcggattgaactgaaaccatccctgattccagggataggtagatgatccaggtttggacaatcaaaatattgaaccaccctggacctacaagtgtttctgggatgggaacatgcaaacgttggtccaaattgttgttctaggcagcccagtacatttctccaatgcctgatggaatgatagggtatgcataaatgttcatgtgggctctggagtataccaggaactgaagtaaggtacatggacgtcttgaatattgtaactgagatgggcaagcctacacctttgcaaataaaggaggattgggaaagattaagcctctcaagcactgtgaaaaatcactttctcttgttgtattcttggagcccctgctaattcattattgaaaaatacctgctgcctgcatttggccttatgttgtcatttacttggtacttcctaagcgtggctactccaatgaagctttagtatatgtactgaaagaagatcctctcatactgccacagccaagagataaggttgtaaatctttattgggagaagccgtcaaggacagttctgtgaaatgaaaggatctctggatcaccacaaagtctggctcagtgactatggctttgcaaacactaaacattcctgtctcaagtcctgtagatggcttgaaatagtatacataagcatgccttataaacatcttcagtctttatcaactctttggagattcagccattcttttttgtactttagggaattaaatcattttataatgtataaatctgagcatggccgatggcagaagaaattttgtcatacgtttttaaagaaataaaaatgtattatgttttaaaaatcat

SEQ ID NO: 277824 - DNA, 1191 bp, Homo sapiens
gggctactgggctgcggagaccagagcccggctccactgaagaaacccgccggctgctggggcagggcggcgaaaggtcagtcggccgagaggagtccgtggagccaccgtttcatagcctcagggaaaggatcgggcgtgctcacgagccctctaacccatggcttaaacacccgcttcctaagcctgggttcttatgcctttgtttgaaaaacatggttccctgtgaaattttacatgtagaagaaagcttcacactacgagagctctcaggatataattatttcagacagatactgggaacataagatggcttatcaatctaagatggccttcctgtccttcggattgaactgaaaccatccctgattccagggataggtagatgatccaggtttggacaatcaaaatattgaaccaccctggacctacaagtgtttctgggatgggaacatgcaaacgttggtccaaattgttgttctaggcagcccagtacatttctccaatgcctgatggaatgatagggtatgcataaatgttcatgtgggctctggagtataccaggaactgaagtaaggtacatggacgtcttgaatattgtaactgagatgggcaagcctacacctttgcaaataaaggaggattgggaaagattaagcctctcaagcactgtgaaaaatcactttctcttgttgtattcttggagcccctgctaattcattattgaaaaatacctgctgcctgcatttggccttatgttgtcatttacttggtacttcctaagcgtggctactccaatgaagctttagtatatgtactgaaagaagatcctctcatactgccacagccaagagataaggttgtaaatctttattgggagaagccgtcaaggacagttctgtgaaatgaaaggatctctggatcaccacaaagtctggctcagtgactatggctttgcaaacactaaacattcctgtctcaagtcctgtagatggcttgaaatagtatacataagcatgccttataaacatcttcagtctttatcaactctttggagattcagccattcttttttgtactttagggaattaaatcattttataatgtataaatctgagcatggccgatggcagaagaaattttgtcatacgtttttaaagaaataaaaatgtattatgttttaaaaatcat

SEQ ID NO: 277825 - DNA, 1316 bp, Homo sapiens
  misc_feature (24)..(24): n is a, c, g, or t
gcctagcggcactgactctcttanctaccagcgctaacgttcctgaatatatcacatgtggtgataaacatgaagatgtatgaaaaattgtgttcgttgagagaaaatggaaggcttttcattctacttccacattttcattccagcagcttttctgttttggaagatgagtactgaatcttgcaatgaaatttttttaacttaaacaagacaaggaaaatgaagcgcagagacgttaaataactctctcaaggtcatgcagctgagaagagatgagacttgaactccagtgccagccctgttaatcactattctgttcttatgcctttgtttgaaaaacatggttccctgtgaaattttacatgtagaagaaagcttcacactacgagagctctcaggatataattatttcagacagatactgggaacataagatggcttatcaatctaagatggccttcctgtccttcggattgaactgaaaccatccctgattccagggataggtagatgatccaggtttggacaatcaaaatattgaaccaccctggacctacaagtgtttctgggatgggaacatgcaaacgttggtccaaattgttgttctaggcagcccagtacatttctccaatgcctgatggaatgatagggtatgcataaatgttcatgtgggctctggagtataccaggaactgaagtaaggtacatggacgtcttgaatattgtaactgagatgggcaagcctacacctttgcaaataaaggaggattgggaaagattaagcctctcaagcactgtgaaaaatcactttctcttgttgtattcttggagcccctgctaattcattattgaaaaatacctgctgcctgcatttggccttatgttgtcatttacttggtacttcctaagcgtggctactccaatgaagctttagtatatgtactgaaagaagatcctctcatactgccacagccaagagataaggttgtaaatctttattgggagaagccgtcaaggacagttctgtgaaatgaaaggatctctggatcaccacaaagtctggctcagtgactatggctttgcaaacactaaacattcctgtctcaagtcctgtagatggcttgaaatagtatacataagcatgccttataaacatcttcagtctttatcaactctttggagattcagccattcttttttgtactttagggaattaaatcattttataatgtataaatctgagcatggccgatggcagaagaaattttgtcatacgtttttaaagaaataaaaatgtattatgttttaaaaatcat

SEQ ID NO: 277826 - DNA, 1215 bp, Homo sapiens
agcagaaacacctaataagagtaaaggcaaagagttcctgaatatatcacatgtggtgataaacatgaagatgtatgaaaaattgtgttcgttgagagaaaatggaaggcttttcattctacttccacattttcattccagcagcttttctgttttggaagatgagtactgaatcttgcaatgaaatttttttaacttaaacaagacaaggaaaatgaagcgcagagacgttaaataactctctcaaggtcatgcagctgagaagagatgagacttgaactccagtgccagccctgttaatcactattctatggaatgatagggtatgcataaatgttcatgtgggctctggagtataccaggaactgaagtaaggtacatggacgtcttgaatattgtaactgagatgggcaagcctacacctttgcaaataaaggaggattgggaaagattaagatcctgttaaacgtcagtgttactatttagcctttgatatctccagtaaaggcaacttctttctggacccagaaataaagctttacattagcagcttccataacaccaataacatgaatgaccatctactgagcaattgcagtgcaccaggattatggcttatgagcactttatgtttattatctcacaactcactgagttagatactctccacaaacccagtgagcctctcaagcactgtgaaaaatcactttctcttgttgtattcttggagcccctgctaattcattattgaaaaatacctgctgcctgcatttggccttatgttgtcatttacttggtacttcctaagcgtggctactccaatgaagctttagtatatgtactgaaagaagatcctctcatactgccacagccaagagataaggttgtaaatctttattgggagaagccgtcaaggacagttctgtgaaatgaaaggatctctggatcaccacaaagtctggctcagtgactatggctttgcaaacactaaacattcctgtctcaagtcctgtagatggcttgaaatagtatacataagcatgccttataaacatcttcagtctttatcaactctttggagattcagccattcttttttgtactttagggaattaaatcattttataatgtataaatctgagcatggccgatggcagaagaaattttgtcatacgtttttaaagaaataaaaatgtattatgttttaaaaatcat

SEQ ID NO: 277827 - DNA, 1266 bp, Homo sapiens
gggctactgggctgcggagaccagagcccggctccactgaagaaacccgccggctgctggggcagggcggcgaaaggtcagtcggccgagaggagtccgtggagccaccgtttcatagcctcagggaaaggatcgggcgtgctcacgagccctctaacccatggcttaaacacccgcttcctaagcctggttcctgaatatatcacatgtggtgataaacatgaagatgtatgaaaaattgtgttcgttgagagaaaatggaaggcttttcattctacttccacattttcattccagcagcttttctgttttggaagatgagtactgaatcttgcaatgaaatttttttaacttaaacaagatggaatgatagggtatgcataaatgttcatgtgggctctggagtataccaggaactgaagtaaggtacatggacgtcttgaatattgtaactgagatgggcaagcctacacctttgcaaataaaggaggattgggaaagattaagatcctgttaaacgtcagtgttactatttagcctttgatatctccagtaaaggcaacttctttctggacccagaaataaagctttacattagcagcttccataacaccaataacatgaatgaccatctactgagcaattgcagtgcaccaggattatggcttatgagcactttatgtttattatctcacaactcactgagttagatactctccacaaacccagtgagcctctcaagcactgtgaaaaatcactttctcttgttgtattcttggagcccctgctaattcattattgaaaaatacctgctgcctgcatttggccttatgttgtcatttacttggtacttcctaagcgtggctactccaatgaagctttagtatatgtactgaaagaagatcctctcatactgccacagccaagagataaggttgtaaatctttattgggagaagccgtcaaggacagttctgtgaaatgaaaggatctctggatcaccacaaagtctggctcagtgactatggctttgcaaacactaaacattcctgtctcaagtcctgtagatggcttgaaatagtatacataagcatgccttataaacatcttcagtctttatcaactctttggagattcagccattcttttttgtactttagggaattaaatcattttataatgtataaatctgagcatggccgatggcagaagaaattttgtcatacgtttttaaagaaataaaaatgtattatgttttaaaaatcat

SEQ ID NO: 277828 - DNA, 985 bp, Homo sapiens
gatgaaaaaataaacattcagaggtgaagtcacccaagaaccctcacctattcctgaatatatcacatgtggtgataaacatgaagatgtatgaaaaattgtgttcgttgagagaaaatggaaggcttttcattctacttccacattttcattccagcagcttttctgttttggaagatgagtactgaatcttgcaatgaaatttttttaacttaaacaagacaaggaaaatgaagcgcagagacgttaaataactctctcaaggtcatgcagctgagaagagatgagacttgaactccagtgccagccctgttaatcactattctatggaatgatagggtatgcataaatgttcatgtgggctctggagtataccaggaactgaagtaaggtacatggacgtcttgaatattgtaactgagatgggcaagcctacacctttgcaaataaaggaggattgggaaagattaagcctctcaagcactgtgaaaaatcactttctcttgttgtattcttggagcccctgctaattcattattgaaaaatacctgctgcctgcatttggccttatgttgtcatttacttggtacttcctaagcgtggctactccaatgaagctttagtatatgtactgaaagaagatcctctcatactgccacagccaagagataaggttgtaaatctttattgggagaagccgtcaaggacagttctgtgaaatgaaaggatctctggatcaccacaaagtctggctcagtgactatggctttgcaaacactaaacattcctgtctcaagtcctgtagatggcttgaaatagtatacataagcatgccttataaacatcttcagtctttatcaactctttggagattcagccattcttttttgtactttagggaattaaatcattttataatgtaaaacatgatccgcccgcaaatcgtacacgccttgaccgatccggcccgcttggccaaccaaca

SEQ ID NO: 277829 - DNA, 977 bp, Homo sapiens
gatgaaaaaataaacattcagaggtgaagtcacccaagaaccctcacctattcctgaatatatcacatgtggtgataaacatgaagatgtatgaaaaattgtgttcgttgagagaaaatggaaggcttttcattctacttccacattttcattccagcagcttttctgttttggaagatgagtactgaatcttgcaatgaaatttttttaacttaaacaagacaaggaaaatgaagcgcagagacgttaaataactctctcaaggtcatgcagctgagaagagatgagacttgaactccagtgccagccctgttaatcactattctatggaatgatagggtatgcataaatgttcatgtgggctctggagtataccaggaactgaagtaaggtacatggacgtcttgaatattgtaactgagatgggcaagcctacacctttgcaaataaaggaggattgggaaagattaagcctctcaagcactgtgaaaaatcactttctcttgttgtattcttggagcccctgctaattcattattgaaaaatacctgctgcctgcatttggccttatgttgtcatttacttggtacttcctaagcgtggctactccaatgaagctttagtatatgtactgaaagaagatcctctcatactgccacagccaagagataaggttgtaaatctttattgggagaagccgtcaaggacagttctgtgaaatgaaaggatctctggatcaccacaaagtctggctcagtgactatggctttgcaaacactaaacattcctgtctcaagtcctgtagatggcttgaaatagtatacataagcatgccttataaacatcttcagtctttatcaactctttggagattcagccattcttttttgtactttagggaattaaatcattttataatgtaccgtgatgcggccggcgccttttccgaaatagacagactttatttggaaatctta

SEQ ID NO: 277830 - DNA, 1371 bp, Homo sapiens
gggctactgggctgcggagaccagagcccggctccactgaagaaacccgccggctgctggggcagggcggcgaaaggtcagtcggccgagaggagtccgtggagccaccgtttcatagcctcagggaaaggatcgggcgtgctcacgagccctctaacccatggcttaaacacccgcttcctaagcctggttcctgaatatatcacatgtggtgataaacatgaagatgtatgaaaaattgtgttcgttgagagaaaatggaaggcttttcattctacttccacattttcattccagcagcttttctgttttggaagatgagtactgaatcttgcaatgaaatttttttaacttaaacaagacaaggaaaatgaagcgcagagacgttaaataactctctcaaggtcatgcagctgagaagagatgagacttgaactccagtgccagccctgttaatcactattctatggaatgatagggtatgcataaatgttcatgtgggctctggagtataccaggaactgaagtaaggtacatggacgtcttgaatattgtaactgagatgggcaagcctacacctttgcaaataaaggaggattgggaaagattaagatcctgttaaacgtcagtgttactatttagcctttgatatctccagtaaaggcaacttctttctggacccagaaataaagctttacattagcagcttccataacaccaataacatgaatgaccatctactgagcaattgcagtgcaccaggattatggcttatgagcactttatgtttattatctcacaactcactgagttagatactctccacaaacccagtgagcctctcaagcactgtgaaaaatcactttctcttgttgtattcttggagcccctgctaattcattattgaaaaatacctgctgcctgcatttggccttatgttgtcatttacttggtacttcctaagcgtggctactccaatgaagctttagtatatgtactgaaagaagatcctctcatactgccacagccaagagataaggttgtaaatctttattgggagaagccgtcaaggacagttctgtgaaatgaaaggatctctggatcaccacaaagtctggctcagtgactatggctttgcaaacactaaacattcctgtctcaagtcctgtagatggcttgaaatagtatacataagcatgccttataaacatcttcagtctttatcaactctttggagattcagccattcttttttgtactttagggaattaaatcattttataatgtataaatctgagcatggccgatggcagaagaaattttgtcatacgtttttaaagaaataaaaatgtattatgttttaaaaatcat

SEQ ID NO: 277831 - DNA, 1468 bp, Homo sapiens
gggctactgggctgcggagaccagagcccggctccactgaagaaacccgccggctgctggggcagggcggcgaaaggtcagtcggccgagaggagtccgtggagccaccgtttcatagcctcagggaaaggatcgggcgtgctcacgagccctctaacccatggcttaaacacccgcttcctaagcctggttcctgaatatatcacatgtggtgataaacatgaagatgtatgaaaaattgtgttcgttgagagaaaatggaaggcttttcattctacttccacattttcattccagcagcttttctgttttggaagatgagtactgaatcttgcaatgaaatttttttaacttaaacaaggttcttatgcctttgtttgaaaaacatggttccctgtgaaattttacatgtagaagaaagcttcacactacgagagctctcaggatataattatttcagacagatactgggaacataagatggcttatcaatctaagatggccttcctgtccttcggattgaactgaaaccatccctgattccagggataggtagatgatccaggtttggacaatcaaaatattgaaccaccctggacctacaagtgtttctgggatgggaacatgcaaacgttggtccaaattgttgttctaggcagcccagtacatttctccaatgcctgatggaatgatagggtatgcataaatgttcatgtgggctctggagtataccaggaactgaagtaaggtacatggacgtcttgaatattgtaactgagatgggcaagcctacacctttgcaaataaaggaggattgggaaagattaagcctctcaagcactgtgaaaaatcactttctcttgttgtattcttggagcccctgctaattcattattgaaaaatacctgctgcctgcatttggccttatgttgtcatttacttgggtctgtgcatggcgtttagaaggctacaccttaggctgggggtcaagaatgtcttccctgatgtgaggtttacacagagatctgaagaatgaagagtccagctaagtacttcctaagcgtggctactccaatgaagctttagtatatgtactgaaagaagatcctctcatactgccacagccaagagataaggttgtaaatctttattgggagaagccgtcaaggacagttctgtgaaatgaaaggatctctggatcaccacaaagtctggctcagtgactatggctttgcaaacactaaacattcctgtctcaagtcctgtagatggcttgaaatagtatacataagcatgccttataaacatcttcagtctttatcaactctttggagattcagccattcttttttgtactttagggaattaaatcattttataatgtataaatctgagcatggccgatggcagaagaaattttgtcatacgtttttaaagaaataaaaatgtattatgttttaaaaatcat

SEQ ID NO: 277832 - DNA, 1251 bp, Homo sapiens
gggctactgggctgcggagaccagagcccggctccactgaagaaacccgccggctgctggggcagggcggcgaaaggtcagtcggccgagaggagtccgtggagccaccgtttcatagcctcagggaaaggatcgggcgtgctcacgagccctctaacccatggcttaaacacccgcttcctaagcctggttcctgaatatatcacatgtggtgataaacatgaagatgtatgaaaaattgtgttcgttgagagaaaatggaaggcttttcattctacttccacattttcattccagcagcttttctgttttggaagatgagtactgaatcttgcaatgaaatttttttaacttaaacaagacaaggaaaatgaagcgcagagacgttaaataactctctcaaggtcatgcagctgagaagagatgagacttgaactccagtgccagccctgttaatcactattctatggaatgatagggtatgcataaatgttcatgtgggctctggagtataccaggaactgaagtaaggtacatggacgtcttgaatattgtaactgagatgggcaagcctacacctttgcaaataaaggaggattgggaaagattaagcctctcaagcactgtgaaaaatcactttctcttgttgtattcttggagcccctgctaattcattattgaaaaatacctgctgcctgcatttggccttatgttgtcatttacttgggtctgtgcatggcgtttagaaggctacaccttaggctgggggtcaagaatgtcttccctgatgtgaggtttacacagagatctgaagaatgaagagtccagctaagtacttcctaagcgtggctactccaatgaagctttagtatatgtactgaaagaagatcctctcatactgccacagccaagagataaggttgtaaatctttattgggagaagccgtcaaggacagttctgtgaaatgaaaggatctctggatcaccacaaagtctggctcagtgactatggctttgcaaacactaaacattcctgtctcaagtcctgtagatggcttgaaatagtatacataagcatgccttataaacatcttcagtctttatcaactctttggagattcagccattcttttttgtactttagggaattaaatcattttataatgtataaatctgagcatggccgatggcagaagaaattttgtcatacgtttttaaagaaataaaaatgtattatgttttaaaaatcat

SEQ ID NO: 277833 - DNA, 1028 bp, Homo sapiens
gtgtagaagtccgaccgcggaaccaggactgctgtccagtcggcgagcgcgtaccattcagcatcggctccgccgagtcccaccttcctcaggctctgattggctgacacatggcaagcgcgaaaagcctggaccgctggaaacccggctgcttgagggcggaagtactgcgttgacgtacgccttagtaagggcggaagtgagttttccagcgaagtggctcctgtaaggcagcaaggtagcgtggccggcgcccgagctggggttgtgtccctgctgggctgccgttccagctggactgccgccatggaactcagcgccgaatacctccgcgagaagctgcagcgggacctggaggcggagcatgtcttggatcctagcatgactatacattgtgacatggtcattacatatggattagaccaactggagaattgccagacttgtggtaccaattatatcatctcagtcttgaatttactcacgctgattgttgaacagataaatacgaaactgccatcatcatttgtagaaaaactgtttataccatcatctaaactactattcttgcgttatcataaagaaaaagaggttgttgctgtagcccatgctgtttatcaagcaatgctcagcttgaagaatattcctgttttggagactgcctataagttaatattgggagaaatgacttgtgccctaaacaacctcctgcacagtctgcaacttcctgaggcctgttctgaaataaaacatgaggcttttaagaatcatgtgttcaatgtagacaatgcaaaatttgtagttaaatttgacctcagtgccctgactacaattggaaatgccaaaaactcgagtctttaattgtaatgactttgttttatccacagttaagccttttctcattacatatttatgtatttcactgtcatgtcaacatgtctgcagaatcactgtatgtaacaaacagccatatttaagacatgcctggataaataaaattggtaggaatgttttcttgccattatatt

SEQ ID NO: 277834 - DNA, 1271 bp, Homo sapiens
atgggtagactaaataaaatcctgtatgtattggttgttaaatattatagaaatatttttaaacatttgctctgttttctcccccattttattagaaatttagtacacaattattggccattatagttaagtgggggattttgtttgtgtgtgtattggaaataatatgatttttgaagatattatgtggtaagcatgagagtgcttatctttcaaaagagaccatcagtagatagaaactttaataagcttaaagtgacttgtatgttcagttttgaaagattgattcccaaaagcccaagagctagcttgtagtatgtgtgggcaggctattccccatgctgtcaataccattactgtcgtggtgtatttcatgataaagattctgagcttcagccatttagtgacattgggagaaacgaagttgggtatatgggaaatagaggatggcaggttccatttcctgtcatagtagcactttaggattttttagccaagatcatgtttacatattgtagtaaagggatcattattattcagctactgagaactagaatattaagagactgctggcaaggcaagcagttaattttcagttgaaattgcattaaataaaaagtattttcttgctttgtggaagcacgtgaatttttgtaaaaagctgcttgttttccccatttacaaggttctgtacagagtaatgagatgtgtgacggctgcaaaccaggtgtttttttctgaggctgtgttgacagctgctaatgagtgtgttggtgttttgctcggcagcttggatcctagcatgactatacattgtgacatggtcattacatatggattagaccaactggagaattgccagacttgtggtaccaattatatcatctcagtcttgaatttactcacgctggtatgtgaattattcttttcctttttaatgtgttggtttattcaggcccttaaatcgatatgtaagaaattaaggactttgtctgggtatggtggctcatgcttgtaatcccagcactttgggaggccaaagcagaaggattgcttgcatccaggaattctggcacagcttgggcaatgtagtgagaccccatctgtacaaaaagtcaaaaattagcttggtgtagtggtgtgcacctgcagtcctagctactcgggaggctgagggaggaagatcgattaagcccaggaacttgaggttgaagtgagctctgattgtgccactgcactcagccaaggtgacaaaaaaggccctgtctcca

SEQ ID NO: 277835 - DNA, 1157 bp, Homo sapiens
aaaaaatgcccatgataactgtaaaatacgtgtgtcctatttaggtgtctaaacactttaatgtcacagtattaaggccttaaaatatagcttagatatatttttctaaattaaaagactttattttttagatatacagaaaattgagcagaaaacaatgagttcccatataccttcttcatcccaacagtttccccctcattaacatattgtgttagtgtggtacatttattacaaaggagtgaatattgatatattattattaactaattttatagtttactttgtgttatgtattctatggactttaacatgtgtaatgacatgtatcccctattaccagtatcatacaggatagtttcacttccctaaaaatctttgatgttctacccactccttcctcgttccctctcctcactcctccctccctccatcttaagcccatggcaacccctgatctttttactgtctccatcgttttgccttttccagaatgccatgtagttggagtcatatagtatgtagccttttcaattggcttctttcacttaccagtgtgcatttaaggtttctccatgtctttttgtaatttgagaagctcattttttaaaaattttattcttttagattgttgaacagataaatacgaaactgccatcatcatttgtagaaaaactgtttataccatcatctaaactactattcttgcgttatcataaagaaaaagaggtaagtaatatactgataatgaattttgacaacttgagtcactgaagagttggacctaatgttgcttaccaggctatataagtgaaattgagtgaaatgtgaaatgtttgatttagaatatagtgattgtatttgttcttttaaatttatatttcttgataatcatactgaatactttcatgaatgatgtgccagatactcttttcagattatgcatctcttgctgttattaaatttattaaattttcataagggtaaaacaagttgacacatttataaagttataaattaagtactgtatattttataaacaaaaatgactggcttttcaaccaccccctagtcaaatccaccacagactttcctggtagatttaagaaacccagtcttaaactgctgtttgcatatgtcttttgatgttgattatt

SEQ ID NO: 277836 - DNA, 355 bp, Homo sapiens
tggtggtgcacacctgtaatcctagctactttggaggctgaggtaggagaattgcttgaacccaggaagtggaggttgcagtgagctgagatcacaccaccgcactccagcctgggctacagaaccagactctgtctcaaaagaaaaaaaaaaaaaagaaagaaacaaagaaagaaagtaatggatgtaattagggaataaagtttttaggaggaaaaaggtaaaatttgatgtttgcgcttcagtgtgctccatgttgtttgattggattgccttgtataattccatagctgcttcgcttattaccagttacagcttatgtttgaagtcacaataaactcttcttcaaacatga

SEQ ID NO: 277837 - DNA, 694 bp, Homo sapiens
aaaaaatgcccatgataactgtaaaatacgtgtgtcctatttaggtgtctaaacactttaatgtcacagtattaaggccttaaaatatagcttagatatatttttctaaattaaaagactttattttttagatatacagaaaattgagcagaaaacaatgagttcccatataccttcttcatcccaacagtttccccctcattaacatattgtgttagtgtggtacatttattacaaaggagtgaatattgatatattattattaactaattttatagtttactttgtgttatgtattctatggactttaacatgtgtaatgacatgtatcccctattaccagtatcatacaggatagtttcacttccctaaaaatctttgatgttctacccactccttcctcgttccctctcctcactcctccctccctccatcttaagcccatggcaacccctgatctttttactgtctccatcgttttgccttttccagaatgccatgtagttggagtcatatagtatgtagccttttcaattggcttctttcacttaccagtgtgcatttaaggtttctccatgtctttttgtaatttgagaagctcattttttacagtgttatcgtttacaactgctgtcctatacacatggaaaccgccatcaccatgtgtagggatacatggccaccgttatcacat

SEQ ID NO: 277838 - DNA, 615 bp, Homo sapiens
gtaagatcctgagctatcaggaaattgactgaatgaaacgaacaatcatatttaaataacgtacacattgctgtttgtaggtggctacagtgtcaatggaggatctggggaaaatacttatggtcggaagtcgttggggcaagagctgagggttaacaatgtgaccagccctgagttcaccagtgttcagcatggcagtcgtgctttagccaccaaagacatgaggaaatcacaggagagatcgatgtcttattgtgatgagtctcgactgtcaaatcttcttcggaggatcacccgggaagacgacagagactgaagattggtcactgtaaagcagttgaaagaatttattcagcaaccagaaaataagctggtaagtatagtatgtttggaaatatgaggatttttgtgtttccataataaactaggtaatgctaccttgagtagtttaagaatggggaaagtctgtattatgatgatcaagaacttaatgctctctaatatgtaatttctttttcttcttaaagacaagatcttgctctcacccaggctggagtgcagtggcacaatcatagctcactgcagtctcaaactcctggattcaagctatcctcc

SEQ ID NO: 277839 - DNA, 2126 bp, Homo sapiens
gtgtcggcagcggccggttcgggcggcgactcgcgcttctctgggcggcggcgcttggccatgtcgtgtcggggaaggtaatgagccgcagagccccggggtctcggctgagcagcggcggcaccaactattcgcggagctggaatgactggcaacccagaactgatagtgcatcagctgacccaggtaatttaaaatattcttcatccagagatagaggtggttcttcctcttacggactgcaaccttcaaattcagctgtggtgtctcggcaaaggcacgatgataccagagtccacgctgacatacagaatgacgaaaagggtggctacagtgtcaatggaggatctggggaaaatacttatggtcggaagtcgttggggcaagagctgagggttaacaatgtgaccagccctgagttcaccagtgttcagcatggcagtcgtgctttagccaccaaagacatgaggaaatcacaggagagatcgatgtcttattgtgatgagtctcgactgtcaaatcttcttcggaggatcacccgggaagacgacagagactgaagattggtcactgtaaagcagttgaaagaatttattcagcaaccagaaaataagctggtactagttaaacaattggataatatcttggctgctgtacatgatgtgcttaatgaaagtagcaaattgcttcaggagttgagacaggagggagcttgctgtcttggccttctttgtgcttctctgagctatgaggctgagaagatcttcaagtggagttttagcaaatttagctcatctgcaaaagatgaagttaaactcctctacttatgtgccacctacaaagcactagagactgtaggagaaaagaaagccttttcatctgtaatgcagcttgtaatgaccagcctgcagtcaattcttgaaaatgtggatacaccagaattgctttgcaaatgtgttaagtgcattcttttggtggctcgatgttaccctcatattttcagcgctaattttagggatacagttgatatattagttggatggcatagagatcatactcagaaaccttcgctcacgcagcaggtatctgggtggttgcagagtttggagccattttgggtagctgatcttgcatttcctacgactcttcttggtcagtttctagaagacatggaagcatatgctgaggacctcagccatgtggcctctggggaatcagtggatgaagacgtccctcctccatcagtgtcatcaccaaagctggctgcgcttctccgggtatttagtactgtgctgaggagcattggggaacgcttcagcccaattcgggtcctccaattactgaggcatacgtaacagttaggttctgtacagagtaatgagatgtgtgacggctgcaaaccaggtgtttttttctgaggctgtgttgacagctgctaatgagtgtgttggtgttttgctcggcagcttggatcctagcatgactatacattgtgacatggtcattacatatggattagaccaactggagaattgccagacttgtggtaccaattatatcatctcagtcttgaatttactcacgctgattgttgaacagataaatacgaaactgccatcatcatttgtagaaaaactgtttataccatcatctaaactactattcttgcgttatcataaagaaaaagaggttgttgctgtagcccatgctgtttatcaagcaatgctcagcttgaagaatattcctgttttggagactgcctataagttaatattgggagaaatgacttgtgccctaaacaacctcctgcacagtctgcaacttcctgaggcctgttctgaaataaaacatgaggcttttaagaatcatgtgttcaatgtagacaatgcaaaatttgtagttaaatttgacctcagtgccctgactacaattggaaatgccaaaaactcgagtctttaattgtaatgactttgttttatccacagttaagccttttctcattacatatttatgtatttcactgtcatgtcaacatgtctgcagaatcactgtatgtaacaaacagccatatttaagacatgcctggataaataaaattggtaggaatgttttcttgccattatatt

SEQ ID NO: 277840 - DNA, 1878 bp, Homo sapiens
  misc_feature (1324)..(1324): n is a, c, g, or t
gtgtagaagtccgaccgcggaaccaggactgctgtccagtcggcgagcgcgtaccattcagcatcggctccgccgagtcccaccttcctcaggctctgattggctgacacatggcaagcgcgaaaagcctggaccgctggaaacccggctgcttgagggcggaagtactgcgttgacgtacgccttagtaagggcggaagtgagttttccagcgaagtggctcctgtaaggcagcaaggtagcgtggccggcgcccgagctggggttgtgtccctgctgggctgccgttccagctggactgccgccatggaactcagcgccgaatacctccgcgagaagctgcagcgggacctggaggcggagcatgtggaggtggaggacacgaccctcaaccgttgctcctgtagcttccgagtcctggtggtgtcggccaagttcgaggggaaaccgctgcttcagagacacaggttctgtacagagtaatgagatgtgtgacggctgcaaaccaggtgtttttttctgaggctgtgttgacagctgctaatgagtgtgttggtgttttgctcggcagcttggatcctagcatgactatacattgtgacatggtcattacatatggattagaccaactggagaattgccagacttgtggtaccaattatatcatctcagtcttgaatttactcacgctgattgttgaacagataaatacgaaactgccatcatcatttgtagaaaaactgtttataccatcatctaaactactattcttgcgttatcataaagaaaaagaggttgttgctgtagcccatgctgtttatcaagcaatgctcagcttgaagaatattcctgttttggagactgcctataagttaatattgggagaaatgacttgtgccctaaacaacctcctgcacagtctgcaacttcctgaggcctgttctgaaataaaacatgaggcttttaagaatcatgtgttcaatgtagacaatgcaaaatttgtagttaaatttgacctcagtgccctgactacaattggaaatgccaaaaactcgagtctttaattgtaatgactttgttttatccacagttaagccttttctcattacatatttatgtatttcactgtcatgtcaacatgtctgcagaatcactgtatgtaacaaacagccatatttaagacatgcctggataaataaaattggtaggaatgttttcttgccattatatttaacgtttcttctttttccttgacaaatcttgataagtttttttatattagttttattttctagaaaacgtcttatgaatttctcccatttgntctagcatgcttatagaaaatgtcagtgtttcttacagctcaaatttgtatagttgttttaaaatgcggtctcttcttcttcccctggtacttttttctttctgtctactgaagttagttcttatacatggtcttatattttggctgtctttttttccctaggaacattcatacaggttgaatattccttatctgaaatacttgggactggaagtgtttttgattttggagtttggaatacttttttttttttggagatagtgttttactcttgttgcagtgagctgagatcacaccaccgcactccagcctgggctacagaaccagactctgtctcaaaagaaaaaaaaaaaaaagaaagaaacaaagaaagaaagtaatggatgtaattagggaataaagtttttaggaggaaaaaggtaaaatttgatgtttgcgcttcagtgtgctccatgttgtttgattggattgccttgtataattccatagctgcttcgcttattaccagttacagcttatgtttgaagtcacaataaactcttcttcaaacatga

SEQ ID NO: 277841 - DNA, 2069 bp, Homo sapiens
  misc_feature (1324)..(1324): n is a, c, g, or t
gtgtagaagtccgaccgcggaaccaggactgctgtccagtcggcgagcgcgtaccattcagcatcggctccgccgagtcccaccttcctcaggctctgattggctgacacatggcaagcgcgaaaagcctggaccgctggaaacccggctgcttgagggcggaagtactgcgttgacgtacgccttagtaagggcggaagtgagttttccagcgaagtggctcctgtaaggcagcaaggtagcgtggccggcgcccgagctggggttgtgtccctgctgggctgccgttccagctggactgccgccatggaactcagcgccgaatacctccgcgagaagctgcagcgggacctggaggcggagcatgtggaggtggaggacacgaccctcaaccgttgctcctgtagcttccgagtcctggtggtgtcggccaagttcgaggggaaaccgctgcttcagagacacaggttctgtacagagtaatgagatgtgtgacggctgcaaaccaggtgtttttttctgaggctgtgttgacagctgctaatgagtgtgttggtgttttgctcggcagcttggatcctagcatgactatacattgtgacatggtcattacatatggattagaccaactggagaattgccagacttgtggtaccaattatatcatctcagtcttgaatttactcacgctgattgttgaacagataaatacgaaactgccatcatcatttgtagaaaaactgtttataccatcatctaaactactattcttgcgttatcataaagaaaaagaggttgttgctgtagcccatgctgtttatcaagcaatgctcagcttgaagaatattcctgttttggagactgcctataagttaatattgggagaaatgacttgtgccctaaacaacctcctgcacagtctgcaacttcctgaggcctgttctgaaataaaacatgaggcttttaagaatcatgtgttcaatgtagacaatgcaaaatttgtagttaaatttgacctcagtgccctgactacaattggaaatgccaaaaactcgagtctttaattgtaatgactttgttttatccacagttaagccttttctcattacatatttatgtatttcactgtcatgtcaacatgtctgcagaatcactgtatgtaacaaacagccatatttaagacatgcctggataaataaaattggtaggaatgttttcttgccattatatttaacgtttcttctttttccttgacaaatcttgataagtttttttatattagttttattttctagaaaacgtcttatgaatttctcccatttgntctagcatgcttatagaaaatgtcagtgtttcttacagctcaaatttgtatagttgttttaaaatgcggtctcttcttcttcccctggtacttttttctttctgtctactgaagttagttcttatacatggtcttatattttggctgtctttttttccctaggaacattcatacaggttgaatattccttatctgaaatacttgggactggaagtgtttttgattttggagtttggaatacttttttttttttggagatagtgttttactcttgttgcccaggctggagtgcaatggcgcaatcttggctcgctgcaacctccgcctcccgggtacaagcgattctcctgtttcagcctcccaagtagctcggattacaggcatgcgccaccacgcctggctaatttttttgtatttagtagagatgggttttcaccatgttagccaggctggttgtgaactcctgacctcaggtgatccacctgccttggcctcccaaaatgccgggattacaggtgggcaccaccatgcccagccggattttggaatattttcataacacttactggtgagcacccctaatctgaaaatcctaaatctaaaatgctccaaaatttgaaactttttgagcaccagtatgatgccccaagtggaaaatcccacacccgacctcatgtgatgagtccaaactgttgtatgcacaaaattatttaaaatattgcataaaatgaccttcaggctatga

SEQ ID NO: 277842 - DNA, 1583 bp, Homo sapiens
  misc_feature (1324)..(1324): n is a, c, g, or t
  misc_feature (1542)..(1542): n is a, c, g, or t
gtgtagaagtccgaccgcggaaccaggactgctgtccagtcggcgagcgcgtaccattcagcatcggctccgccgagtcccaccttcctcaggctctgattggctgacacatggcaagcgcgaaaagcctggaccgctggaaacccggctgcttgagggcggaagtactgcgttgacgtacgccttagtaagggcggaagtgagttttccagcgaagtggctcctgtaaggcagcaaggtagcgtggccggcgcccgagctggggttgtgtccctgctgggctgccgttccagctggactgccgccatggaactcagcgccgaatacctccgcgagaagctgcagcgggacctggaggcggagcatgtggaggtggaggacacgaccctcaaccgttgctcctgtagcttccgagtcctggtggtgtcggccaagttcgaggggaaaccgctgcttcagagacacaggttctgtacagagtaatgagatgtgtgacggctgcaaaccaggtgtttttttctgaggctgtgttgacagctgctaatgagtgtgttggtgttttgctcggcagcttggatcctagcatgactatacattgtgacatggtcattacatatggattagaccaactggagaattgccagacttgtggtaccaattatatcatctcagtcttgaatttactcacgctgattgttgaacagataaatacgaaactgccatcatcatttgtagaaaaactgtttataccatcatctaaactactattcttgcgttatcataaagaaaaagaggttgttgctgtagcccatgctgtttatcaagcaatgctcagcttgaagaatattcctgttttggagactgcctataagttaatattgggagaaatgacttgtgccctaaacaacctcctgcacagtctgcaacttcctgaggcctgttctgaaataaaacatgaggcttttaagaatcatgtgttcaatgtagacaatgcaaaatttgtagttaaatttgacctcagtgccctgactacaattggaaatgccaaaaactcgagtctttaattgtaatgactttgttttatccacagttaagccttttctcattacatatttatgtatttcactgtcatgtcaacatgtctgcagaatcactgtatgtaacaaacagccatatttaagacatgcctggataaataaaattggtaggaatgttttcttgccattatatttaacgtttcttctttttccttgacaaatcttgataagtttttttatattagttttattttctagaaaacgtcttatgaatttctcccatttgntctagcatgcttatagaaaatgtcagtgtttcttacagctcaaatttgtatagttgttttaaaatgcggtctcttcttcttcccctggtacttttttctttctgtctactgaagttagtttataaagggcatatttggggggtttttcccaggaaaattcataagggggaaagtcctgtgtggaaggtgggaaggaaggtgtgagcggggggaaaatncggggaaagggacctgtggggggggaggaaacgctggtgaa

SEQ ID NO: 277843 - DNA, 2051 bp, Homo sapiens
  misc_feature (1324)..(1324): n is a, c, g, or t
gtgtagaagtccgaccgcggaaccaggactgctgtccagtcggcgagcgcgtaccattcagcatcggctccgccgagtcccaccttcctcaggctctgattggctgacacatggcaagcgcgaaaagcctggaccgctggaaacccggctgcttgagggcggaagtactgcgttgacgtacgccttagtaagggcggaagtgagttttccagcgaagtggctcctgtaaggcagcaaggtagcgtggccggcgcccgagctggggttgtgtccctgctgggctgccgttccagctggactgccgccatggaactcagcgccgaatacctccgcgagaagctgcagcgggacctggaggcggagcatgtggaggtggaggacacgaccctcaaccgttgctcctgtagcttccgagtcctggtggtgtcggccaagttcgaggggaaaccgctgcttcagagacacaggttctgtacagagtaatgagatgtgtgacggctgcaaaccaggtgtttttttctgaggctgtgttgacagctgctaatgagtgtgttggtgttttgctcggcagcttggatcctagcatgactatacattgtgacatggtcattacatatggattagaccaactggagaattgccagacttgtggtaccaattatatcatctcagtcttgaatttactcacgctgattgttgaacagataaatacgaaactgccatcatcatttgtagaaaaactgtttataccatcatctaaactactattcttgcgttatcataaagaaaaagaggttgttgctgtagcccatgctgtttatcaagcaatgctcagcttgaagaatattcctgttttggagactgcctataagttaatattgggagaaatgacttgtgccctaaacaacctcctgcacagtctgcaacttcctgaggcctgttctgaaataaaacatgaggcttttaagaatcatgtgttcaatgtagacaatgcaaaatttgtagttaaatttgacctcagtgccctgactacaattggaaatgccaaaaactcgagtctttaattgtaatgactttgttttatccacagttaagccttttctcattacatatttatgtatttcactgtcatgtcaacatgtctgcagaatcactgtatgtaacaaacagccatatttaagacatgcctggataaataaaattggtaggaatgttttcttgccattatatttaacgtttcttctttttccttgacaaatcttgataagtttttttatattagttttattttctagaaaacgtcttatgaatttctcccatttgntctagcatgcttatagaaaatgtcagtgtttcttacagctcaaatttgtatagttgttttaaaatgcggtctcttcttcttcccctggtacttttttctttctgtctactgaagttagttcttatacatggtcttatattttggctgtctttttttccctaggaacattcatacaggttgaatattccttatctgaaatacttgggactggaagtgtttttgattttggagtttggaatacttttttttttttggagatagtgttttactcttgttgcccaggctggagtgcaatggcgcaatcttggctcgctgcaacctccgcctcccgggtacaagcgattctcctgtttcagcctcccaagtagctcggattacaggcatgcgccaccacgcctggctaatttttttgtatttagtagagatgggttttcaccatgttagccaggctggttgtgaactcctgacctcaggtgatccacctgccttggcctcccaaaatgccgggattacaggtgggcaccaccatgcccagccggattttggaatattttcataacacttactggtgagcacccctaatctgaaaatcgtaaaatttgatgtttgcgcttcagtgtgctccatgttgtttgattggattgccttgtataattccatagctgcttcgcttattaccagttacagcttatgtttgaagtcacaataaactcttcttcaaacatga

SEQ ID NO: 277844 - DNA, 1125 bp, Homo sapiens
gtgtagaagtccgaccgcggaaccaggactgctgtccagtcggcgagcgcgtaccattcagcatcggctccgccgagtcccaccttcctcaggctctgattggctgacacatggcaagcgcgaaaagcctggaccgctggaaacccggctgcttgagggcggaagtactgcgttgacgtacgccttagtaagggcggaagtgagttttccagcgaagtggctcctgtaaggcagcaaggtagcgtggccggcgcccgagctggggttgtgtccctgctgggctgccgttccagctggactgccgccatggaactcagcgccgaatacctccgcgagaagctgcagcgggacctggaggcggagcatgtggaggtggaggacacgaccctcaaccgttgctcctgtagcttccgagtcctggtggtgtcggccaagttcgaggggaaaccgctgcttcagagacaccttggatcctagcatgactatacattgtgacatggtcattacatatggattagaccaactggagaattgccagacttgtggtaccaattatatcatctcagtcttgaatttactcacgctgattgttgaacagataaatacgaaactgccatcatcatttgtagaaaaactgtttataccatcatctaaactactattcttgcgttatcataaagaaaaagaggttgttgctgtagcccatgctgtttatcaagcaatgctcagcttgaagaatattcctgttttggagactgcctataagttaatattgggagaaatgacttgtgccctaaacaacctcctgcacagtctgcaacttcctgaggcctgttctgaaataaaacatgaggcttttaagaatcatgtgttcaatgtagacaatgcaaaatttgtagttaaatttgacctcagtgccctgactacaattggaaatgccaaaaactcgagtctttaattgtaatgactttgttttatccacagttaagccttttctcattacatatttatgtatttcactgtcatgtcaacatgtctgcagaatcactgtatgtaacaaacagccatatttaagacatgcctggataaataaaattggtaggaatgttttcttgccattatatt

SEQ ID NO: 277845 - DNA, 1318 bp, Homo sapiens
gtgtagaagtccgaccgcggaaccaggactgctgtccagtcggcgagcgcgtaccattcagcatcggctccgccgagtcccaccttcctcaggctctgattggctgacacatggcaagcgcgaaaagcctggaccgctggaaacccggctgcttgagggcggaagtactgcgttgacgtacgccttagtaagggcggaagtgagttttccagcgaagtggctcctgtaaggcagcaaggtagcgtggccggcgcccgagctggggttgtgtccctgctgggctgccgttccagctggactgccgccatggaactcagcgccgaatacctccgcgagaagctgcagcgggacctggaggcggagcatgtgggagcatgtggtgagttgagccgccggacaaggggaaaagagctcggggggcgggttcggcaccattcatattcttccgctcggtaggaggtggaggacacgaccctcaaccgttgctcctgtagcttccgagtcctggtggtgtcggccaagttcgaggggaaaccgctgcttcagagacacaggttctgtacagagtaatgagatgtgtgacggctgcaaaccaggtgtttttttctgaggctgtgttgacagctgctaatgagtgtgttggtgttttgctcggcagcttggatcctagcatgactatacattgtgacatggtcattacatatggattagaccaactggagaattgccagacttgtggtaccaattatatcatctcagtcttgaatttactcacgctgattgttgaacagataaatacgaaactgccatcatcatttgtagaaaaactgtttataccatcatctaaactactattcttgcgttatcataaagaaaaagaggttgttgctgtagcccatgctgtttatcaagcaatgctcagcttgaagaatattcctgttttggagactgcctataagttaatattgggagaaatgacttgtgccctaaacaacctcctgcacagtctgcaacttcctgaggcctgttctgaaataaaacatgaggcttttaagaatcatgtgttcaatgtagacaatgcaaaatttgtagttaaatttgacctcagtgccctgactacaattggaaatgccaaaaactcgagtctttaattgtaatgactttgttttatccacagttaagccttttctcattacatatttatgtatttcactgtcatgtcaacatgtctgcagaatcactgtatgtaacaaacagccatatttaagacatgcctggataaataaaattggtaggaatgttttcttgccattatatt

SEQ ID NO: 277846 - DNA, 1212 bp, Homo sapiens
gtgtagaagtccgaccgcggaaccaggactgctgtccagtcggcgagcgcgtaccattcagcatcggctccgccgagtcccaccttcctcaggctctgattggctgacacatggcaagcgcgaaaagcctggaccgctggaaacccggctgcttgagggcggaagtactgcgttgacgtacgccttagtaagggcggaagtgagttttccagcgaagtggctcctgtaaggcagcaaggtagcgtggccggcgcccgagctggggttgtgtccctgctgggctgccgttccagctggactgccgccatggaactcagcgccgaatacctccgcgagaagctgcagcgggacctggaggcggagcatgtgggagcatgtggtgagttgagccgccggacaaggggaaaagagctcggggggcgggttcggcaccattcatattcttccgctcggtaggaggtggaggacacgaccctcaaccgttgctcctgtagcttccgagtcctggtggtgtcggccaagttcgaggggaaaccgctgcttcagagacaccttggatcctagcatgactatacattgtgacatggtcattacatatggattagaccaactggagaattgccagacttgtggtaccaattatatcatctcagtcttgaatttactcacgctgattgttgaacagataaatacgaaactgccatcatcatttgtagaaaaactgtttataccatcatctaaactactattcttgcgttatcataaagaaaaagaggttgttgctgtagcccatgctgtttatcaagcaatgctcagcttgaagaatattcctgttttggagactgcctataagttaatattgggagaaatgacttgtgccctaaacaacctcctgcacagtctgcaacttcctgaggcctgttctgaaataaaacatgaggcttttaagaatcatgtgttcaatgtagacaatgcaaaatttgtagttaaatttgacctcagtgccctgactacaattggaaatgccaaaaactcgagtctttaattgtaatgactttgttttatccacagttaagccttttctcattacatatttatgtatttcactgtcatgtcaacatgtctgcagaatcactgtatgtaacaaacagccatatttaagacatgcctggataaataaaattggtaggaatgttttcttgccattatatt

SEQ ID NO: 277847 - DNA, 1416 bp, Homo sapiens
gtgtagaagtccgaccgcggaaccaggactgctgtccagtcggcgagcgcgtaccattcagcatcggctccgccgagtcccaccttcctcaggctctgattggctgacacatggcaagcgcgaaaagcctggaccgctggaaacccggctgcttgagggcggaagtactgcgttgacgtacgccttagtaagggcggaagtgagttttccagcgaagtggctcctgtaaggcagcaaggtagcgtggccggcgcccgagctggggttgtgtccctgctgggctgccgttccagctggactgccgccatggaactcagcgccgaatacctccgcgagaagctgcagcgggacctggaggcggagcatgtgggagcatgtggtgagttgagccgccggacaaggggaaaagagctcggggggcgggttcggcaccattcatattcttccgctcggtaggaggtggaggacacgaccctcaaccgttgctcctgtagcttccgagtcctggtggtgtcggccaagttcgaggggaaaccgctgcttcagagacacgctggagtgcaatggcacgatctcggctcaccacaacctccgcctcctgggttcaagcgattctcttgtctcagcctcccaagtagctgggattacagaggttctgtacagagtaatgagatgtgtgacggctgcaaaccaggtgtttttttctgaggctgtgttgacagctgctaatgagtgtgttggtgttttgctcggcagcttggatcctagcatgactatacattgtgacatggtcattacatatggattagaccaactggagaattgccagacttgtggtaccaattatatcatctcagtcttgaatttactcacgctgattgttgaacagataaatacgaaactgccatcatcatttgtagaaaaactgtttataccatcatctaaactactattcttgcgttatcataaagaaaaagaggttgttgctgtagcccatgctgtttatcaagcaatgctcagcttgaagaatattcctgttttggagactgcctataagttaatattgggagaaatgacttgtgccctaaacaacctcctgcacagtctgcaacttcctgaggcctgttctgaaataaaacatgaggcttttaagaatcatgtgttcaatgtagacaatgcaaaatttgtagttaaatttgacctcagtgccctgactacaattggaaatgccaaaaactcgagtctttaattgtaatgactttgttttatccacagttaagccttttctcattacatatttatgtatttcactgtcatgtcaacatgtctgcagaatcactgtatgtaacaaacagccatatttaagacatgcctggataaataaaattggtaggaatgttttcttgccattatatt

SEQ ID NO: 277848 - DNA, 1134 bp, Homo sapiens
gtgtagaagtccgaccgcggaaccaggactgctgtccagtcggcgagcgcgtaccattcagcatcggctccgccgagtcccaccttcctcaggctctgattggctgacacatggcaagcgcgaaaagcctggaccgctggaaacccggctgcttgagggcggaagtactgcgttgacgtacgccttagtaagggcggaagtgagttttccagcgaagtggctcctgtaaggcagcaaggtagcgtggccggcgcccgagctggggttgtgtccctgctgggctgccgttccagctggactgccgccatggaactcagcgccgaatacctccgcgagaagctgcagcgggacctggaggcggagcatgtaggttctgtacagagtaatgagatgtgtgacggctgcaaaccaggtgtttttttctgaggctgtgttgacagctgctaatgagtgtgttggtgttttgctcggcagcttggatcctagcatgactatacattgtgacatggtcattacatatggattagaccaactggagaattgccagacttgtggtaccaattatatcatctcagtcttgaatttactcacgctgattgttgaacagataaatacgaaactgccatcatcatttgtagaaaaactgtttataccatcatctaaactactattcttgcgttatcataaagaaaaagaggttgttgctgtagcccatgctgtttatcaagcaatgctcagcttgaagaatattcctgttttggagactgcctataagttaatattgggagaaatgacttgtgccctaaacaacctcctgcacagtctgcaacttcctgaggcctgttctgaaataaaacatgaggcttttaagaatcatgtgttcaatgtagacaatgcaaaatttgtagttaaatttgacctcagtgccctgactacaattggaaatgccaaaaactcgagtctttaattgtaatgactttgttttatccacagttaagccttttctcattacatatttatgtatttcactgtcatgtcaacatgtctgcagaatcactgtatgtaacaaacagccatatttaagacatgcctggataaataaaattggtaggaatgttttcttgccattatatt

SEQ ID NO: 277849 - DNA, 1449 bp, Homo sapiens
atgggtagactaaataaaatcctgtatgtattggttgttaaatattatagaaatatttttaaacatttgctctgttttctcccccattttattagaaatttagtacacaattattggccattatagttaagtgggggattttgtttgtgtgtgtattggaaataatatgatttttgaagatattatgtggtaagcatgagagtgcttatctttcaaaagagaccatcagtagatagaaactttaataagcttaaagtgacttgtatgttcagttttgaaagattgattcccaaaagcccaagagctagcttgtagtatgtgtgggcaggctattccccatgctgtcaataccattactgtcgtggtgtatttcatgataaagattctgagcttcagccatttagtgacattgggagaaacgaagttgggtatatgggaaatagaggatggcaggttccatttcctgtcatagtagcactttaggattttttagccaagatcatgtttacatattgtagtaaagggatcattattattcagctactgagaactagaatattaagagactgctggcaaggcaagcagttaattttcagttgaaattgcattaaataaaaagtattttcttgctttgtggaagcacgtgaatttttgtaaaaagctgcttgttttccccatttacaaggttctgtacagagtaatgagatgtgtgacggctgcaaaccaggtgtttttttctgaggctgtgttgacagctgctaatgagtgtgttggtgttttgctcggcagcttggatcctagcatgactatacattgtgacatggtcattacatatggattagaccaactggagaattgccagacttgtggtaccaattatatcatctcagtcttgaatttactcacgctgattgttgaacagataaatacgaaactgccatcatcatttgtagaaaaactgtttataccatcatctaaactactattcttgcgttatcataaagaaaaagaggttgttgctgtagcccatgctgtttatcaagcaatgctcagcttgaagaatattcctgttttggagactgcctataagttaatattgggagaaatgacttgtgccctaaacaacctcctgcacagtctgcaacttcctgaggcctgttctgaaataaaacatgaggcttttaagaatcatgtgttcaatgtagacaatgcaaaatttgtagttaaatttgacctcagtgccctgactacaattggaaatgccaaaaactcgagtctttaattgtaatgactttgttttatccacagttaagccttttctcattacatatttatgtatttcactgtcatgtcaacatgtctgcagaatcactgtatgtaacaaacagccatatttaagacatgcctggataaataaaattggtaggaatgttttcttgccattatatt

SEQ ID NO: 277850 - DNA, 1166 bp, Homo sapiens
aaaaaatgcccatgataactgtaaaatacgtgtgtcctatttaggtgtctaaacactttaatgtcacagtattaaggccttaaaatatagcttagatatatttttctaaattaaaagactttattttttagatatacagaaaattgagcagaaaacaatgagttcccatataccttcttcatcccaacagtttccccctcattaacatattgtgttagtgtggtacatttattacaaaggagtgaatattgatatattattattaactaattttatagtttactttgtgttatgtattctatggactttaacatgtgtaatgacatgtatcccctattaccagtatcatacaggatagtttcacttccctaaaaatctttgatgttctacccactccttcctcgttccctctcctcactcctccctccctccatcttaagcccatggcaacccctgatctttttactgtctccatcgttttgccttttccagaatgccatgtagttggagtcatatagtatgtagccttttcaattggcttctttcacttaccagtgtgcatttaaggtttctccatgtctttttgtaatttgagaagctcattttttaaaaattttattcttttagattgttgaacagataaatacgaaactgccatcatcatttgtagaaaaactgtttataccatcatctaaactactattcttgcgttatcataaagaaaaagaggttgttgctgtagcccatgctgtttatcaagcaatgctcagcttgaagaatattcctgttttggagactgcctataagttaatattgggagaaatgacttgtgccctaaacaacctcctgcacagtctgcaacttcctgaggcctgttctgaaataaaacatgaggcttttaagaatcatgtgttcaatgtagacaatgcaaaatttgtagttaaatttgacctcagtgccctgactacaattggaaatgccaaaaactcgagtctttaattgtaatgactttgttttatccacagttaagccttttctcattacatatttatgtatttcactgtcatgtcaacatgtctgcagaatcactgtatgtaacaaacagccatatttaagacatgcctggataaataaaattggtaggaatgttttcttgccattatatt

SEQ ID NO: 277851 - DNA, 1948 bp, Homo sapiens
gtgtcggcagcggccggttcgggcggcgactcgcgcttctctgggcggcggcgcttggccatgtcgtgtcggggaaggtaatgagccgcagagccccggggtctcggctgagcagcggcggcaccaactattcgcggagctggaatgactggcaacccagaactgatagtgcatcagctgacccaggtaatttaaaatattcttcatccagagatagaggtggttcttcctcttacggactgcaaccttcaaattcagctgtggtgtctcggcaaaggcacgatgataccagagtccacgctgacatacagaatgacgaaaagggtggctacagtgtcaatggaggatctggggaaaatacttatggtcggaagtcgttggggcaagagctgagggttaacaatgtgaccagccctgagttcaccagtgttcagcatggcagtcgtgctttagccaccaaagacatgaggaaatcacaggagagatcgatgtcttattgtgatgagtctcgactgtcaaatcttcttcggaggatcacccgggaagacgacagagactgaagattggtcactgtaaagcagttgaaagaatttattcagcaaccagaaaataagctggtactagttaaacaattggataatatcttggctgctgtacatgatgtgcttaatgaaagtagcaaattgcttcaggagttgagacaggagggagcttgctgtcttggccttctttgtgcttctctgagctatgaggctgagaagatcttcaagtggagttttagcaaatttagctcatctgcaaaagatgaagttaaactcctctacttatgtgccacctacaaagcactagagactgtaggagaaaagaaagccttttcatctgtaatgcagcttgtaatgaccagcctgcagtcaattcttgaaaatgtggatacaccagaattgctttgcaaatgtgttaagtgcattcttttggtggctcgatgttaccctcatattttcagcgctaattttagggatacagttgatatattagttggatggcatagagatcatactcagaaaccttcgctcacgcagcaggtatctgggtggttgcagagtttggagccattttgggtagctgatcttgcatttcctacgactcttcttggtcagtttctagaagacatggaagcatatgctgaggacctcagccatgtggcctctggggaatcagtggatgaagacgtccctcctccatcagtgtcatcaccaaagctggctgcgcttctccgggtatttagtactgtgctgaggagcattggggaacgcttcagcccaattcgggtcctccaattactgaggcatacgtaacagttaggttctgtacagagtaatgagatgtgtgacggctgcaaaccaggtgtttttttctgaggctgtgttgacagctgctaatgagtgtgttggtgttttgctcggcagcttggatcctagcatgactatacattgtgacatggtcattacatatggattagaccaactggagaattgccagacttgtggtaccaattatatcatctcagtcttgaatttactcacgctggtatgtgaattattcttttcctttttaatgtgttggtttattcaggcccttaaatcgatatgtaagaaattaaggactttgtctgggtatggtggctcatgcttgtaatcccagcactttgggaggccaaagcagaaggattgcttgcatccaggaattctggcacagcttgggcaatgtagtgagaccccatctgtacaaaaagtcaaaaattagcttggtgtagtggtgtgcacctgcagtcctagctactcgggaggctgagggaggaagatcgattaagcccaggaacttgaggttgaagtgagctctgattgtgccactgcactcagccaaggtgacaaaaaaggccctgtctcca

SEQ ID NO: 277852 - DNA, 1337 bp, Homo sapiens
  misc_feature (1293)..(1293): n is a, c, g, or t
gtgtcggcagcggccggttcgggcggcgactcgcgcttctctgggcggcggcgcttggccatgtcgtgtcggggaaggtaatgagccgcagagccccggggtctcggctgagcagcggcggcaccaactattcgcggagctggaatgactggcaacccagaactgatagtgcatcagctgacccaggtaatttaaaatattcttcatccagagatagaggtggttcttcctcttacggactgcaaccttcaaattcagctgtggtgtctcggcaaaggcacgatgataccagagtccacgctgacatacagaatgacgaaaagggtggctacagtgtcaatggaggatctggggaaaatacttatggtcggaagtcgttggggcaagagctgagggttaacaatgtgaccagccctgagttcaccagtgttcagcatggcagtcgtgctttagccaccaaagacatgaggaaatcacaggagagatcgatgtcttattgtgatgagtctcgactgtcaaatcttcttcggaggatcacccgggaagacgacagagactgaagattggtcactgtaaagcagttgaaagaatttattcagcaaccagaaaataagctggtactagttaaacaattggataatatcttggctgctgtacatgatgtgcttaatgaaagtagcaaattgcttcaggagttgagacaggagggagcttgctgtcttggccttctttgtgcttctctgagctatgaggctgagaagatcttcaagtggagttttagcaaatttagctcatctgcaaaagatgaagttaaactcctctacttatgtgccacctacaaagcactagagactgtaggagaaaagaaagccttttcatctgtaatgcagcttgtaatgaccagcctgcagtcaattcttgaaaatgtggatacaccagaattgctttgcaaatgtgttaagtgcattcttttggtggctcgatgttaccctcatattttcagcgctaattttagggatacagttgatatattagttggatggcatagagatcatactcagaaaccttcgctcacgcagcaggtatctgggtggttgcagagtttggagccattttgggtagctgatcttgcatttcctacgactcttcttggtcagtttctagaagacatggaagcatatgctgaggacctcagccatgtggcctctggggaatggattcaaatccctccggctaaaaggccaacatttaattattttgcaaagcaacctaagagctaaagatgtaattttncttgcaattgtaaatcttttgtgtctcctgaaggcttcccttaa

SEQ ID NO: 277853 - DNA, 1042 bp, Homo sapiens
gtgtcggcagcggccggttcgggcggcgactcgcgcttctctgggcggcggcgcttggccatgtcgtgtcggggaaggtaatgagccgcagagccccggggtctcggctgagcagcggcggcaccaactattcgcggagctggaatgactggcaacccagaactgatagtgcatcagctgacccaggtaatttaaaatattcttcatccagagatagaggtggttcttcctcttacggactgcaaccttcaaattcagctgtggtgtctcggcaaaggcacgatgataccagagtccacgctgacatacagaatgacgaaaagggtggctacagtgtcaatggaggatctggggaaaatacttatggtcggaagtcgttggggcaagagctgagggttaacaatgtgaccagccctgagttcaccagtgttcagcatggcagtcgtgctttagccaccaaagacatgaggaaatcacaggagagatcgatgtcttattgtgatgagtctcgactgtcaaatcttcttcggaggatcacccgggaagacgacagagactgaagattggtcactgtaaagcagttgaaagaatttattcagcaaccagaaaataagctggtactagttaaacaattggataatatcttggctgctgtacatgatgtgcttaatgaaagtagcaaattgcttcaggagttgagacaggagggagcttgctgtcttggccttctttgtgcttctctgagctatgaggctgagaagatcttcaagtggagttttagcaaatttagctcatctgcaaaagatgaagttaaactcctctacttatgtgccacctacaaagcactagagactgtaggagaaaagaaagccttttcatctgtaatgcagcttgtaatgaccagcctgcagtcaattcttgaaaatgtggatacaccagaattgctttgcaaatgtgttaagtgcattcttttggtggctcgatgttaccctcatattttcagcgctaattttagggggatctctagatgcctcagcacccc

SEQ ID NO: 277854 - DNA, 371 bp, Homo sapiens
agccctgagttcaccagtgttcagcatggcagtcgtgctttagccaccaaagacatgaggaaatcacagggtaagtctgggaaaatggggaccaatcacatacaccttccaaagacttgtatctcctcttattctggatgcctcttactaacgccttgcacaggcataagttgattagtctactgtgcaggtaaaaattgtttacattcttttcctgtgaattgttaatttcccactagaaaggttatagtacattttaaaagagaattctcttaaaacaagattagaagactggataagatcttacagaaaaggtttacccaattatcgtggatattgaatgtatagtgcatagtaggctcttactacag

SEQ ID NO: 277855 - DNA, 580 bp, Homo sapiens
tagcaaattgcttcaggagttgagacaggagggagcttgctgtcttggccttctttgtgcttctctgagctatgaggctgagaagatcttcaagtggagttttagcaaatttagctcatctgcaaaagatgaagttaaactcctctacttatgtgccacctacaaagcactagagactgtaggagaaaagaaagccttttcatctgtaatgcaggtaagaatgaagggggaaaaatgcatgatgtacttgggaagaaaattgtcccttaacacatgtccttggaggggagcttgaagaagggaaacatagaataggggttatctactgataggaaatatgttttaaaaattcctctttctcagtttgagtaaaggatacactgttcaaggattagtgctacatacatatatgcatatatgtggagaaagagggagagatttcttctaagaaattggcttacacgccgggtgcggtggctcacgtctgttatcccagcactttgggaggccgaggcaggcggatcatgaggtcaggagatcgagaccatcctggctaacatagtgaaaccccatatctact

SEQ ID NO: 277856 - DNA, 639 bp, Homo sapiens
ggctcaaagaatacctagaatgagatttttagccaaaaactaattcaggagtggcaaaagcttccgtcttcatttatacctacatataactagagcatatgtgctagaatttatttttccccaacagctttctgagttgatttaagagattatttccttaatttgttgtctattgggtttaatgttggctttttgaaataattaggtaaaacccatttttatattcagagtcatgaatattctcatgggccacagttctctttctaaaagcctaaaaatctattctaaaatgaattgattgaaatattttagagttttttgtttttttttaaacaatgtactacttattaagaatgctgtgaattcacatctaggacctcagccatgtggcctctggggaatcagtggatgaagacgtccctcctccatcagtgtcatcaccaaagctggctgcgcttctccgggtatttagtactgtgctgaggagcattggggaacgcttcagcccaattcgggtcctccaattactgaggcatacgtaacagttgtaagtgcttttgggcatttgaagtgtcattcaaaaataaaattgttttacattgtaaatgattctctttaccaggtgaactgttattaatc

SEQ ID NO: 277857 - DNA, 1454 bp, Homo sapiens
  misc_feature (1324)..(1324): n is a, c, g, or t
gtgtagaagtccgaccgcggaaccaggactgctgtccagtcggcgagcgcgtaccattcagcatcggctccgccgagtcccaccttcctcaggctctgattggctgacacatggcaagcgcgaaaagcctggaccgctggaaacccggctgcttgagggcggaagtactgcgttgacgtacgccttagtaagggcggaagtgagttttccagcgaagtggctcctgtaaggcagcaaggtagcgtggccggcgcccgagctggggttgtgtccctgctgggctgccgttccagctggactgccgccatggaactcagcgccgaatacctccgcgagaagctgcagcgggacctggaggcggagcatgtggaggtggaggacacgaccctcaaccgttgctcctgtagcttccgagtcctggtggtgtcggccaagttcgaggggaaaccgctgcttcagagacacaggttctgtacagagtaatgagatgtgtgacggctgcaaaccaggtgtttttttctgaggctgtgttgacagctgctaatgagtgtgttggtgttttgctcggcagcttggatcctagcatgactatacattgtgacatggtcattacatatggattagaccaactggagaattgccagacttgtggtaccaattatatcatctcagtcttgaatttactcacgctgattgttgaacagataaatacgaaactgccatcatcatttgtagaaaaactgtttataccatcatctaaactactattcttgcgttatcataaagaaaaagaggttgttgctgtagcccatgctgtttatcaagcaatgctcagcttgaagaatattcctgttttggagactgcctataagttaatattgggagaaatgacttgtgccctaaacaacctcctgcacagtctgcaacttcctgaggcctgttctgaaataaaacatgaggcttttaagaatcatgtgttcaatgtagacaatgcaaaatttgtagttaaatttgacctcagtgccctgactacaattggaaatgccaaaaactcgagtctttaattgtaatgactttgttttatccacagttaagccttttctcattacatatttatgtatttcactgtcatgtcaacatgtctgcagaatcactgtatgtaacaaacagccatatttaagacatgcctggataaataaaattggtaggaatgttttcttgccattatatttaacgtttcttctttttccttgacaaatcttgataagtttttttatattagttttattttctagaaaacgtcttatgaatttctcccatttgntctagcatgcttatagaaaatgtcagtgtttcttacagctcaaatttgtatagttgttttaaaatgcggtctcttcttcttcccctggtacttttttctttcgctaggggaggtccgaagggcctaattt

SEQ ID NO: 277858 - DNA, 1231 bp, Homo sapiens
gtgtagaagtccgaccgcggaaccaggactgctgtccagtcggcgagcgcgtaccattcagcatcggctccgccgagtcccaccttcctcaggctctgattggctgacacatggcaagcgcgaaaagcctggaccgctggaaacccggctgcttgagggcggaagtactgcgttgacgtacgccttagtaagggcggaagtgagttttccagcgaagtggctcctgtaaggcagcaaggtagcgtggccggcgcccgagctggggttgtgtccctgctgggctgccgttccagctggactgccgccatggaactcagcgccgaatacctccgcgagaagctgcagcgggacctggaggcggagcatgtggaggtggaggacacgaccctcaaccgttgctcctgtagcttccgagtcctggtggtgtcggccaagttcgaggggaaaccgctgcttcagagacacaggttctgtacagagtaatgagatgtgtgacggctgcaaaccaggtgtttttttctgaggctgtgttgacagctgctaatgagtgtgttggtgttttgctcggcagcttggatcctagcatgactatacattgtgacatggtcattacatatggattagaccaactggagaattgccagacttgtggtaccaattatatcatctcagtcttgaatttactcacgctgattgttgaacagataaatacgaaactgccatcatcatttgtagaaaaactgtttataccatcatctaaactactattcttgcgttatcataaagaaaaagaggttgttgctgtagcccatgctgtttatcaagcaatgctcagcttgaagaatattcctgttttggagactgcctataagttaatattgggagaaatgacttgtgccctaaacaacctcctgcacagtctgcaacttcctgaggcctgttctgaaataaaacatgaggcttttaagaatcatgtgttcaatgtagacaatgcaaaatttgtagttaaatttgacctcagtgccctgactacaattggaaatgccaaaaactcgagtctttaattgtaatgactttgttttatccacagttaagccttttctcattacatatttatgtatttcactgtcatgtcaacatgtctgcagaatcactgtatgtaacaaacagccatatttaagacatgcctggataaataaaattggtaggaatgttttcttgccattatatt

SEQ ID NO: 277859 - DNA, 2504 bp, Homo sapiens
gtgtcggcagcggccggttcgggcggcgactcgcgcttctctgggcggcggcgcttggccatgtcgtgtcggggaaggtaatgagccgcagagccccggggtctcggctgagcagcggcggcaccaactattcgcggagctggaatgactggcaacccagaactgatagtgcatcagctgacccaggtaatttaaaatattcttcatccagagatagaggtggttcttcctcttacggactgcaaccttcaaattcagctgtggtgtctcggcaaaggcacgatgataccagagtccacgctgacatacagaatgacgaaaagggtggctacagtgtcaatggaggatctggggaaaatacttatggtcggaagtcgttggggcaagagctgagggttaacaatgtgaccagccctgagttcaccagtgttcagcatggcagtcgtgctttagccaccaaagacatgaggaaatcacaggagagatcgatgtcttattgtgatgagtctcgactgtcaaatcttcttcggaggatcacccgggaagacgacagagactgaagattggtcactgtaaagcagttgaaagaatttattcagcaaccagaaaataagctggtactagttaaacaattggataatatcttggctgctgtacatgatgtgcttaatgaaagtagcaaattgcttcaggagttgagacaggagggagcttgctgtcttggccttctttgtgcttctctgagctatgaggctgagaagatcttcaagtggagttttagcaaatttagctcatctgcaaaagatgaagttaaactcctctacttatgtgccacctacaaagcactagagactgtaggagaaaagaaagccttttcatctgtaatgcagcttgtaatgaccagcctgcagtcaattcttgaaaatgtggatacaccagaattgctttgcaaatgtgttaagtgcattcttttggtggctcgatgttaccctcatattttcagcgctaattttagggtgagttcctcattccgttgttcagatcatggggtgagggggatggttgtgtgtgtgaggaactgaggaatcagatggaaaacaatgcctctgctcctttgaatataatcagtgatatttgaggttccagggttaaatgccgcatttttctttctgacgttcgtaccttaaaatatttgaagaaaataaactatttcattgttgtcagaaatgtagttcttttattttcctgcccctctcccctttctaagtttctagaatgtcaagtaggtagaacatagatgctccttttaggatcttttgctgtgaaatggtccacaggtgaatggcagtaatatcttaaaatgattggccccctctctctttgtttccatcaaggatacagttgatatattagttggatggcatagagatcatactcagaaaccttcgctcacgcagcaggtatctgggtggttgcagagtttggagccattttgggtagctgatcttgcatttcctacgactcttcttggtcagtttctagaagacatggaagcatatgctgaggacctcagccatgtggcctctggggaatcagtggatgaagacgtccctcctccatcagtgtcatcaccaaagctggctgcgcttctccgggtatttagtactgtgctgaggagcattggggaacgcttcagcccaattcgggtcctccaattactgaggcatacgtaacagttaggttctgtacagagtaatgagatgtgtgacggctgcaaaccaggtgtttttttctgaggctgtgttgacagctgctaatgagtgtgttggtgttttgctcggcagcttggatcctagcatgactatacattgtgacatggtcattacatatggattagaccaactggagaattgccagacttgtggtaccaattatatcatctcagtcttgaatttactcacgctgattgttgaacagataaatacgaaactgccatcatcatttgtagaaaaactgtttataccatcatctaaactactattcttgcgttatcataaagaaaaagaggttgttgctgtagcccatgctgtttatcaagcaatgctcagcttgaagaatattcctgttttggagactgcctataagttaatattgggagaaatgacttgtgccctaaacaacctcctgcacagtctgcaacttcctgaggcctgttctgaaataaaacatgaggcttttaagaatcatgtgttcaatgtagacaatgcaaaatttgtagttaaatttgacctcagtgccctgactacaattggaaatgccaaaaactcgagtctttaattgtaatgactttgttttatccacagttaagccttttctcattacatatttatgtatttcactgtcatgtcaacatgtctgcagaatcactgtatgtaacaaacagccatatttaagacatgcctggataaataaaattggtaggaatgttttcttgccattatatt

SEQ ID NO: 277860 - DNA, 1990 bp, Homo sapiens
  misc_feature (1324)..(1324): n is a, c, g, or t
gtgtagaagtccgaccgcggaaccaggactgctgtccagtcggcgagcgcgtaccattcagcatcggctccgccgagtcccaccttcctcaggctctgattggctgacacatggcaagcgcgaaaagcctggaccgctggaaacccggctgcttgagggcggaagtactgcgttgacgtacgccttagtaagggcggaagtgagttttccagcgaagtggctcctgtaaggcagcaaggtagcgtggccggcgcccgagctggggttgtgtccctgctgggctgccgttccagctggactgccgccatggaactcagcgccgaatacctccgcgagaagctgcagcgggacctggaggcggagcatgtggaggtggaggacacgaccctcaaccgttgctcctgtagcttccgagtcctggtggtgtcggccaagttcgaggggaaaccgctgcttcagagacacaggttctgtacagagtaatgagatgtgtgacggctgcaaaccaggtgtttttttctgaggctgtgttgacagctgctaatgagtgtgttggtgttttgctcggcagcttggatcctagcatgactatacattgtgacatggtcattacatatggattagaccaactggagaattgccagacttgtggtaccaattatatcatctcagtcttgaatttactcacgctgattgttgaacagataaatacgaaactgccatcatcatttgtagaaaaactgtttataccatcatctaaactactattcttgcgttatcataaagaaaaagaggttgttgctgtagcccatgctgtttatcaagcaatgctcagcttgaagaatattcctgttttggagactgcctataagttaatattgggagaaatgacttgtgccctaaacaacctcctgcacagtctgcaacttcctgaggcctgttctgaaataaaacatgaggcttttaagaatcatgtgttcaatgtagacaatgcaaaatttgtagttaaatttgacctcagtgccctgactacaattggaaatgccaaaaactcgagtctttaattgtaatgactttgttttatccacagttaagccttttctcattacatatttatgtatttcactgtcatgtcaacatgtctgcagaatcactgtatgtaacaaacagccatatttaagacatgcctggataaataaaattggtaggaatgttttcttgccattatatttaacgtttcttctttttccttgacaaatcttgataagtttttttatattagttttattttctagaaaacgtcttatgaatttctcccatttgntctagcatgcttatagaaaatgtcagtgtttcttacagctcaaatttgtatagttgttttaaaatgcggtctcttcttcttcccctggtacttttttctttctgtctactgaagttagttcttatacatggtcttatattttggctgtctttttttccctaggaacattcatacaggttgaatattccttatctgaaatacttgggactggaagtgtttttgattttggagtttggaatacttttttttttttggagatagtgttttactcttgttgcagtgagctgagatcacaccaccgcactccagcctgggctacagaaccagactctgtctcaaaagaaaaaaaaaaaaaagaaagaaacaaagaaagaaagtaatggatgtaattagggaataaagtttttaggaggaaaaaggtaaaatttgatgtttgcgcttcagtgtgctccatgttgtttgattggattgccttgtataattccatagctgcttcgcttattaccagttacagcttatgtttgaagtcacaataaactcttcttcaaacatgaaagcttgatttttgaggaaaattattcacattatttgcagattcaaagatgtttatgtcctgtactctagaaataaggagaaagtgggtggggctggggcagtcaggtggaa

SEQ ID NO: 277861 - DNA, 1210 bp, Homo sapiens
gtgtagaagtccgaccgcggaaccaggactgctgtccagtcggcgagcgcgtaccattcagcatcggctccgccgagtcccaccttcctcaggctctgattggctgacacatggcaagcgcgaaaagcctggaccgctggaaacccggctgcttgagggcggaagtactgcgttgacgtacgccttagtaagggcggaagtgagttttccagcgaagtggctcctgtaaggcagcaaggtagcgtggccggcgcccgagctggggttgtgtccctgctgggctgccgttccagctggactgccgccatggaactcagcgccgaatacctccgcgagaagctgcagcgggacctggaggcggagcatgtggaggtggaggacacgaccctcaaccgttgctcctgtagcttccgagtcctggtggtgtcggccaagttcgaggggaaaccgctgcttcagagacacaggctggtgaacgcgtgcctagcagaagagctcccgcacatccatgcctttgaacagaaaaccctgaccccagaccagtgggcaccttggatcctagcatgactatacattgtgacatggtcattacatatggattagaccaactggagaattgccagacttgtggtaccaattatatcatctcagtcttgaatttactcacgctgattgttgaacagataaatacgaaactgccatcatcatttgtagaaaaactgtttataccatcatctaaactactattcttgcgttatcataaagaaaaagaggttgttgctgtagcccatgctgtttatcaagcaatgctcagcttgaagaatattcctgttttggagactgcctataagttaatattgggagaaatgacttgtgccctaaacaacctcctgcacagtctgcaacttcctgaggcctgttctgaaataaaacatgaggcttttaagaatcatgtgttcaatgtagacaatgcaaaatttgtagttaaatttgacctcagtgccctgactacaattggaaatgccaaaaactcgagtctttaattgtaatgactttgttttatccacagttaagccttttctcattacatatttatgtatttcactgtcatgtcaacatgtctgcagaatcactgtatgtaacaaacagccatatttaagacatgcctggataaataaaattggtaggaatgttttcttgccattatatt

SEQ ID NO: 277862 - DNA, 1809 bp, Homo sapiens
gtgtcggcagcggccggttcgggcggcgactcgcgcttctctgggcggcggcgcttggccatgtcgtgtcggggaaggtaatgagccgcagagccccggggtctcggctgagcagcggcggcaccaactattcgcggagctggaatgactggcaacccagaactgatagtgcatcagctgacccaggtaatttaaaatattcttcatccagagatagaggtggttcttcctcttacggactgcaaccttcaaattcagctgtggtgtctcggcaaaggcacgatgataccagagtccacgctgacatacagaatgacgaaaagggtggctacagtgtcaatggaggatctggggaaaatacttatggtcggaagtcgttggggcaagagctgagggttaacaatgtgaccagccctgagttcaccagtgttcagcatggcagtcgtgctttagccaccaaagacatgaggaaatcacaggagagatcgatgtcttattgtgatgagtctcgactgtcaaatcttcttcggaggatcacccgggaagacgacagagactgaagattggtcactgtaaagcagttgaaagaatttattcagcaaccagaaaataagctggtactagttaaacaattggataatatcttggctgctgtacatgatgtgcttaatgaaagtagcaaattgcttcaggagttgagacaggagggagcttgctgtcttggccttctttgtgcttctctgagctatgaggctgagaagatcttcaagtggagttttagcaaatttagctcatctgcaaaagatgaagttaaactcctctacttatgtgccacctacaaagcactagagactgtaggagaaaagaaagccttttcatctgtaatgcagcttgtaatgaccagcctgcagtcaattcttgaaaatgtggatacaccagaattgctttgcaaatgtgttaagtgcattcttttggtggctcgatgttaccctcatattttcagcgctaattttagggtgagttcctcattccgttgttcagatcatggggtgagggggatggttgtgtgtgtgaggaactgaggaatcagatggaaaacaatgcctctgctcctttgaatataatcagtgatatttgaggttccagggttaaatgccgcatttttctttctgacgttcgtaccttaaaatatttgaagaaaataaactatttcattgttgtcagaaatgtagttcttttattttcctgcccctctcccctttctaagtttctagaatgtcaagtaggtagaacatagatgctccttttaggatcttttgctgtgaaatggtccacaggtgaatggcagtaatatcttaaaatgattggccccctctctctttgtttccatcaaggatacagttgatatattagttggatggcatagagatcatactcagaaaccttcgctcacgcagcaggtatctggtaagtcttgcagcctataccagttatttaaatactgtcggggaggagcagtggtcccccagtgaccatctatcaataccatttctttaataatgcaagaaaactaattcagagaaatgttttattgtaaatgaacatgacttgttagctaaatatatattttcagaggaaattactagtaggtgggtagagtaagtacagacaggacttacccaagttatttgtagtttgtactggtaggaaagtatatggtaagaatatattgcagtggcaataccctgaagtggacaatggaagatccaagttatttgtcacattttattgtttttctggttatttttt

SEQ ID NO: 277863 - DNA, 909 bp, Homo sapiens
gtgtagaagtccgaccgcggaaccaggactgctgtccagtcggcgagcgcgtaccattcagcatcggctccgccgagtcccaccttcctcaggctctgattggctgacacatggcaagcgcgaaaagcctggaccgctggaaacccggctgcttgagggcggaagtactgcgttgacgtacgccttagtaagggcggaagtgagttttccagcgaagtggctcctgtaaggcagcaaggtagcgtggccggcgcccgagctggggttgtgtccctgctgggctgccgttccagctggactgccgccatggaactcagcgccgaatacctccgcgagaagctgcagcgggacctggaggcggagcatgtgggagcatgtggtgagttgagccgccggacaaggggaaaagagctcggggggcgggttcggcaccattcatattcttccgctcggtaggaggtggaggacacgaccctcaaccgttgctcctgtagcttccgagtcctggtggtgtcggccaagttcgaggggaaaccgctgcttcagagacaccttggatcctagcatgactatacattgtgacatggtcattacatatggattagaccaactggagaattgccagacttgtggtaccaattatatcatctcagtcttgaatttactcacgctgattgttgaacagataaatacgaaactgccatcatcatttgtagaaaaactgtttataccatcatctaaactactattcttgcgttatcataaagaaaaagagcatgcccagctaatttttgtatttttaatggagacagggtttcaccatgttggccaggctggtctcgaactccagacctcaagtgatccacccacctcggcctcccaaagtgctgggattacaggcctgagtct

SEQ ID NO: 277864 - DNA, 740 bp, Homo sapiens
tctccctctgtggcccaggctggagtgcagtggctctatctaggctcactgcaagctccgcctctcgggttcacaccattctcctgcctcagcctcccaagtagctgggaccacaggtacccgccaccacgcccgactaattttttgtatttttttagtagagacagggtttcaccatgttagccaagatggtctcgatctcctgaccttgtgatctgcctgcctcggcctcccaaagtgctaggatcacaggcatgaaccaccacgcccagccacttatttcattttttttaattgcaagaaacatatgaaaccatcagaggatttcaagcaggaaaaagaggtaaggccccattgttggtttttgagaagattgttccctgtgatgtgaagaagatgggtcagaaggagccaaaaggggacacagggagatgagctcaaggcccccagtgatagtcccaggggacagttgatgggggcttacattagcatgcccagctgtgagaaggaatggaaatgggtgggcataagagagttaagtatggagaataaaggcgactcataaatgcccttgatatcctcctagtgcaatgacatgaaggtgtatatctgtttccagaatggaagctgacttttctacgttgcctctccactcatgccagaagccatcctacccaattcctcctttacatactcagggttcttctgtccttcactttgttcagaggttccccaggaac

SEQ ID NO: 277865 - DNA, 475 bp, Homo sapiens
tctccctctgtggcccaggctggagtgcagtggctctatctaggctcactgcaagctccgcctctcgggttcacaccattctcctgcctcagcctcccaagtagctgggaccacaggtacccgccaccacgcccgactaattttttgtatttttttagtagagacagggtttcaccatgttagccaagatggtctcgatctcctgaccttgtgatctgcctgcctcggcctcccaaagtgctaggatcacaggcatgaaccaccacgcccagccacttatttcattttttttaattgcaagaaacatatgaaaccatcagaggatttcaagcaggaaaaagagaagaaaagactgaggcttagaaggccaaagtaatttgcacaaagaatgtatggtggagccagcagtcttactctgcaactgactgacttatttgataagctggatctggccatctgaatttaactggaccat

SEQ ID NO: 277866 - DNA, 621 bp, Homo sapiens
ttctgtccttcactttgttcagaggttccccaggaactttgatccttgacttggagagccttatatatttgttcatagattaacatgattaataagtcagtacattctccagtgaccacaaacaccgggtctataatgtgctctggtcacgataaaattctgggctaaaaagtcatcaaagaagtaccttgtctactgtaactcatgccaacaggacaactaagagattagataataatcattatgattaacacctactgagtacttatgaatataccaggttttctagtttgatgatgaatgtaaacctcacagaactcttatgtcctataatttatctcaattttacagaagaaaagactgaggcttagaaggccaaagtaatttgcacaaagaatgtatggtggagccagcagtcttactctgcaactgactgacttatttgataaggtaatacacatctcacaagcagaagctttatcttctatgaaggaatctttggctccaagccccatgcaccagttaaaggcattgctgagatatcccacagtctcagtgatagccatatttgtcaaactgattattgagattctgattcccttagtgaggggagcatttaat

SEQ ID NO: 277867 - DNA, 1590 bp, Homo sapiens
cggagtgggctgggtggggtggggtgtctctggtctggcaggggtcttaccaggggtcctcttgccaggacgcccagcccaactcgggtctgctgcaggcctcggtcatcaccctctacaccatgtttgtcacctggtcagccctatccagtatccctggtaagtatgggcccaggctcaaggaggcctggcctcgttcctgggtcagtatcagtctactgtggggctggggaccctcacaggtgacagggacatccctgctccagcccattctgagactcagtcctcccatgagatgggagggccccgtctgttcctgagttgtctctctgcccttgtgactgctgagcgctctgttgctgggacttgagtggttggctgtgtatctgtctgtctattaggggtggctctctagccatcctcagggccacttggctacctaggcctggcctgcatgggctgagggtgattgtgctcccatctccagaacagaaatgcaacccccatttgccaacccagctgggcaacgagacagttgtggcaggccccgagggctatgagacccagtggtgggatgccccgagcattgtgggcctcatcatcttcctcctgtgcaccctcttcatcaggtatggccaggtctggattctggggaaggatcgtgattgagggccctgagccagagtgaggggagggtgtgggagccaggataccaaactggaacgtgctcttcacattcaatatatccaggtcttgcattgtgcgggaggggaaactgagtccctcagagggcatggcatgagtgggcaacagaggcaggcgtgaccttgcctcctggctcacagccctttcctgcatactgggccagttcagttgggtgcagacggctgtggggtcagggaaggagcatggactggggtcagtgggtccagggtctgtttctcccctgctgtgcggcttggggtaagtggcttaacctttctgagctcctgtttcctcctcagtaagaggatgacaacctccactgtagtggatgtggctgtgaccccacactctcccccgagagaaggcagctcatgctgaagttcacatagaggttcttttcaaaggggcatcttagtaggtgcttatccatgtggactcaaatgcctgcatttgagcctggcattgccacttactagctatgtgatcctgggcaagtcacttagcctctttgggcctccatttccttgtctgtaaaatagagataaaaatagtaccttcctcattggattgttgaagggctatagatgaatcagtatgtgtaaaacacttagaaaggggccaggcatggtggctcacacctgtagcccccagcactttgggaggccgaggtgggaggatctcttgggcccaggagattgagaccagcctgggcaacatagtaagacgctgtctctttttaaaaattaacaaaacaaaacaaaaacacttagaaaggaacttggcaagtagtaagttatttgtaatccaaacactttgccagactgaagcaggaggattgcttgggcccaggagttcagggccagcctgggcaacatggtgtcccca

SEQ ID NO: 277868 - DNA, 465 bp, Homo sapiens
ataaatataaaagtaaagatagatataataaacaagaagagacaaaaataaaaataaaagcaccataaaacaaccaaaaaccaggctgagcccccacccctgccccagctccaggacctgcccctgagccgggccttctagtcgtagtgccttcagggtccgaggagcatcaggctcctgcagagccccatccccccgccacacccacacggtggagctgcctcttccttcccctcctccctgttgcccatactcagcatctcggatgaaagggctcccttgtcctcaggctccacgggagcggggctgctggagagagcggggaactcccaccacagtggggcatccggcactgaagccctggtgttcctggtcacgtcccccaggggaccctgcccccttcctggacttcgtgccttactgagtctctaagactttttctaataaacaagccagtgcgtgtac

SEQ ID NO: 277869 - DNA, 623 bp, Homo sapiens
taaggtcaggagctccagggtcccaagttcagaggctaggattgaggtcccagaattaggatcacaaggttggagaccaggagtcaggtcatgatctcatggactaacactgggctcaagatgggaatcgaggtcaggagctatgtccacggtcacaaggccgggtgttaaaaatgtcagagatggactggagttacagggtaagagccagagttgaagtcaggggtcataactgggacataaggccaggggccaagatggaagtcaccagactgggcaccaggctcatggggaagatggtgtgttccaggcccggtgagacccggaagatgatcagcacgtggaccgccgtgtgggtgaagatctgtgccagctgggcagggctgctcctctacctgtggaccctggtagccccactcctcctgcgcaaccgcgacttcagctgaggcagcctcacagcctgccatctggtgagagcggggaactcccaccacagtggggcatccggcactgaagccctggtgttcctggtcacgtcccccaggggaccctgcccccttcctggacttcgtgccttactgagtctctaagactttttctaataaacaagccagtgcgtgtac

SEQ ID NO: 277870 - DNA, 1910 bp, Homo sapiens
cggatcccgaggtccgcgccccgccgcgccggcgccgggcgccgaagccgggagccgccgccatgggggcctgcctgggagcctgctccctgctcagctgcgcgtcctgcctctgcggctctgccccctgcatcctgtgcagctgctgccccgccagccgcaactccaccgtgagccgcctcatcttcacgttcttcctcttcctgggggtgctggtgtccatcattatgctgagcccgggcgtggagagtcagctctacaagctgccctgggtgtgtgaggagggggccgggatccccaccgtcctgcagggccacatcgactgtggctccctgcttggctaccgcgctgtctaccgcatgtgcttcgccacggcggccttcttcttctttttcaccctgctcatgctctgcgtgagcagcagccgggacccccgggctgccatccagaatgggttttggttctttaagttcctgatcctggtgggcctcaccgtgggtgccttctacatccctgacggctccttcaccaacatctggttctacttcggcgtcgtgggctccttcctcttcatcctcatccagctggtgctgctcatcgactttgcgcactcctggaaccagcggtggctgggcaaggccgaggagtgcgattcccgtgcctggtacgcaggcctcttcttcttcactctcctcttctacttgctgtcgatcgcggccgtggcgctgatgttcatgtactacactgagcccagcggctgccacgagggcaaggtcttcatcagcctcaacctcaccttctgtgtctgcgtgtccatcgctgctgtcctgcccaaggtccaggacgcccagcccaactcgggtctgctgcaggcctcggtcatcaccctctacaccatgtttgtcacctggtcagccctatccagtatccctgaacagaaatgcaacccccatttgccaacccagctgggcaacgagacagttgtggcaggccccgagggctatgagacccagtggtgggatgccccgagcattgtgggcctcatcatcttcctcctgtgcaccctcttcatcagtctgcgctcctcagaccaccggcaggtgaacagcctgatgcagaccgaggagtgcccacctatgctagacgccacacagcagcagcagcagcaggtggcagcctgtgagggccgggcctttgacaacgagcaggacggcgtcacctacagctactccttcttccacttctgcctggtgctggcctcactgcacgtcatgatgacgctcaccaactggtacaagcccggtgagacccggaagatgatcagcacgtggaccgccgtgtgggtgaagatctgtgccagctgggcagggctgctcctctacctgtggaccctggtagccccactcctcctgcgcaaccgcgacttcagctgaggcagcctcacagcctgccatctggtgcctcctgccacctggtgcctctcggctcggtgacagccaacctgccccctccccacaccaatcagccaggctgagcccccacccctgccccagctccaggacctgcccctgagccgggccttctagtcgtagtgccttcagggtccgaggagcatcaggctcctgcagagccccatccccccgccacacccacacggtggagctgcctcttccttcccctcctccctgttgcccatactcagcatctcggatgaaagggctcccttgtcctcaggctccacgggagcggggctgctggagagagcggggaactcccaccacagtggggcatccggcactgaagccctggtgttcctggtcacgtcccccaggggaccctgcccccttcctggacttcgtgccttactgagtctctaagactttttctaataaacaagccagtgcgtgtac

SEQ ID NO: 277871 - DNA, 2103 bp, Homo sapiens
aggctaaggtacgaggctggtgttaatttggccgaggccgcgccggcgccgggcgccgaagccgggagccgccgccatgggggcctgcctgggagcctgctccctgctcagctgcgcgtcctgcctctgcggctctgccccctgcatcctgtgcagctgctgccccgccagccgcaactccaccgtgagccgcctcatcttcacgttcttcctcttcctgggggtgctggtgtccatcattatgctgagcccgggcgtggagagtcagctctacaagctgccctgggtgtgtgaggagggggccgggatccccaccgtcctgcagggccacatcgactgtggctccctgcttggctaccgcgctgtctaccgcatgtgcttcgccacggcggccttcttcttctttttcaccctgctcatgctctgcgtgagcagcagccgggacccccgggctgccatccagaatgggttttggttctttaagttcctgatcctggtgggcctcaccgtgggtgccttctacatccctgacggctccttcaccaacatctggttctacttcggcgtcgtgggctccttcctcttcatcctcatccagctggtgctgctcatcgactttgcgcactcctggaaccagcggtggctgggcaaggccgaggagtgcgattcccgtgcctggtacgcaggcctcttcttcttcactctcctcttctacttgctgtcgatcgcggccgtggcgctgatgttcatgtactacactgagcccagcggctgccacgagggcaaggtcttcatcagcctcaacctcaccttctgtgtctgcgtgtccatcgctgctgtcctgcccaaggtccaggacgcccagcccaactcgggtctgctgcaggcctcggtcatcaccctctacaccatgtttgtcacctggtcagccctatccagtatccctgaacagaaatgcaacccccatttgccaacccagctgggcaacgagacagttgtggcaggccccgagggctatgagacccagtggtgggatgccccgagcattgtgggcctcatcatcttcctcctgtgcaccctcttcatcagtctgcgctcctcagaccaccggcaggtgaacagcctgatgcagaccgaggagtgcccacctatgctagacgccacacagcagcagcagcagcaggtggcagcctgtgagggccgggcctttgacaacgagcaggacggcgtcacctacagctactccttcttccacttctgcctggtgctggcctcactgcacgtcatgatgacgctcaccaactggtacaagcccggtgagacccggaagatgatcagcacgtggaccgccgtgtgggtgaagatctgtgccagctgggcagggctgctcctctacctgtggaccctggtagccccactcctcctgcgcaaccgcgacttcagctgaggcagcctcacagcctgccatctggtgcctcctgccacctggtgcctctcggctcggtgacagccaacctgccccctccccacaccaatcagccaggctgagcccccacccctgccccagctccaggacctgcccctgagccgggccttctagtcgtagtgccttcagggtccgaggagcatcaggctcctgcagagccccatccccccgccacacccacacggtggagctgcctcttccttcccctcctccctgttgcccatactcagcatctcggatgaaagggctcccttgtcctcaggctccacgggagcggggctgctggagagagcggggaactcccaccacagtggggcatccggcactgaagccctggtgttcctggtcacgtcccccaggggaccctgcccccttcctggacttcgtgccttactgagtctctaagactttttctaataaacaagccagtgcgtgtacaaaaaaaaaaaaaaaaaacttgcggggcctatatttggcggggggggagaagacggggtttgaagttgcgcaattggcacattagcttgttctcttgaacccggttttttgtccaacggtgggaaattctggcgggcccccataagggagcggattaatttcggaaagcggttactgtt

SEQ ID NO: 277872 - DNA, 2040 bp, Homo sapiens
ccacagtggacctgatttccatcggttgcacctggtgaggcacaggccctgctgggctggcctgggggtggagatgttgaggggcagcctgccagccctgtgtgccttggtcaccccatctggcagttgacagtaacagggcctttctcacaatgctgttgggagatgaggcacagttcctggcatatcgtgagtgctccttgtgggaattattgctaacatcaaggaaaggcgtcctgcctctgcggctctgccccctgcatcctgtgcagctgctgccccgccagccgcaactccaccgtgagccgcctcatcttcacgttcttcctcttcctgggggtgctggtgtccatcattatgctgagcccgggcgtggagagtcagctctacaagctgccctgggtgtgtgaggagggggccgggatccccaccgtcctgcagggccacatcgactgtggctccctgcttggctaccgcgctgtctaccgcatgtgcttcgccacggcggccttcttcttctttttcaccctgctcatgctctgcgtgagcagcagccgggacccccgggctgccatccagaatgggttttggttctttaagttcctgatcctggtgggcctcaccgtgggtgccttctacatccctgacggctccttcaccaacatctggttctacttcggcgtcgtgggctccttcctcttcatcctcatccagctggtgctgctcatcgactttgcgcactcctggaaccagcggtggctgggcaaggccgaggagtgcgattcccgtgcctggtacgcaggcctcttcttcttcactctcctcttctacttgctgtcgatcgcggccgtggcgctgatgttcatgtactacactgagcccagcggctgccacgagggcaaggtcttcatcagcctcaacctcaccttctgtgtctgcgtgtccatcgctgctgtcctgcccaaggtccaggacgcccagcccaactcgggtctgctgcaggcctcggtcatcaccctctacaccatgtttgtcacctggtcagccctatccagtatccctgaacagaaatgcaacccccatttgccaacccagctgggcaacgagacagttgtggcaggccccgagggctatgagacccagtggtgggatgccccgagcattgtgggcctcatcatcttcctcctgtgcaccctcttcatcagtctgcgctcctcagaccaccggcaggtgaacagcctgatgcagaccgaggagtgcccacctatgctagacgccacacagcagcagcagcagcaggtggcagcctgtgagggccgggcctttgacaacgagcaggacggcgtcacctacagctactccttcttccacttctgcctggtgctggcctcactgcacgtcatgatgacgctcaccaactggtacaagcccggtgagacccggaagatgatcagcacgtggaccgccgtgtgggtgaagatctgtgccagctgggcagggctgctcctctacctgtggaccctggtagccccactcctcctgcgcaaccgcgacttcagctgaggcagcctcacagcctgccatctggtgcctcctgccacctggtgcctctcggctcggtgacagccaacctgccccctccccacaccaatcagccaggctgagcccccacccctgccccagctccaggacctgcccctgagccgggccttctagtcgtagtgccttcagggtccgaggagcatcaggctcctgcagagccccatccccccgccacacccacacggtggagctgcctcttccttcccctcctccctgttgcccatactcagcatctcggatgaaagggctcccttgtcctcaggctccacgggagcggggctgctggagagagcggggaactcccaccacagtggggcatccggcactgaagccctggtgttcctggtcacgtcccccaggggaccctgcccccttcctggacttcgtgccttactgagtctctaagactttttctaataaacaagccagtgcgtgtac

SEQ ID NO: 277873 - DNA, 1963 bp, Homo sapiens
  misc_feature (244)..(245): n is a, c, g, or t
aggctaaggtacgaggctggtgttaatttggccgaggccgcgccggcgccgggcgccgaagccgggagccgccgccatgggggcctgcctgggagcctgctccctgctcagctgcgcgtcctgcctctgcggctctgccccctgcatcctgtgcagctgctgccccgccagccgcaactccaccgtgagccgcctcatcttcacgttcttcctcttcctgggggtgcctaggtgttcccatccnnattattgcctgatgcccgctgtggcgtttgggaaggaggtcgaaggccttctttaacctagatggctttggctgccctgggtgtgtgaggagggggccgggatccccaccgtcctgcagggccacatcgactgtggctccctgcttggctaccgcgctgtctaccgcatgtgcttcgccacggcggccttcttcttctttttcaccctgctcatgctctgcgtgagcagcagccgggacccccgggctgccatccagaatgggttttggttctttaagttcctgatcctggtgggcctcaccgtgggtgccttctacatccctgacggctccttcaccaacatctggttctacttcggcgtcgtgggctccttcctcttcatcctcatccagctggtgctgctcatcgactttgcgcactcctggaaccagcggtggctgggcaaggccgaggagtgcgattcccgtgcctggtacgcaggcctcttcttcttcactctcctcttctacttgctgtcgatcgcggccgtggcgctgatgttcatgtactacactgagcccagcggctgccacgagggcaaggtcttcatcagcctcaacctcaccttctgtgtctgcgtgtccatcgctgctgtcctgcccaaggtccaggacgcccagcccaactcgggtctgctgcaggcctcggtcatcaccctctacaccatgtttgtcacctggtcagccctatccagtatccctgaacagaaatgcaacccccatttgccaacccagctgggcaacgagacagttgtggcaggccccgagggctatgagacccagtggtgggatgccccgagcattgtgggcctcatcatcttcctcctgtgcaccctcttcatcagtctgcgctcctcagaccaccggcaggtgaacagcctgatgcagaccgaggagtgcccacctatgctagacgccacacagcagcagcagcagcaggtggcagcctgtgagggccgggcctttgacaacgagcaggacggcgtcacctacagctactccttcttccacttctgcctggtgctggcctcactgcacgtcatgatgacgctcaccaactggtacaagcccggtgagacccggaagatgatcagcacgtggaccgccgtgtgggtgaagatctgtgccagctgggcagggctgctcctctacctgtggaccctggtagccccactcctcctgcgcaaccgcgacttcagctgaggcagcctcacagcctgccatctggtgcctcctgccacctggtgcctctcggctcggtgacagccaacctgccccctccccacaccaatcagccaggctgagcccccacccctgccccagctccaggacctgcccctgagccgggccttctagtcgtagtgccttcagggtccgaggagcatcaggctcctgcagagccccatccccccgccacacccacacggtggagctgcctcttccttcccctcctccctgttgcccatactcagcatctcggatgaaagggctcccttgtcctcaggctccacgggagcggggctgctggagagagcggggaactcccaccacagtggggcatccggcactgaagccctggtgttcctggtcacgtcccccaggggaccctgcccccttcctggacttcgtgccttactgagtctctaagactttttctaataaacaagccagtgcgtgtac

SEQ ID NO: 277874 - DNA, 1381 bp, Homo sapiens
cctggtggtgctgctgtcctggtggtgctgctgtcctggtggtgctgctgtcctgctggtgctgctcatcgactttgcgcactcctggaaccagcggtggctgggcaaggccgaggagtgcgattcccgtgcctggtacgcaggcctcttcttcttcactctcctcttctacttgctgtcgatcgcggccgtggcgctgatgttcatgtactacactgagcccagcggctgccacgagggcaaggtcttcatcagcctcaacctcaccttctgtgtctgcgtgtccatcgctgctgtcctgcccaaggtccaggacgcccagcccaactcgggtctgctgcaggcctcggtcatcaccctctacaccatgtttgtcacctggtcagccctatccagtatccctgaacagaaatgcaacccccatttgccaacccagctgggcaacgagacagttgtggcaggccccgagggctatgagacccagtggtgggatgccccgagcattgtgggcctcatcatcttcctcctgtgcaccctcttcatcagtctgcgctcctcagaccaccggcaggtgaacagcctgatgcagaccgaggagtgcccacctatgctagacgccacacagcagcagcagcagcaggtggcagcctgtgagggccgggcctttgacaacgagcaggacggcgtcacctacagctactccttcttccacttctgcctggtgctggcctcactgcacgtcatgatgacgctcaccaactggtacaagcccggtgagacccggaagatgatcagcacgtggaccgccgtgtgggtgaagatctgtgccagctgggcagggctgctcctctacctgtggaccctggtagccccactcctcctgcgcaaccgcgacttcagctgaggcagcctcacagcctgccatctggtgcctcctgccacctggtgcctctcggctcggtgacagccaacctgccccctccccacaccaatcagccaggctgagcccccacccctgccccagctccaggacctgcccctgagccgggccttctagtcgtagtgccttcagggtccgaggagcatcaggctcctgcagagccccatccccccgccacacccacacggtggagctgcctcttccttcccctcctccctgttgcccatactcagcatctcggatgaaagggctcccttgtcctcaggctccacgggagcggggctgctggagagagcggggaactcccaccacagtggggcatccggcactgaagccctggtgttcctggtcacgtcccccaggggaccctgcccccttcctggacttcgtgccttactgagtctctaagactttttctaataaacaagccagtgcgtgtac

SEQ ID NO: 277875 - DNA, 1913 bp, Homo sapiens
cggatcccgaggtccgcgccccgccgcgccggcgccgggcgccgaagccgggagccgccgccatgggggcctgcctgggagcctgctccctgctcagctgcgcgtcctgcctctgcggctctgccccctgcatcctgtgcagctgctgccccgccagccgcaactccaccgtgagccgcctcatcttcacgttcttcctcttcctgggggtgctggtgtccatcattatgctgagcccgggcgtggagagtcagctctacaagctgccctgggtgtgtgaggagggggccgggatccccaccgtcctgcagggccacatcgactgtggctccctgcttggctaccgcgctgtctaccgcatgtgcttcgccacggcggccttcttcttctttttcaccctgctcatgctctgcgtgagcagcagccgggacccccgggctgccatccagaatgggttttggttctttaagttcctgatcctggtgggcctcaccgtgggtgccttctacatccctgacggctccttcaccaacatctggttctacttcggcgtcgtgggctccttcctcttcatcctcatccagctggtgctgctcatcgactttgcgcactcctggaaccagcggtggctgggcaaggccgaggagtgcgattcccgtgcctggtacgcaggcctcttcttcttcactctcctcttctacttgctgtcgatcgcggccgtggcgctgatgttcatgtactacactgagcccagcggctgccacgagggcaaggtcttcatcagcctcaacctcaccttctgtgtctgcgtgtccatcgctgctgtcctgcccaaggtccaggacgcccagcccaactcgggtctgctgcaggcctcggtcatcaccctctacaccatgtttgtcacctggtcagccctatccagtatccctgaacagaaatgcaacccccatttgccaacccagctgggcaacgagacagttgtggcaggccccgagggctatgagacccagtggtgggatgccccgagcattgtgggcctcatcatcttcctcctgtgcaccctcttcatcagtctgcgctcctcagaccaccggcaggtgaacagcctgatgcagaccgaggagtgcccacctatgctagacgccacacagcagcagcagcagcaggtggcagcctgtgagggccgggcctttgacaacgagcaggacggcgtcacctacagctactccttcttccacttctgcctggtgctggcctcactgcacgtcatgatgacgctcaccaactggtacaagcccggtgagacccggaagatgatcagcacgtggaccgccgtgtgggtgaagatctgtgccagctgggcagggctgctcctctacctgtggaccctggtagccccactcctcctgcgcaaccgcgacttcagctgaggcagcctcacagcctgccatctggtgccccccgccacacccacacggtggagctgcctcttccttcccctcctccctgttgcccatactcagcatctcggatgaaagggctcccttgtcctcaggctccacgggagcggggctgctggagagagcggggaactcccaccacagtggggcatccggcactgaagccctggtgttcctggtcacgtcccccaggggaccctgcccccttcctggacttcgtgccttactgagtctctaagactttttctaataaacaagccagtgcgtgtacaaaaaaaaaaaaaaaaaacttgcggggcctatatttggcggggggggagaagacggggtttgaagttgcgcaattggcacattagcttgttctcttgaacccggttttttgtccaacggtgggaaattctggcgggcccccataagggagcggattaatttcggaaagcggttactgtt

SEQ ID NO: 277876 - DNA, 2238 bp, Homo sapiens
cggatcccgaggtccgcgccccgccgcgccggcgccgggcgccgaagccgggagccgccgccatgggggcctgcctgggagcctgctccctgctcagctgcgcgtcctgcctctgcggctctgccccctgcatcctgtgcagctgctgccccgccagccgcaactccaccgtgagccgcctcatcttcacgttcttcctcttcctgggggtgctggtgtccatcattatgctgagcccgggcgtggagagtcagctctacaagctgccctgggtgtgtgaggagggggccgggatccccaccgtcctgcagggccacatcgactgtggctccctgcttggctaccgcgctgtctaccgcatgtgcttcgccacggcggccttcttcttctttttcaccctgctcatgctctgcgtgagcagcagccgggacccccgggctgccatccagaatgggttttggttctttaagttcctgatcctggtgggcctcaccgtgggtgccttctacatccctgacggctccttcaccaacatctggttctacttcggcgtcgtgggctccttcctcttcatcctcatccagctggtgctgctcatcgactttgcgcactcctggaaccagcggtggctgggcaaggccgaggagtgcgattcccgtgcctggtacgcaggcctcttcttcttcactctcctcttctacttgctgtcgatcgcggccgtggcgctgatgttcatgtactacactgagcccagcggctgccacgagggcaaggtcttcatcagcctcaacctcaccttctgtgtctgcgtgtccatcgctgctgtcctgcccaaggtccaggacgcccagcccaactcgggtctgctgcaggcctcggtcatcaccctctacaccatgtttgtcacctggtcagccctatccagtatccctggtaagtatgggcccaggctcaaggaggcctggcctcgttcctgggtcagtatcagtctactgtggggctggggaccctcacaggtgacagggacatccctgctccagcccattctgagactcagtcctcccatgagatgggagggccccgtctgttcctgagttgtctctctgcccttgtgactgctgagcgctctgttgctgggacttgagtggttggctgtgtatctgtctgtctattaggggtggctctctagccatcctcagggccacttggctacctaggcctggcctgcatgggctgagggtgattgtgctcccatctccagaacagaaatgcaacccccatttgccaacccagctgggcaacgagacagttgtggcaggccccgagggctatgagacccagtggtgggatgccccgagcattgtgggcctcatcatcttcctcctgtgcaccctcttcatcagtctgcgctcctcagaccaccggcaggtgaacagcctgatgcagaccgaggagtgcccacctatgctagacgccacacagcagcagcagcagcaggtggcagcctgtgagggccgggcctttgacaacgagcaggacggcgtcacctacagctactccttcttccacttctgcctggtgctggcctcactgcacgtcatgatgacgctcaccaactggtacaagcccggtgagacccggaagatgatcagcacgtggaccgccgtgtgggtgaagatctgtgccagctgggcagggctgctcctctacctgtggaccctggtagccccactcctcctgcgcaaccgcgacttcagctgaggcagcctcacagcctgccatctggtgcctcctgccacctggtgcctctcggctcggtgacagccaacctgccccctccccacaccaatcagccaggctgagcccccacccctgccccagctccaggacctgcccctgagccgggccttctagtcgtagtgccttcagggtccgaggagcatcaggctcctgcagagccccatccccccgccacacccacacggtggagctgcctcttccttcccctcctccctgttgcccatactcagcatctcggatgaaagggctcccttgtcctcaggctccacgggagcggggctgctggagagagcggggaactcccaccacagtggggcatccggcactgaagccctggtgttcctggtcacgtcccccaggggaccctgcccccttcctggacttcgtgccttactgagtctctaagactttttctaataaacaagccagtgcgtgtac

SEQ ID NO: 277877 - DNA, 1205 bp, Homo sapiens
cggatcccgaggtccgcgccccgccgcgccggcgccgggcgccgaagccgggagccgccgccatgggggcctgcctgggagcctgctccctgctcagctgcgcgtcctgcctctgcggctctgccccctgcatcctgtgcagctgctgccccgccagccgcaactccaccgtgagccgcctcatcttcacgttcttcctcttcctgggggtgctggtgtccatcattatgctgagcccgggcgtggagagtcagctctacaagctgccctgggtgtgtgaggagggggccgggatccccaccgtcctgcagggccacatcgactgtggctccctgcttggctaccgcgctgtctaccgcatgtgcttcgccacggcggccttcttcttctttttcaccctgctcatgctctgcgtgagcagcagccgggacccccgggctgccatccagaatgggttttggttctttaagttcctgatcctggtgggcctcaccgtgggtgccttctacatccctgacggctccttcaccaacatctggttctacttcggcgtcgtgggctccttcctcttcatcctcatccagctggtgctgctcatcgactttgcgcactcctggaaccagcggtggctgggcaaggccgaggagtgcgattcccgtgcctggtacgcaggcctcttcttcttcactctcctcttctacttgctgtcgatcgcggccgtggcgctgatgttcatgtactacactgagcccagcggctgccacgagggcaaggtcttcatcagcctcaacctcaccttctgtgtctgcgtgtccatcgctgctgtcctgcccaaggtccaggacgcccagcccaactcgggtctgctgcaggcctcggtcatcaccctctacaccatgtttgtcacctggtcagccctatccagtatccctgaacagaaatgcaacccccatttgccaacccagctgggcaacgagacagttgtggcaggccccgagggctatgagacccagtggtgggatgccccgagcattgtgggcctcatcatcttcctcctgtgcaccctcttcatcagtctgcgctcctcagaccaccggcaggtgaacagcctgatgcagaccgaggagtgcccacctatgctagacgccacacagcagcagcagcaccaccaggacagcagcaccaccaggacacacacatcaagt

SEQ ID NO: 277878 - DNA, 2036 bp, Homo sapiens
cggatcccgaggtccgcgccccgccgcgccggcgccgggcgccgaagccgggagccgccgccatgggggcctgcctgggagcctgctccctgctcagctgcgcgtcctgcctctgcggctctgccccctgcatcctgtgcagctgctgccccgccagccgcaactccaccgtgagccgcctcatcttcacgttcttcctcttcctgggggtgctggtgtccatcattatgctgagcccgggcgtggagagtcagctctacaagctgccctgggtgtgtgaggagggggccgggatccccaccgtcctgcagggccacatcgactgtggctccctgcttggctaccgcgctgtctaccgcatgtgcttcgccacggcggccttcttcttctttttcaccctgctcatgctctgcgtgagcagcagccgggacccccgggctgccatccagaatgggttttggttctttaagttcctgatcctggtgggcctcaccgtgggtgccttctacatccctgacggctccttcaccaacatctggttctacttcggcgtcgtgggctccttcctcttcatcctcatccagctggtgctgctcatcgactttgcgcactcctggaaccagcggtggctgggcaaggccgaggagtgcgattcccgtgcctggtacgcaggcctcttcttcttcactctcctcttctacttgctgtcgatcgcggccgtggcgctgatgttcatgtactacactgagcccagcggctgccacgagggcaaggtcttcatcagcctcaacctcaccttctgtgtctgcgtgtccatcgctgctgtcctgcccaaggtccaggacgcccagcccaactcgggtctgctgcaggcctcggtcatcaccctctacaccatgtttgtcacctggtcagccctatccagtatccctgaacagaaatgcaacccccatttgccaacccagctgggcaacgagacagttgtggcaggccccgagggctatgagacccagtggtgggatgccccgagcattgtgggcctcatcatcttcctcctgtgcaccctcttcatcaggtatggccaggtctggattctggggaaggatcgtgattgagggccctgagccagagtgaggggagggtgtgggagccaggataccaaactggaacgtgctcttcacattcaatatatccaggtcttgcattgtgcgggaggggaaactgagtccctcagagggcatggcatgagtgggcaacagaggcaggcgtgaccttgcctcctggctcacagccctttcctgcatactgggccagttcagttgggtgcagacggctgtggggtcagggaaggagcatggactggggtcagtgggtccagggtctgtttctcccctgctgtgcggcttggggtaagtggcttaacctttctgagctcctgtttcctcctcagtaagaggatgacaacctccactgtagtggatgtggctgtgaccccacactctcccccgagagaaggcagctcatgctgaagttcacatagaggttcttttcaaaggggcatcttagtaggtgcttatccatgtggactcaaatgcctgcatttgagcctggcattgccacttactagctatgtgatcctgggcaagtcacttagcctctttgggcctccatttccttgtctgtaaaatagagataaaaatagtaccttcctcattggattgttgaagggctatagatgaatcagtatgtgtaaaacacttagaaaggggccaggcatggtggctcacacctgtagcccccagcactttgggaggccgaggtgggaggatctcttgggcccaggagattgagaccagcctgggcaacatagtaagacgctgtctctttttaaaaattaacaaaacaaaacaaaaacacttagaaaggaacttggcaagtagtaagttatttgtaatccaaacactttgccagactgaagcaggaggattgcttgggcccaggagttcagggccagcctgggcaacatggtgtcccca

SEQ ID NO: 277879 - DNA, 1464 bp, Homo sapiens
cggagtgggctgggtggggtggggtgtctctggtctggcaggggtcttaccaggggtcctcttgccaggacgcccagcccaactcgggtctgctgcaggcctcggtcatcaccctctacaccatgtttgtcacctggtcagccctatccagtatccctggtaagtatgggcccaggctcaaggaggcctggcctcgttcctgggtcagtatcagtctactgtggggctggggaccctcacaggtgacagggacatccctgctccagcccattctgagactcagtcctcccatgagatgggagggccccgtctgttcctgagttgtctctctgcccttgtgactgctgagcgctctgttgctgggacttgagtggttggctgtgtatctgtctgtctattaggggtggctctctagccatcctcagggccacttggctacctaggcctggcctgcatgggctgagggtgattgtgctcccatctccagaacagaaatgcaacccccatttgccaacccagctgggcaacgagacagttgtggcaggccccgagggctatgagacccagtggtgggatgccccgagcattgtgggcctcatcatcttcctcctgtgcaccctcttcatcagtctgcgctcctcagaccaccggcaggtgaacagcctgatgcagaccgaggagtgcccacctatgctagacgccacacagcagcagcagcagcaggtggcagcctgtgagggccgggcctttgacaacgagcaggacggcgtcacctacagctactccttcttccacttctgcctggtgctggcctcactgcacgtcatgatgacgctcaccaactggtacaagcccggtgagacccggaagatgatcagcacgtggaccgccgtgtgggtgaagatctgtgccagctgggcagggctgctcctctacctgtggaccctggtagccccactcctcctgcgcaaccgcgacttcagctgaggcagcctcacagcctgccatctggtgcctcctgccacctggtgcctctcggctcggtgacagccaacctgccccctccccacaccaatcagccaggctgagcccccacccctgccccagctccaggacctgcccctgagccgggccttctagtcgtagtgccttcagggtccgaggagcatcaggctcctgcagagccccatccccccgccacacccacacggtggagctgcctcttccttcccctcctccctgttgcccatactcagcatctcggatgaaagggctcccttgtcctcaggctccacgggagcggggctgctggagagagcggggaactcccaccacagtggggcatccggcactgaagccctggtgttcctggtcacgtcccccaggggaccctgcccccttcctggacttcgtgccttactgagtctctaagactttttctaataaacaagccagtgcgtgtac

SEQ ID NO: 277880 - DNA, 1053 bp, Homo sapiens
gcaggaggcaccagatggcaggctgtgaggctgcctcagctgaagtcgcggttgcgcaggaggagtggggctaccagggtccacaggtagaggagcagccctacccagctgggcaacgagacagttgtggcaggccccgagggctatgagacccagtggtgggatgccccgagcattgtgggcctcatcatcttcctcctgtgcaccctcttcatcagtctgcgctcctcagaccaccggcaggtgaacagcctgatgcagaccgaggagtgcccacctatgctagacgccacacagcagcagcagcagcaggtggcagcctgtgagggccgggcctttgacaacgagcaggacggcgtcacctacagctactccttcttccacttctgcctggtgctggcctcactgcacgtcatgatgacgctcaccaactggtacaagcccggtgagacccggaagatgatcagcacgtggaccgccgtgtgggtgaagatctgtgccagctgggcagggctgctcctctacctgtggaccctggtagccccactcctcctgcgcaaccgcgacttcagctgaggcagcctcacagcctgccatctggtgcctcctgccacctggtgcctctcggctcggtgacagccaacctgccccctccccacaccaatcagccaggctgagcccccacccctgccccagctccaggacctgcccctgagccgggccttctagtcgtagtgccttcagggtccgaggagcatcaggctcctgcagagccccatccccccgccacacccacacggtggagctgcctcttccttcccctcctccctgttgcccatactcagcatctcggatgaaagggctcccttgtcctcaggctccacgggagcggggctgctggagagagcggggaactcccaccacagtggggcatccggcactgaagccctggtgttcctggtcacgtcccccaggggaccctgcccccttcctggacttcgtgccttactgagtctctaagactttttctaataaacaagccagtgcgtgtac

SEQ ID NO: 277881 - DNA, 1164 bp, Homo sapiens
cggatcccgaggtccgcgccccgccgcgccggcgccgggcgccgaagccgggagccgccgccatgggggcctgcctgggagcctgctccctgctcagctgcgcgtcctgcctctgcggctctgccccctgcatcctgtgcagctgctgccccgccagccgcaactccaccgtgagccgcctcatcttcacgttcttcctcttcctgggggtgctggtgtccatcattatgctgagcccgggcgtggagagtcagctctacaagctgccctgggtgtgtgaggagggggccgggatccccaccgtcctgcagggccacatcgactgtggctccctgcttggctaccgcgctgtctaccgcatgtgcttcgccacggcggccttcttcttctttttcaccctgctcatgctctgcgtgagcagcagccgggacccccgggctgccatccagaatgggttttggttctttaagttcctgatcctggtgggcctcaccgtgggtgccttctacatccctgacggctccttcaccaacatctggttctacttcggcgtcgtgggctccttcctcttcatcctcatccagctggtgctgctcatcgactttgcgcactcctggaaccagcggtggctgggcaaggccgaggagtgcgattcccgtgcctggtacgcaggcctcttcttcttcactctcctcttctacttgctgtcgatcgcggccgtggcgctgatgttcatgtactacactgagcccagcggctgccacgagggcaaggtcttcatcagcctcaacctcaccttctgtgtctgcgtgtccatcgctgctgtcctgcccaaggtccaggacgcccagcccaactcgggtctgctgcaggcctcggtcatcaccctctacaccatgtttgtcacctggtcagccctatccagtatccctgaacagaaatgcaacccccatactcagcatctcggatgaaagggctcccttgtcctcaggctccacgggagcggggctgctggagagagcggggaactcccaccacagtggggcatccggcactgaagccctggtgttcctgataactacacccaggaaaacagaccaaatcatagacttcgtgaccatacgaatctctcagaatttataaaataaaaaaacaagtgcgtgt

SEQ ID NO: 277882 - DNA, 910 bp, Homo sapiens
aaaaataatggctaggtagagcctgggtgttgaatcggccgaggtcatcttcctcctgttgcacctcttcatcagtctgcgctcctcagaccaccggcaggtgaacagcctgatgcagaccgaggagtgcccacctatgctagacgccacacagcagcagcagcagcaggtggcagcctgtgagggccgggcctttgacaacgagcaggacggcgtcacctacagctactccttcttccacttctgcctggtgctggcctcactgcacgtcatgatgacgctcaccaactggtacaagcccggtgagacccggaagatgatcagcacgtggaccgccgtgtgggtgaagatctgtgccagctgggcagggctgctcctctacctgtggaccctggtagccccactcctcctgcgcaaccgcgacttcagctgaggcagcctcacagcctgccatctggtgcctcctgccacctggtgcctctcggctcggtgacagccaacctgccccctccccacaccaatcagccaggctgagcccccacccctgccccagctccaggacctgcccctgagccgggccttctagtcgtagtgccttcagggtccgaggagcatcaggctcctgcagagccccatccccccgccacacccacacggtggagctgcctcttccttcccctcctccctgttgcccatactcagcatctcggatgaaagggctcccttgtcctcaggctccacgggagcggggctgctggagagagcggggaactcccaccacagtggggcatccggcactgaagccctggtgttcctggtcacgtcccccaggggaccctgcccccttcctggacttcgtgccttactgagtctctaagactttttctaataaacaagccagtgcgtgtac

SEQ ID NO: 277883 - DNA, 228 bp, Homo sapiens
gggggagctgtcttgccccgacccatatcctgccctctgtgcgtagctaggggctccctgagggcagggactctgttcttctcagtgtccccggtgcagggtgtagcagaaaacgcttgttgaacgagtagatgtgagagagggaccctcctcgcctcactcccctctccccacccagtctggttctacttcggcgtcgtgggctccttcctcttcatcctcatccag

SEQ ID NO: 277884 - DNA, 1924 bp, Homo sapiens
aggctaaggtacgaggctggtgttaatttggccgaggccgcgccggcgccgggcgccgaagccgggagccgccgccatgggggcctgcctgggagcctgctccctgctcagctgcgcgtcctgcctctgcggctctgccccctgcatcctgtgcagctgctgccccgccagccgcaactccaccgtgagccgcctcatcttcacgttcttcctcttcctgggggtgctggtgtccatcattatgctgagcccgggcgtggagagtcagctctacaagctgccctgggtgtgtgaggagggggccgggatccccaccgtcctgcagggccacatcgactgtggctccctgcttggctaccgcgctgtctaccgcatgtgcttcgccacggcggccttcttcttctttttcaccctgctcatgctctgcgtgagcagcagccgggacccccgggctgccatccagaatgggttttggttctttaagttcctgatcctggtgggcctcaccgtgggtgccttctacatccctgacggctccttcaccaacatctggttctacttcggcgtcgtgggctccttcctcttcatcctcatccagctggtgctgctcatcgactttgcgcactcctggaaccagcggtggctgggcaaggccgaggagtgcgattcccgtgcctggtacgcaggcctcttcttcttcactctcctcttctacttgctgtcgatcgcggccgtggcgctgatgttcatgtactacactgagcccagcggctgccacgagggcaaggtcttcatcagcctcaacctcaccttctgtgtctgcgtgtccatcgctgctgtcctgcccaaggtccaggacgcccagcccaactcgggtctgctgcaggcctcggtcatcaccctctacaccatgtttgtcacctggtcagccctatccagtatccctgaacagaaatgcaacccccatttgccaacccagctgggcaacgagacagttgtggcaggccccgagggctatgagacccagtggtgggatgccccgagcattgtgggcctcatcatcttcctcctgtgcaccctcttcatcagtctgcgctcctcagaccaccggcaggtgaacagcctgatgcagaccgaggagtgcccacctatgctagacgccacacagcagcagcagcagcaggtggcagcctgtgagggccgggcctttgacaacgagcaggacggcgtcacctacagctactccttcttccacttctgcctggtgctggcctcactgcacgtcatgatgacgctcaccaactggtacaagcccggtgagacccggaagatgatcagcacgtggaccgccgtgtgggtgaagatctgtgccagctgggcagggctgctcctctacctgtggaccctggtagccccactcctcctgcgcaaccgcgacttcagctgaggcagcctcacagcctgccatctggtgcctcctgccacctggtgcctctcggctcggtgacagccaacctgccccctccccacaccaatcagccaggctgagcccccacccctgccccagctccaggacctgcccctgagccgggccttctagtcgtagtgccttcagggtccgaggagcatcaggctcctgcagagccccatccccccgccacacccacacggtggagctgcctcttccttcccctcctccctgttgcccatactcagcatctcggatgaaagggctcccttgtcctcaggctccacgggagcggggctgctggagagagcggggaactcccaccacagtggggcatccggcactgaagccctggtgttcctggtcacgtcccccaggggaccctgcccccttcctggacttcgtgccttactgagtctctaagactttttctaataaacaagccagtgcgtgtac

SEQ ID NO: 277885 - DNA, 1928 bp, Homo sapiens
  misc_feature (32)..(32): n is a, c, g, or t
  misc_feature (40)..(40): n is a, c, g, or t
gataggctaggtggagccggtggtatatcggncgaggcgngccgcgccggcgccgggcgccgaagccgggagccgccgccatgggggcctgcctgggagcctgctccctgctcagctgcgcgtcctgcctctgcggctctgccccctgcatcctgtgcagctgctgccccgccagccgcaactccaccgtgagccgcctcatcttcacgttcttcctcttcctgggggtgctggtgtccatcattatgctgagcccgggcgtggagagtcagctctacaagctgccctgggtgtgtgaggagggggccgggatccccaccgtcctgcagggccacatcgactgtggctccctgcttggctaccgcgctgtctaccgcatgtgcttcgccacggcggccttcttcttctttttcaccctgctcatgctctgcgtgagcagcagccgggacccccgggctgccatccagaatgggttttggttctttaagttcctgatcctggtgggcctcaccgtgggtgccttctacatccctgacggctccttcaccaacatctggttctacttcggcgtcgtgggctccttcctcttcatcctcatccagctggtgctgctcatcgactttgcgcactcctggaaccagcggtggctgggcaaggccgaggagtgcgattcccgtgcctggtacgcaggcctcttcttcttcactctcctcttctacttgctgtcgatcgcggccgtggcgctgatgttcatgtactacactgagcccagcggctgccacgagggcaaggtcttcatcagcctcaacctcaccttctgtgtctgcgtgtccatcgctgctgtcctgcccaaggtccaggacgcccagcccaactcgggtctgctgcaggcctcggtcatcaccctctacaccatgtttgtcacctggtcagccctatccagtatccctgaacagaaatgcaacccccatttgccaacccagctgggcaacgagacagttgtggcaggccccgagggctatgagacccagtggtgggatgccccgagcattgtgggcctcatcatcttcctcctgtgcaccctcttcatcagtctgcgctcctcagaccaccggcaggtgaacagcctgatgcagaccgaggagtgcccacctatgctagacgccacacagcagcagcagcagcaggtggcagcctgtgagggccgggcctttgacaacgagcaggacggcgtcacctacagctactccttcttccacttctgcctggtgctggcctcactgcacgtcatgatgacgctcaccaactggtacaagcccggtgagacccggaagatgatcagcacgtggaccgccgtgtgggtgaagatctgtgccagctgggcagggctgctcctctacctgtggaccctggtagccccactcctcctgcgcaaccgcgacttcagctgaggcagcctcacagcctgccatctggtgcctcctgccacctggtgcctctcggctcggtgacagccaacctgccccctccccacaccaatcagccaggctgagcccccacccctgccccagctccaggacctgcccctgagccgggccttctagtcgtagtgccttcagggtccgaggagcatcaggctcctgcagagccccatccccccgccacacccacacggtggagctgcctcttccttcccctcctccctgttgcccatactcagcatctcggatgaaagggctcccttgtcctcaggctccacgggagcggggctgctggagagagcggggaactcccaccacagtggggcatccggcactgaagccctggtgttcctggtcacgtcccccaggggaccctgcccccttcctggacttcgtgccttactgagtctctaagactttttctaataaacaagccagtgcgtgtac

SEQ ID NO: 277886 - DNA, 1853 bp, Homo sapiens
aggctaaggtacgaggctggtgttaatttggccgaggccgcgccggcgccgggcgccgaagccgggagccgccgccatgggggcctgcctgggagcctgctccctgctcagctgcgcgtcctgcctctgcggctctgccccctgcatcctgtgcagctgctgccccgccagccgcaactccaccgtgagccgcctcatcttcacgttcttcctcttcctgggggtgctggtgtccatcattatgctgagcccgggcgtggagagtcagctctacaagctgccctgggtgtgtgaggagggggccgggatccccaccgtcctgcagggccacatcgactgtggctccctgcttggctaccgcgctgtctaccgcatgtgcttcgccacggcggccttcttcttctttttcaccctgctcatgctctgcgtgagcagcagccgggacccccgggctgccatccagaatgggttttggttctttaagttcctgatcctggtgggcctcaccgtgggtgccttctacatccctgacggctccttcaccaacatctggttctacttcggcgtcgtgggctccttcctcttcatcctcatccagctggtgctgctcatcgactttgcgcactcctggaaccagcggtggctgggcaaggccgaggagtgcgattcccgtgcctggtacgcaggcctcttcttcttcactctcctcttctacttgctgtcgatcgcggccgtggcgctgatgttcatgtactacactgagcccagcggctgccacgagggcaaggtcttcatcagcctcaacctcaccttctgtgtctgcgtgtccatcgctgctgtcctgcccaaggtccaggacgcccagcccaactcgggtctgctgcaggcctcggtcatcaccctctacaccatgtttgtcacctggtcagccctatccagtatccctgaacagaaatgcaacccccatttgccaacccagctgggcaacgagacagttgtggcaggccccgagggctatgagacccagtggtgggatgccccgagcattgtgggcctcatcatcttcctcctgtgcaccctcttcatcagtctgcgctcctcagaccaccggcaggtgaacagcctgatgcagaccgaggagtgcccacctatgctagacgccacacagcagcagcagcagcaggtggcagcctgtgagggccgggcctttgacaacgagcaggacggcgtcacctacagctactccttcttccacttctgcctggtgctggcctcactgcacgtcatgatgacgctcaccaactggtacaagcccggtgagacccggaagatgatcagcacgtggaccgccgtgtgggtgaagatctgtgccagctgggcagggctgctcctctacctgtggaccctggtagccccactcctcctgcgcaaccgcgacttcagctgaggcagcctcacagcctgccatctggtgcctcctgccacctggtgcctctcggctcggtgacagccaacctgccccctccccacaccaatcagccaggctgagcccccacccctgccccagctccaggacctgcccctgagccgggccttctagtcgtagtgccttcagggtccgaggagcatcaggctcctgcagagccccatccccccgccacacccacacggtggagctgcctcttccttcccctcctccctgttgcccatactcagcatctcggatgaaagggctcccttgtcctcaggctccacgggagcggggctgctggagagagcggggaactcccaccacagtggggcatccggcactgaagccctggtgttcctgaccaggaacaccagggtcgagc

SEQ ID NO: 277887 - DNA, 1626 bp, Homo sapiens
gcagccgcctactactactaaattcgcggccacatcgactgtggctccctgcttggctaccgcgctgtctaccgcatgtgcttcgccacggcggccttcttcttctttttcaccctgctcatgctctgcgtgagcagcagccgggacccccgggctgccatccagaatgggttttggttctttaagttcctgatcctggtgggcctcaccgtgggtgccttctacatccctgacggctccttcaccaacatctggttctacttcggcgtcgtgggctccttcctcttcatcctcatccagctggtgctgctcatcgactttgcgcactcctggaaccagcggtggctgggcaaggccgaggagtgcgattcccgtgcctggtacgcaggcctcttcttcttcactctcctcttctacttgctgtcgatcgcggccgtggcgctgatgttcatgtactacactgagcccagcggctgccacgagggcaaggtcttcatcagcctcaacctcaccttctgtgtctgcgtgtccatcgctgctgtcctgcccaaggtccaggacgcccagcccaactcgggtctgctgcaggcctcggtcatcaccctctacaccatgtttgtcacctggtcagccctatccagtatccctgaacagaaatgcaacccccatttgccaacccagctgggcaacgagacagttgtggcaggccccgagggctatgagacccagtggtgggatgccccgagcattgtgggcctcatcatcttcctcctgtgcaccctcttcatcagtctgcgctcctcagaccaccggcaggtgaacagcctgatgcagaccgaggagtgcccacctatgctagacgccacacagcagcagcagcagcaggtggcagcctgtgagggccgggcctttgacaacgagcaggacggcgtcacctacagctactccttcttccacttctgcctggtgctggcctcactgcacgtcatgatgacgctcaccaactggtacaagcccggtgagacccggaagatgatcagcacgtggaccgccgtgtgggtgaagatctgtgccagctgggcagggctgctcctctacctgtggaccctggtagccccactcctcctgcgcaaccgcgacttcagctgaggcagcctcacagcctgccatctggtgcctcctgccacctggtgcctctcggctcggtgacagccaacctgccccctccccacaccaatcagccaggctgagcccccacccctgccccagctccaggacctgcccctgagccgggccttctagtcgtagtgccttcagggtccgaggagcatcaggctcctgcagagccccatccccccgccacacccacacggtggagctgcctcttccttcccctcctccctgttgcccatactcagcatctcggatgaaagggctcccttgtcctcaggctccacgggagcggggctgctggagagagcggggaactcccaccacagtggggcatccggcactgaagccctggtgttcctggtcacgtcccccaggggaccctgcccccttcctggacttcgtgccttactgagtctctaagactttttctaataaacaagccagtgcgtgtac

SEQ ID NO: 277888 - DNA, 533 bp, Homo sapiens
aatctgcaacggtgggctgcagtggagagaggggcgtggactgccactgctgcccctcgccctaggtcacccccagctttatcaaatgtcagagcaccaggaatcctccatcatcaatgaggacacagagctgggtgatgcctacgtgttgagatcctggtccctccacacacgctctaccagctgctgcgtgatgcccgtgtccaagatcaggttgtgcagaaggaagttgttgcctggaacaggaggggaggggtgggggtgggggcatcttcttgcagctccttgcccaccctcacccccacccttaaggctccaccaggagcctcctccatgacctggccctggcccaggcccagcccttagcttgtgcctgcttatttccacacctgcccggcctctgggttcctctgggctggccccatgctgcctgggcactgcccagagccagctgccctgccaggcactcacactgcttggagtctggagtcactttctccatgagctcaataaagtttttcaggaactcggtg

SEQ ID NO: 277889 - DNA, 593 bp, Homo sapiens
cgcggggtccggcctcgaggagggggagaggcgcaaaaggctggtcttgtgggccattggtcaactatttggctggcaccgttttttaatctgactgccaacaggtggtgcaaacattcttaattggccacagttcttaccactctcccatcctttcgatgtcatttgttatatgcctggcccctgcagacatgagagttctcaatccctagataagatgtggtttgcaactcttggtgagcctagacctgccttcagaaaaaagatactggtgatcaggactcaaccagactcaccaatcacgatctctctggcacggttctggaaataacctatatgtttacaaaattttgcgggtgattctgatgtgcaataaaaattaaaactggtctaggataaggaccggtggggggcacaaacaagggaaggagcgaagggaaccctcccttttgtacatgcatgccatgtttctactcatgtgtgcacacatagggggaagcattttattccttcccagtctactgtcttcatagccacacagctagcagcatgaactctaaatgcaaagctggcctgccttgctttctgttgct

SEQ ID NO: 277890 - DNA, 568 bp, Homo sapiens
cctgttttctcatcttctttataggactatgaggcttaaatgagacagtacacaactgcctggcacaatgtctggcaaatattaagtgctagataaatggcagctcttgccccttcacactctgccaacccaagattaagggtcccagggtccagctcctggtttcctgcataggaagtccagcagtttggaatttccctggtcgccagcatcattaatataacgaatacttcctttgctctttcagacaaagatgataagtcagttgtagcatccatcaccgagagtctgcagaagaaatcaaagcacctcatgtgagctccagccaagcccaggcatcaggaggctgttatgatgtggagtttcttggcctgtcctctgcatggcccagtgtaggaagcccagtttgctctctggtgtttgttaatgtaaacattcagtgaagggatggggcaataaacgtaactcatcctttcccgttcctgagggtgatatacagcagggaccaaggggatggatgtgattgcatgatagggaatcccagacctggacccctgaaagcctagtc

SEQ ID NO: 277891 - DNA, 482 bp, Homo sapiens
cctgttttctcatcttctttataggactatgaggcttaaatgagacagtacacaactgcctggcacaatgtctggcaaatattaagtgctagataaatggcagctcttgccccttcacactctgccaacccaagattaagggtcccagggtccagctcctggtttcctgcataggaagtccagcagtttggaatttccctggtcgccagcatcattaatataacgaatacttcctttgctctttcagacaaagatgataagtcagttgtagcatccatcaccgagagtctgcagaagaaatcaaagcacctcatgtgagctccagccaagcccaggcatcaggaggctgttatgatgtggagtttcttggcctgtcctctgcatggcccagtgtaggaagcccagtttgctctctggtgtttgttaatgtaaacattcagtgaagggatggggcaataaacgtaactcatcctttcccgttc

SEQ ID NO: 277892 - DNA, 803 bp, Homo sapiens
ctcggaatgaaatcggtgacagtgagccacttgactccagggacacctggctcatcaataaggaccagatccaggacctgagcgccaagctcaagccctacgagaagaaggactggcgccacgcgccgcgcttcgtgacgcccctcaagccacacacggtgctccgcggccaggactgcaccatgacctgcgccttccttgggaacccgcggcccacagtgaccctctacaagggcgacgtcaacatcacggccaactccaagttctggtacaactccaccagcggcgtgtgcaccctcgtcatccccacctgcacgctcaaggacagcggcgattacagcgtgctggtggagaacgagctgggcaaggaccgcagcagctgcacgctcaccgtctatgacatgagagttctcaatccctagataagatgtggtttgcaactcttggtgagcctagacctgccttcagaaaaaagatactggtgatcaggactcaaccagactcaccaatcacgatctctctggcacggttctggaaataacctatatgtttacaaaattttgcgggtgattctgatgtgcaataaaaattaaaactggtctaggataaggaccggtggggggcacaaacaagggaaggagcgaagggaaccctcccttttgtacatgcatgccatgtttctactcatgtgtgcacacatagggggaagcattttattccttcccagtctactgtcttcatagccacacagctagcagcatgaactctaaatgcaaagctggcctgccttgctttctgttgct

SEQ ID NO: 277893 - DNA, 339 bp, Homo sapiens
cctgttttctcatcttctttataggactatgaggcttaaatgagacagtacacaactgcctggcacaatgtctggcaaatattaagtgctagataaatggcagctcttgccccttcacactctgccaacccaagattaagggtcccagggtccagctcctggtttcctgcataggaagtccagcagtttggaatttccctggtcgccagcatcattaatataacgaatacttcctttgctctttcagacaaagatgataagtcagttgtagcatccatcaccgagagtctgcagaagaaatcaaagcacctcatgtccccgtacatcgttagaagcttg

SEQ ID NO: 277894 - DNA, 634 bp, Homo sapiens
ctcggaatgaaatcggtgacagtgagccacttgactccagggacacctggctcatcaataaggaccagatccaggacctgagcgccaagctcaagccctacgagaagaaggactggcgccacgcgccgcgcttcgtgacgcccctcaagccacacacggtgctccgcggccaggactgcaccatgacctgcgccttccttgggaacccgcggcccacagtgaccctctacaagggcgacgtcaacatcacggccaactccaagttctggtacaactccaccagcggcgtgtgcaccctcgtcatccccacctgcacgctcaaggacagcggcgattacagcgtgctggtggagaacgagctgggcaaggaccgcagcagctgcacgctcaccgtctatgacaaagatgataagtcagttgtagcatccatcaccgagagtctgcagaagaaatcaaagcacctcatgtgagctccagccaagcccaggcatcaggaggctgttatgatgtggagtttcttggcctgtcctctgcatggcccagtgtaggaagcccagtttgctctctggtgtttgttaatgtaaacattcagtgaagggatggggcaataaacgtaactcatcctttcccgttc

SEQ ID NO: 277895 - DNA, 3015 bp, Homo sapiens
gggtaagagaagactggaagcatgtcggagtttggttaatttctgcccctggcgataaggaaaatttgcaagctctggagaggatgaatactgtaacctccaagtccaacctgtcttataataccaaattcgctattcctgacttcaaggtggggaccttggattccctggttggcctctctgatgagttggggaaactcgacacctttgctgaaagcctcataaggagaatggctcagagcgtggtggaagtcatggaggactcaaaggggaaggtccaggagcacctcctggcaaacggagttgacttaacatcctttgtgacccactttgaatgggacatggccaaatatcctgtcaagcagccgctcgtgagtgtggtggacacaatagccaagcaactggcgcagatcgagatggacctgaagtcccgaacggccgcctacaacactctgaagacaaacctggagaacctggaaaagaaatccatggggaacctcttcacccggacactgagtgatattgtgagcaaagaggacttcgtgctggattctgaatatctcgtcacacttctggtcatcgtccccaaaccaaactactcacaatggcaaaaaacctacgaatctctctcagacatggtggtccctcgatcaaccaaactcattactgaggacaaggaagggggccttttcactgtgactctgtttcgaaaagtgattgaagatttcaaaaccaaggccaaagaaaacaagttcacctgttcgtgaattttactatgatgagaaggaaattgaaagggaaagggaggagatggccagattgctgtctgataagaagcaacagtatggccccctgctgcgctggctcaaggtgaacttcagtgaagccttcattgcctggatccacatcaaggccctgagagtgtttgtggagtccgtgctcaggtatggactaccagtgaacttccaggcagtgctcctgcagccgcataagaagtcatccaccaagcgtttaagagaggttctaaactctgtcttccgacatctggatgaagtagccgctacaagtatactggatgcatctgtggagatcccgggactgcaactcaataaccaagactattttccttatgtctacttccatattgaccttagtcttcttgactagaaaggccagctggcacctctgtctcatgttcgtgcagattattacagacacctctttcctttagccagagaatggttcaaatgtcttacagaactaagatctttttcagagaaattgctcacaaaagttagtgacagttgtatttatttttttaagttacaataaaatgctctcaagtcctttgaatgttccaacaaattcaaaacttcattttctgaatgttttacataaatgcgaactacctgttcgcattggtaacctgctgctgtatttcatgtcttaacggctattttgaggttcattaacaacatagaaagccttgaactgtataaccagctagattccttaataattagtcactagagacagcccaaagacaaatattgggcaggaaatcagttctcactgagcccggtttccatgtaaaatctctgttgtggtgggcataggtggcaccatctaaagaaaagaggtcttgttttttgtttaaaaaagtttgtggggaggaaagacatctgtgtatcacttcaaaatattgatttactgctaaacatcactctgaatttatgatgtggatactaacttcatacatttatcggcattgtccaaaatattttattctttaatggaaaaagccattaatattcaaatgaagggatcacattaaaaaaaacccatacataagaaacagcctccaagaacattcaagcagcagtcagagagaaaaatgtttcgacagccaagttttcttcaaaatattatgtgacagaatacgactcaattcaccggctacaacaattcatagaatttttcaatgttttcttgagatgcaaaagttcactgttgcagtgttttcaaatgaccaatcaagtactacttcttggttaaaaggccactggtagagtcatctgagtgtagagaatgtcccttcactgctggaaaaatccactggctcccaagaaaagaaaatggtctgaagcctctgttgtggctctcacaactcatctttccctaagtcatcaagctccacatcactgaggtcaatgtcatcctccacgggaagctgggagacgacagaaagccactgttagatctgcagaaggggacaccctggaaggtcaacatctcattttatggaagagcgactctctggagctactcctgctacaatccaggttctcctcagtctgactcctaccctgaccttcgtacctatgattatacggatggaaaagctcagaactcaggtgaaacatttcaacatcacatcactcaccattttaacactggaagccacttgaacgtgtccttttgaggagggtgggacacaacagtacagaaataagtgctaatttcaaagctatcattttctatttttctaagataaagtaaatgaattccaggttaaatgttcactttaaggtaataatcaggaaagcaaccttactactgaaatgtatcttggctgtcaagagtatcaaatgccatgcagcacttaaacttgtgataaggaagatgaagggtcttcagagaagaacctcttaaaaggcccacgggtgcaccagggctgaggtctgatgggaaggacttgactccaggtgcagagatgcacaggctcaagagagtaaaccaggactgctgcccgcacagcttccctcccgggcactcacctcgccatccctgccgtcccaaggctctctctcaacgatggtagggaaagccccgcctcctacaggtgccgtggagccacgcccaaaagagagctcccttagggaaaaatgaccaaaacacacacacacatttacaatggactgctggtgcagaagaataaacaactttaaaaataaa

SEQ ID NO: 277896 - DNA, 769 bp, Homo sapiens
ttcaggcgatgagaatgatttatttgtttgtgatgcatgtttgctgaaagattaataaatcatttctgtgcctttagcaaacttcctgtgttgctcttaaaaagggatcatccaccttccctgaccttcgtacctatgattatacggatggaaaagctcagaactcaggtgaaacatttcaacatcacatcactcaccattttaacactggaagccacttgaacgtgtccttttgaggagggtgggacacaacagtacagaaataagtgctaatttcaaagctatcattttctatttttctaagataaagtaaatgaattccaggttaaatgttcactttaaggtaataatcaggaaagcaaccttactactgaaatgtatcttggctgtcaagagtatcaaatgccatgcagcacttaaacttgtgataaggaagatgaagggtcttcagagaagaacctcttaaaaggcccacgggtgcaccagggctgaggtctgatgggaaggacttgactccaggtgcagagatgcacaggctcaagagagtaaaccaggactgctgcccgcacagcttccctcccgggcactcacctcgccatccctgccgtcccaaggctctctctcaacgatggtagggaaagccccgcctcctacaggtgccgtggagccacgcccaaaagagagctcccttagggaaaaatgaccaaaacacacacacacatttacaatggactgctggtgcagaagaataaacaactttaaaaataaa

SEQ ID NO: 277897 - DNA, 326 bp, Homo sapiens
gccctgccagcctccctgtccctggaggggaggaggcagcagctgtggccccagcacagagcctggccctggggttgtggggagcaatcattgctgagaattgctgtgttctcctaggctccagcatccctggcacccacccttccttgagaactgcccccagtgcccgggtgtgggtgtgtgtggggtcactgtgtccctttctgctcacatctttcacaccctttgttccacctgccttttagggggaacctcttcacccggacactgagtgatattgtgagcaaagaggacttcgtgctggattctgaatatctcgtcacact

SEQ ID NO: 277898 - DNA, 3153 bp, Homo sapiens
gggtaagagaagactggaagcatgtcggagtttggttaatttctgcccctggcgataaggaaaatttgcaagctctggagaggatgaatactgtaacctccaagtccaacctgtcttataataccaaattcgctattcctgacttcaaggtggggaccttggattccctggttggcctctctgatgagttggggaaactcgacacctttgctgaaagcctcataaggagaatggctcagagcgtggtggaagtcatggaggactcaaaggggaaggtccaggagcacctcctggcaaacggagttgacttaacatcctttgtgacccactttgaatgggacatggccaaatatcctgtcaagcagccgctcgtgagtgtggtggacacaatagccaagcaactggcgcagatcgagatggacctgaagtcccgaacggccgcctacaacactctgaagacaaacctggagaacctggaaaagaaatccatggggaacctcttcacccggacactgagtgatattgtgagcaaagaggacttcgtgctggattctgaatatctcgtcacacttctggtcatcgtccccaaaccaaactactcacaatggcaaaaaacctacgaatctctctcagacatggtggtccctcgatcaaccaaactcattactgaggacaaggaagggggccttttcactgtgactctgtttcgaaaagtgattgaagatttcaaaaccaaggccaaagaaaacaagttcacctgttcgtgaattttactatgatgagaaggaaattgaaagggaaagggaggagatggccagattgctgtctgataagaagcaacagtatcaaacttcctgtgttgctcttaaaaagggatcatccaccttcccggaccacaaggttaaggtaaccccgctaggtaaccctgataggcctgctgcggggcagaccgacagagagagagagagtgagggcgagggtgagggccccctgctgcgctggctcaaggtgaacttcagtgaagccttcattgcctggatccacatcaaggccctgagagtgtttgtggagtccgtgctcaggtatggactaccagtgaacttccaggcagtgctcctgcagccgcataagaagtcatccaccaagcgtttaagagaggttctaaactctgtcttccgacatctggatgaagtagccgctacaagtatactggatgcatctgtggagatcccgggactgcaactcaataaccaagactattttccttatgtctacttccatattgaccttagtcttcttgactagaaaggccagctggcacctctgtctcatgttcgtgcagattattacagacacctctttcctttagccagagaatggttcaaatgtcttacagaactaagatctttttcagagaaattgctcacaaaagttagtgacagttgtatttatttttttaagttacaataaaatgctctcaagtcctttgaatgttccaacaaattcaaaacttcattttctgaatgttttacataaatgcgaactacctgttcgcattggtaacctgctgctgtatttcatgtcttaacggctattttgaggttcattaacaacatagaaagccttgaactgtataaccagctagattccttaataattagtcactagagacagcccaaagacaaatattgggcaggaaatcagttctcactgagcccggtttccatgtaaaatctctgttgtggtgggcataggtggcaccatctaaagaaaagaggtcttgttttttgtttaaaaaagtttgtggggaggaaagacatctgtgtatcacttcaaaatattgatttactgctaaacatcactctgaatttatgatgtggatactaacttcatacatttatcggcattgtccaaaatattttattctttaatggaaaaagccattaatattcaaatgaagggatcacattaaaaaaaacccatacataagaaacagcctccaagaacattcaagcagcagtcagagagaaaaatgtttcgacagccaagttttcttcaaaatattatgtgacagaatacgactcaattcaccggctacaacaattcatagaatttttcaatgttttcttgagatgcaaaagttcactgttgcagtgttttcaaatgaccaatcaagtactacttcttggttaaaaggccactggtagagtcatctgagtgtagagaatgtcccttcactgctggaaaaatccactggctcccaagaaaagaaaatggtctgaagcctctgttgtggctctcacaactcatctttccctaagtcatcaagctccacatcactgaggtcaatgtcatcctccacgggaagctgggagacgacagaaagccactgttagatctgcagaaggggacaccctggaaggtcaacatctcattttatggaagagcgactctctggagctactcctgctacaatccaggttctcctcagtctgactcctaccctgaccttcgtacctatgattatacggatggaaaagctcagaactcaggtgaaacatttcaacatcacatcactcaccattttaacactggaagccacttgaacgtgtccttttgaggagggtgggacacaacagtacagaaataagtgctaatttcaaagctatcattttctatttttctaagataaagtaaatgaattccaggttaaatgttcactttaaggtaataatcaggaaagcaaccttactactgaaatgtatcttggctgtcaagagtatcaaatgccatgcagcacttaaacttgtgataaggaagatgaagggtcttcagagaagaacctcttaaaaggcccacgggtgcaccagggctgaggtctgatgggaaggacttgactccaggtgcagagatgcacaggctcaagagagtaaaccaggactgctgcccgcacagcttccctcccgggcactcacctcgccatccctgccgtcccaaggctctctctcaacgatggtagggaaagccccgcctcctacaggtgccgtggagccacgcccaaaagagagctcccttagggaaaaatgaccaaaacacacacacacatttacaatggactgctggtgcagaagaataaacaactttaaaaataaa

SEQ ID NO: 277899 - DNA, 903 bp, Homo sapiens
cttcaggaaaatttttttttaaagcaacgaaaaaactgactccatagaaactgagataaaacttgaaactagggatagggtggagagagaaacagaacacttcaatttagtatctccataaatactggagagaataaataaaaacaaaaagttgaatagaaactaaaattgagaaaactgcctagagtacaaaaaaatgacaaagacaaaaaatacaacagagcaagaccctgtctcttaaaagaatttaaaaaaaaaaaaaaggatacataaataccactgtttcaactgcctatagtaacacgctatacagctttacaccctagaagcaacaggctatactatataggctaggcatgcagtacactatgccatctaggtttgtataagtactacgctaaatgtttcaagacacagattatcattaaactacagactacattagaatgctgtgttttccaacagctttatcaccaccaagtgatgttttgacaaagagggggctagccaacttctcatgtattttccatccagtctaatgcatccatgcatcttttttttggcaatatgaacataatactctttccaactacaaggatacttcaaaattcaccgtgctatttccgattttaaccctataaatgtctccagtcaaagtcaatgggagaaatcttgccacaactaatatataatagatttcacactgaagttatttttcctcttcccatcaggacagaattatcttaattaccttagttttcagtaagtttgagtattattaactaggagtaaatctgctacataaaaatataaagcagacatattttaaaaccacagttttatactagcaattcataattcacttttccaataatcaagatccaaagaattattccccgtttt

SEQ ID NO: 277900 - DNA, 1170 bp, Homo sapiens
acccaagcattttcaccagggcaggaatgcctccagacttaaagatggccagtaagccctcacgatgatgggaaaggttatgcaaggtcccagcggtacaacgagctgtttctacatcatttgtattctgcatggacttgggaggtatccacatcctcttcctcaggattgcctttaccactcagagaaggagctgtggtagtggcaccagaatggattccagagtccaggtaaacaagccaggcgaagtggcttgtaattctaacactttgggaggcgggtggattgctgcagcacaagagttccaagaccagcctggacaacacagcgaaattccatctctacaaaaaaatgttaaaaattagccaggtgtggtagtatgtgcctgtagtcctagccactggggaggctgaggcaaagaggatcacttaggagttcaaggttatagtgagctatgatcacaccaatgcatccagcctgggcaacagagcaagaccctgtctcttaaaagaatttaaaaaaaaaaaaaaggatacataaataccactgtttcaactgcctatagtaacacgctatacagctttacaccctagaagcaacaggctatactatataggctaggcatgcagtacactatgccatctaggtttgtataagtactacgctaaatgtttcaagacacagattatcattaaactacagactacattagaatgctgtgttttccaacagctttatcaccaccaagtgatgttttgacaaagagggggctagccaacttctcatgtattttccatccagtctaatgcatccatgcatcttttttttggcaatatgaacataatactctttccaactacaaggatacttcaaaattcaccgtgctatttccgattttaaccctataaatgtctccagtcaaagtcaatgggagaaatcttgccacaactaatatataatagatttcacactgaagttatttttcctcttcccatcaggacagaattatcttaattaccttagttttcagtaagtttgagtattattaactaggagtaaatctgctacataaaaatataaagcagacatattttaaaaccacagttttatactagcaattcataattcacttttccaataatcaagatccaaagaattattccccgtttt

SEQ ID NO: 277901 - DNA, 1202 bp, Homo sapiens
acccaagcattttcaccagggcaggaatgcctccagacttaaagatggccagtaagccctcacgatgatgggaaaggttatgcaaggtcccagcggtacaacgagctgtttctacatcatttgtattctgcatggacttgggaggtatccacatcctcttcctcaggattgcctttaccactcagagaaggagctgtggtagtggcaccagaatggattccagagtccagaaaaattcacagatcccctttggataacagaggtaaacaagccaggcgaagtggcttgtaattctaacactttgggaggcgggtggattgctgcagcacaagagttccaagaccagcctggacaacacagcgaaattccatctctacaaaaaaatgttaaaaattagccaggtgtggtagtatgtgcctgtagtcctagccactggggaggctgaggcaaagaggatcacttaggagttcaaggttatagtgagctatgatcacaccaatgcatccagcctgggcaacagagcaagaccctgtctcttaaaagaatttaaaaaaaaaaaaaaggatacataaataccactgtttcaactgcctatagtaacacgctatacagctttacaccctagaagcaacaggctatactatataggctaggcatgcagtacactatgccatctaggtttgtataagtactacgctaaatgtttcaagacacagattatcattaaactacagactacattagaatgctgtgttttccaacagctttatcaccaccaagtgatgttttgacaaagagggggctagccaacttctcatgtattttccatccagtctaatgcatccatgcatcttttttttggcaatatgaacataatactctttccaactacaaggatacttcaaaattcaccgtgctatttccgattttaaccctataaatgtctccagtcaaagtcaatgggagaaatcttgccacaactaatatataatagatttcacactgaagttatttttcctcttcccatcaggacagaattatcttaattaccttagttttcagtaagtttgagtattattaactaggagtaaatctgctacataaaaatataaagcagacatattttaaaaccacagttttatactagcaattcataattcacttttccaataatcaagatccaaagaattattccccgtttt

SEQ ID NO: 277902 - DNA, 474 bp, Homo sapiens
aaacgaaggccatattgtccataaatgtcatttttttcatcaaagacaccagggcagatttttaagtaaagaaagacaattggacccttaagaatttatgcatttgtaaagttgctgttgatccaaatattttcaagccatgtaatccattggttttgtgggcagtttaataaacctgaacctttgtgtgttttctaattgtacctgagttgaccatcctttctttttatagtatatttcttgtatgatattttgtaaagctctcacctggttcttttatggggacttttcgtttttgggcaactccagtgtatttatgtgaaactttataagagaattaatttttccatttgcatattaatatgttcctccacacatgtaaaggcacagtggctccgtgtgttaaaaaacagctgtattttatgtatgctttactgataagtgtgccaataataaactgtgttaatgaccaaa

SEQ ID NO: 277903 - DNA, 773 bp, Homo sapiens
ccttcttcataggaattattggaagcctgtattttcttgcttcttgtttatttcttaagtatttgcttgtccttgatagaatataagccccatgagggcagggacctgattgtcttacacatcattgcatccccagtgccctatatagcacatggctgatgtgcaaaatattacctattgaataaagaaaattaagttgttccagcactggccatcctgacgctaaaattttccccaagtcttaccaacaattgcctacagttccagtaggagaagaatctgtgagcctaatagcccagtgagcattcactgctagaacgcacgtccagcccaaaggaaaaagaagccctgagagaacaaaatttcttctatgaagggagtgttgacctgactattttgccctctggatagtgcaaatctgttgggaatctcctgacttctgattaaaaatatttatacttatcctagtgtttcttttctcatttgatatttctgctacttctgtctctctatatctacctgggagcccacagccgtgaattacggtatgaatcatgataatatgttacatttcctggagcactttgcattttaggtaagtgctttcggggccattaatcagcttatttgaagtgatttgcacaacagaaaatatgggaagttctatcagtatatgatgctgtggtctgtaataactttgtgtttgctaactggtgtatgtatgtgtgtgtgtgtgtgtgtgtcatgtgtgtgagagagagagagagagagac

SEQ ID NO: 277904 - DNA, 2867 bp, Homo sapiens
  misc_feature (1)..(1): n is a, c, g, or t
ncccgtgctccctccctccctccctctttccctccctcctctcctctccctctcctctcctgctatagagggctccgacagcagttcccagccagcgtgttcagcctgcctgcctgcctgcctctgtgtgtgtgtgagcgtgtgtgcgtgcgtctactttgtactgggaagaacacagcccatgtgctctgcatggacgttactgatactctgtttagcttgattttcgaaaagcaggcaagatgtccagcacaccacatgaccccttctattcttctcctttcggcccattttataggaggcatacaccatacatggtacagccagagtaccgaatctatgagatgaacaagagactgcagtctcgcacagaggatagtgacaacctctggtgggacgcctttgccactgaattttttgaagatgacgccacattaaccctttcattttgtttggaagatggaccaaagcgatacactatcggcaggaccctcatcccccgttactttagcactgtgtttgaaggaggggtgaccgacctgtattacattctcaaacactcgaaagagtcataccacaactcatccatcacggtggactgcgaccagtgtaccatggtcacccagcacgggaagcccatgtttaccaaggtatgtacagaaggcagactgatcttggagttcacctttgatgatctcatgagaatcaaaacatggcactttaccattagacaataccgagagttagtcccgagaagcatcctagccatgcatgcacaagatcctcaggtcctggatcagctgtccaaaaacatcaccaggatggggctaacaaacttcaccctcaactacctcaggttgtgtgtaatattggagccaatgcaggaactgatgtcgagacataaaacttacaacctcagtccccgagactgcctgaagacctgcttgtttcagaagtggcagaggatggtggctccgccagcagaacccacaaggcaaccaacaaccaaacggagaaaaaggaaaaattccaccagcagcacttccaacagcagcgctgggaacaatgcaaacagcactggcagcaagaagaagaccacagctgcaaacctgagtctgtccagtcaggtacctgggctaggagcgatcccgaactgcagcctcaaccctgggagggatggagacctgtgtcattcaacagcagtgaccccttctggccaatttaaggagaagcattgaggggccctgaaaggagtcacttccagtcctcctcagagattgctagcattgctcgttctccagtgtcaggctgcgcactaaggacataaactcgcgtggttgttacacatcaggaggcgatgtttatttcctgtagaaatcaaatatgcgtctcggcccccgacattgagacttgaccccgttgtacagtacacgagtgtgtctgtcctagattccccgactcctcccactgttattttaagctgagcttctctctcccaaggtttccctgtaataatgtcagctgctgttcacaggatgtgatggtggtaggagagccaactctgatgggaggtgagtttggggacgaggacgaaaggctaatcactagattagaaaacacgcaatatgatgcggccaacggcatggacgacgaggaggacttcaacaattcacccgcgctggggaacaacagcccgtggaacagtaaacctcccgccactcaagagaccaaatcagaaaaccccccaccccaggcttcccaataagatgatcggcaccagaatccactgtcaataggcccgtgggtgatcattacaattgcaaatctttacttacaggagaggaaacagaagagataaaaacttttccatgcaaatatctatttctaaaccacaatgatctgattttctttcttctttctttttttctaattgagaggattattcccaataagcttccatgaccctttcttggaggccttcacaggtaatacagatactggcactgattgtaattaaaatgagagaaaactctagcgcatcttctggcacggttttaacaacgtgtttgtgttgaatttcctttttatgcatcaaacgaaggccatattgtccataaatgctcagtgctcaggatctcattaatatgccgaacctaactacagatgactttttaatattgtaaaatattttctgctttttgacttgcatctgagagtttcttgtttcagtaaaaaaagaaaagacaaaaaaatcagctttggaaagtaatttaaatgtaccttattttttttttctttatgttttctttcattgggcaacagctaagagggcccagcaaggtaatttatggttgagctgatgtcaattggttcttgtcttgagtcgactcaatttagcccaagtgctgaaacaagaaatgtcatttttttcatcaaagacaccagggcagatttttaagtaaagaaagacaattggacccttaagaatttatgcatttgtaaagttgctgttgatccaaatattttcaagccatgtaatccattggttttgtgggcagtttaataaacctgaacctttgtgtgttttctaattgtacctgagttgaccatcctttctttttatagtatatttcttgtatgatattttgtaaagctctcacctggttcttttatggggacttttcgtttttgggcaactccagtgtatttatgtgaaactttataagagaattaatttttccatttgcatattaatatgttcctccacacatgtaaaggcacagtggctccgtgtgttaaaaaacagctgtattttatgtatgctttactgataagtgtgccaataataaactgtgttaatgaccaaa

SEQ ID NO: 277905 - DNA, 2915 bp, Homo sapiens
ccttcttcataggaattattggaagcctgtattttcttgcttcttgtttatttcttaagtatttgcttgtccttgatagaatataagccccatgagggcagggacctgattgtcttacacatcattgcatccccagtgccctatatagcacatggctgatgtgcaaaatattacctattgaataaagaaaattaagttgttccagcactggccatcctgacgctaaaattttccccaagtcttaccaacaattgcctacagttccagtaggagaagaatctgtgagcctaatagcccagtgagcattcactgctagaacgcacgtccagcccaaaggaaaaagaagccctgagagaacaaaatttcttctatgaagggagtgttgacctgactattttgccctctggatagtgcaaatctgttgggaatctcctgacttctgattaaaaatatttatacttatcctagtgtttcttttctcatttgatatttctgctacttctgtctctctatatctacctgggagcccacagccgtgaattacggtatgaatcatgataatatgttacatttcctggagcactttgcattttaggtgccacatcattgggaactatgatgatgatgacgacgatgacgacgatacacttattctggattctatcagcaaattaaataatgatagtgacaacctctggtgggacgcctttgccactgaattttttgaagatgacgccacattaaccctttcattttgtttggaagatggaccaaagcgatacactatcggcaggaccctcatcccccgttactttagcactgtgtttgaaggaggggtgaccgacctgtattacattctcaaacactcgaaagagtcataccacaactcatccatcacggtggactgcgaccagtgtaccatggtcacccagcacgggaagcccatgtttaccaaggtatgtacagaaggcagactgatcttggagttcacctttgatgatctcatgagaatcaaaacatggcactttaccattagacaataccgagagttagtcccgagaagcatcctagccatgcatgcacaagatcctcaggtcctggatcagctgtccaaaaacatcaccaggatggggctaacaaacttcaccctcaactacctcaggttgtgtgtaatattggagccaatgcaggaactgatgtcgagacataaaacttacaacctcagtccccgagactgcctgaagacctgcttgtttcagaagtggcagaggatggtggctccgccagcagaacccacaaggcaaccaacaaccaaacggagaaaaaggaaaaattccaccagcagcacttccaacagcagcgctgggaacaatgcaaacagcactggcagcaagaagaagaccacagctgcaaacctgagtctgtccagtcaggtacctgggctaggagcgatcccgaactgcagcctcaaccctgggagggatggagacctgtgtcattcaacagcagtgaccccttctggccaatttaaggagaagcattgaggggccctgaaaggagtcacttccagtcctcctcagaggatgtgatggtggtaggagagccaactctgatgggaggtgagtttggggacgaggacgaaaggctaatcactagattagaaaacacgcaatatgatgcggccaacggcatggacgacgaggaggacttcaacaattcacccgcgctggggaacaacagcccgtggaacagtaaacctcccgccactcaagagaccaaatcagaaaaccccccaccccaggcttcccaataagatgatcggcaccagaatccactgtcaataggcccgtgggtgatcattacaattgcaaatctttacttacaggagaggaaacagaagagataaaaacttttccatgcaaatatctatttctaaaccacaatgatctgattttctttcttctttctttttttctaattgagaggattattcccaataagcttccatgaccctttcttggaggccttcacaggtaatacagatactggcactgattgtaattaaaatgagagaaaactctagcgcatcttctggcacggttttaacaacgtgtttgtgttgaatttcctttttatgcatcaaacgaaggccatattgtccataaatgctcagtgctcaggatctcattaatatgccgaacctaactacagatgactttttaatattgtaaaatattttctgctttttgacttgcatctgagagtttcttgtttcagtaaaaaaagaaaagacaaaaaaatcagctttggaaagtaatttaaatgtaccttattttttttttctttatgttttctttcattgggcaacagctaagagggcccagcaaggtaatttatggttgagctgatgtcaattggttcttgtcttgagtcgactcaatttagcccaagtgctgaaacaagaaatgtcatttttttcatcaaagacaccagggcagatttttaagtaaagaaagacaattggacccttaagaatttatgcatttgtaaagttgctgttgatccaaatattttcaagccatgtaatccattggttttgtgggcagtttaataaacctgaacctttgtgtgttttctaattgtacctgagttgaccatcctttctttttatagtatatttcttgtatgatattttgtaaagctctcacctggttcttttatggggacttttcgtttttgggcaactccagtgtatttatgtgaaactttataagagaattaatttttccatttgcatattaatatgttcctccacacatgtaaaggcacagtggctccgtgtgttaaaaaacagctgtattttatgtatgctttactgataagtgtgccaataataaactgtgttaatgaccaaa

SEQ ID NO: 277906 - DNA, 2218 bp, Homo sapiens
caaccagctcggggattcggaaccagatgcctgtgatggattattacaatttcctatcatgtaattgcttttctgtttgaccaaagctatcggcaggaccctcatcccccgttactttagcactgtgtttgaaggaggggtgaccgacctgtattacattctcaaacactcgaaagagtcataccacaactcatccatcacggtggactgcgaccagtgtaccatggtcacccagcacgggaagcccatgtttaccaaggtatgtacagaaggcagactgatcttggagttcacctttgatgatctcatgagaatcaaaacatggcactttaccattagacaataccgagagttagtcccgagaagcatcctagccatgcatgcacaagatcctcaggtcctggatcagctgtccaaaaacatcaccaggatggggctaacaaacttcaccctcaactacctcaggttgtgtgtaatattggagccaatgcaggaactgatgtcgagacataaaacttacaacctcagtccccgagactgcctgaagacctgcttgtttcagaagtggcagaggatggtggctccgccagcagaacccacaaggcaaccaacaaccaaacggagaaaaaggaaaaattccaccagcagcacttccaacagcagcgctgggaacaatgcaaacagcactggcagcaagaagaagaccacagctgcaaacctgagtctgtccagtcaggtacctgggctaggagcgatcccgaactgcagcctcaaccctgggagggatggagacctgtgtcattcaacagcagtgaccccttctggccaatttaaggagaagcattgaggggccctgaaaggagtcacttccagtcctcctcagaggatgtgatggtggtaggagagccaactctgatgggaggtgagtttggggacgaggacgaaaggctaatcactagattagaaaacacgcaatatgatgcggccaacggcatggacgacgaggaggacttcaacaattcacccgcgctggggaacaacagcccgtggaacagtaaacctcccgccactcaagagaccaaatcagaaaaccccccaccccaggcttcccaataagatgatcggcaccagaatccactgtcaataggcccgtgggtgatcattacaattgcaaatctttacttacaggagaggaaacagaagagataaaaacttttccatgcaaatatctatttctaaaccacaatgatctgattttctttcttctttctttttttctaattgagaggattattcccaataagcttccatgaccctttcttggaggccttcacaggtaatacagatactggcactgattgtaattaaaatgagagaaaactctagcgcatcttctggcacggttttaacaacgtgtttgtgttgaatttcctttttatgcatcaaacgaaggccatattgtccataaatgctcagtgctcaggatctcattaatatgccgaacctaactacagatgactttttaatattgtaaaatattttctgctttttgacttgcatctgagagtttcttgtttcagtaaaaaaagaaaagacaaaaaaatcagctttggaaagtaatttaaatgtaccttattttttttttctttatgttttctttcattgggcaacagctaagagggcccagcaaggtaatttatggttgagctgatgtcaattggttcttgtcttgagtcgactcaatttagcccaagtgctgaaacaagaaatgtcatttttttcatcaaagacaccagggcagatttttaagtaaagaaagacaattggacccttaagaatttatgcatttgtaaagttgctgttgatccaaatattttcaagccatgtaatccattggttttgtgggcagtttaataaacctgaacctttgtgtgttttctaattgtacctgagttgaccatcctttctttttatagtatatttcttgtatgatattttgtaaagctctcacctggttcttttatggggacttttcgtttttgggcaactccagtgtatttatgtgaaactttataagagaattaatttttccatttgcatattaatatgttcctccacacatgtaaaggcacagtggctccgtgtgttaaaaaacagctgtattttatgtatgctttactgataagtgtgccaataataaactgtgttaatgaccaaa

SEQ ID NO: 277907 - DNA, 2202 bp, Homo sapiens
  misc_feature (63)..(63): n is a, c, g, or t
cccacccatccccccatgctgtcctaagtacacatacaaaacacagacatagtgctgctggtncggccagctatcggcaggaccctcatcccccgttactttagcactgtgtttgaaggaggggtgaccgacctgtattacattctcaaacactcgaaagagtcataccacaactcatccatcacggtggactgcgaccagtgtaccatggtcacccagcacgggaagcccatgtttaccaaggtatgtacagaaggcagactgatcttggagttcacctttgatgatctcatgagaatcaaaacatggcactttaccattagacaataccgagagttagtcccgagaagcatcctagccatgcatgcacaagatcctcaggtcctggatcagctgtccaaaaacatcaccaggatggggctaacaaacttcaccctcaactacctcaggttgtgtgtaatattggagccaatgcaggaactgatgtcgagacataaaacttacaacctcagtccccgagactgcctgaagacctgcttgtttcagaagtggcagaggatggtggctccgccagcagaacccacaaggcaaccaacaaccaaacggagaaaaaggaaaaattccaccagcagcacttccaacagcagcgctgggaacaatgcaaacagcactggcagcaagaagaagaccacagctgcaaacctgagtctgtccagtcaggtacctgggctaggagcgatcccgaactgcagcctcaaccctgggagggatggagacctgtgtcattcaacagcagtgaccccttctggccaatttaaggagaagcattgaggggccctgaaaggagtcacttccagtcctcctcagaggatgtgatggtggtaggagagccaactctgatgggaggtgagtttggggacgaggacgaaaggctaatcactagattagaaaacacgcaatatgatgcggccaacggcatggacgacgaggaggacttcaacaattcacccgcgctggggaacaacagcccgtggaacagtaaacctcccgccactcaagagaccaaatcagaaaaccccccaccccaggcttcccaataagatgatcggcaccagaatccactgtcaataggcccgtgggtgatcattacaattgcaaatctttacttacaggagaggaaacagaagagataaaaacttttccatgcaaatatctatttctaaaccacaatgatctgattttctttcttctttctttttttctaattgagaggattattcccaataagcttccatgaccctttcttggaggccttcacaggtaatacagatactggcactgattgtaattaaaatgagagaaaactctagcgcatcttctggcacggttttaacaacgtgtttgtgttgaatttcctttttatgcatcaaacgaaggccatattgtccataaatgctcagtgctcaggatctcattaatatgccgaacctaactacagatgactttttaatattgtaaaatattttctgctttttgacttgcatctgagagtttcttgtttcagtaaaaaaagaaaagacaaaaaaatcagctttggaaagtaatttaaatgtaccttattttttttttctttatgttttctttcattgggcaacagctaagagggcccagcaaggtaatttatggttgagctgatgtcaattggttcttgtcttgagtcgactcaatttagcccaagtgctgaaacaagaaatgtcatttttttcatcaaagacaccagggcagatttttaagtaaagaaagacaattggacccttaagaatttatgcatttgtaaagttgctgttgatccaaatattttcaagccatgtaatccattggttttgtgggcagtttaataaacctgaacctttgtgtgttttctaattgtacctgagttgaccatcctttctttttatagtatatttcttgtatgatattttgtaaagctctcacctggttcttttatggggacttttcgtttttgggcaactccagtgtatttatgtgaaactttataagagaattaatttttccatttgcatattaatatgttcctccacacatgtaaaggcacagtggctccgtgtgttaaaaaacagctgtattttatgtatgctttactgataagtgtgccaataataaactgtgttaatgaccaaa

SEQ ID NO: 277908 - DNA, 2466 bp, Homo sapiens
  misc_feature (1)..(1): n is a, c, g, or t
ncccgtgctccctccctccctccctctttccctccctcctctcctctccctctcctctcctgctatagagggctccgacagcagttcccagccagcgtgttcagcctgcctgcctgcctgcctctgtgtgtgtgtgagcgtgtgtgcgtgcgtctactttgtactgggaagaacacagcccatgtgctctgcatggacgttactgatactctgtttagcttgattttcgaaaagcaggcaagatgtccagcacaccacatgaccccttctattcttctcctttcggcccattttataggaggcatacaccatacatggtacagccagagtaccgaatctatgagatgaacaagagactgcagtctcgcacagaggatagtgacaacctctggtgggacgcctttgccactgaattttttgaagatgacgccacattaaccctttcattttgtttggaagatggaccaaagcgatacactatcggcaggaccctcatcccccgttactttagcactgtgtttgaaggaggggtgaccgacctgtattacattctcaaacactcgaaagagtcataccacaactcatccatcacggtggactgcgaccagtgtaccatggtcacccagcacgggaagcccatgtttaccaaggtatgtacagaaggcagactgatcttggagttcacctttgatgatctcatgagaatcaaaacatggcactttaccattagacaataccgagagttagtcccgagaagcatcctagccatgcatgcacaagatcctcaggtcctggatcagctgtccaaaaacatcaccaggatggggctaacaaacttcaccctcaactacctcaggttgtgtgtaatattggagccaatgcaggaactgatgtcgagacataaaacttacaacctcagtccccgagactgcctgaagacctgcttgtttcagaagtggcagaggatggtggctccgccagcagaacccacaaggcaaccaacaaccaaacggagaaaaaggaaaaattccaccagcagcacttccaacagcagcgctgggaacaatgcaaacagcactggcagcaagaagaagaccacagctgcaaacctgagtctgtccagtcaggtacctgatgtgatggtggtaggagagccaactctgatgggaggtgagtttggggacgaggacgaaaggctaatcactagattagaaaacacgcaatatgatgcggccaacggcatggacgacgaggaggacttcaacaattcacccgcgctggggaacaacagcccgtggaacagtaaacctcccgccactcaagagaccaaatcagaaaaccccccaccccaggcttcccaataagatgatcggcaccagaatccactgtcaataggcccgtgggtgatcattacaattgcaaatctttacttacaggagaggaaacagaagagataaaaacttttccatgcaaatatctatttctaaaccacaatgatctgattttctttcttctttctttttttctaattgagaggattattcccaataagcttccatgaccctttcttggaggccttcacaggtaatacagatactggcactgattgtaattaaaatgagagaaaactctagcgcatcttctggcacggttttaacaacgtgtttgtgttgaatttcctttttatgcatcaaacgaaggccatattgtccataaatgctcagtgctcaggatctcattaatatgccgaacctaactacagatgactttttaatattgtaaaatattttctgctttttgacttgcatctgagagtttcttgtttcagtaaaaaaagaaaagacaaaaaaatcagctttggaaagtaatttaaatgtaccttattttttttttctttatgttttctttcattgggcaacagctaagagggcccagcaaggtaatttatggttgagctgatgtcaattggttcttgtcttgagtcgactcaatttagcccaagtgctgaaacaagaaatgtcatttttttcatcaaagacaccagggcagatttttaagtaaagaaagacaattggacccttaagaatttatgcatttgtaaagttgctgttgatccaaatattttcaagccatgtaatccattggttttgtgggcagtttaataaacctgaacctttgtgtgttttctaattgtacctgagttgaccatcctttctttttatagtatatttcttgtatgatattttgtaaagctctcacctggttcttttatggggacttttcgtttttgggcaactccagtgtatttatgtgaaactttataagagaattaatttttccatttgcatattaatatgttcctccacacatgtaaaggcacagtggctccgtgtgttaaaaaacagctgtattttatgtatgctttactgataagtgtgccaataataaactgtgttaatgaccaaa

SEQ ID NO: 277909 - DNA, 2609 bp, Homo sapiens
  misc_feature (1)..(1): n is a, c, g, or t
ncccgtgctccctccctccctccctctttccctccctcctctcctctccctctcctctcctgctatagagggctccgacagcagttcccagccagcgtgttcagcctgcctgcctgcctgcctctgtgtgtgtgtgagcgtgtgtgcgtgcgtctactttgtactgggaagaacacagcccatgtgctctgcatggacgttactgatactctgtttagcttgattttcgaaaagcaggcaagatgtccagcacaccacatgaccccttctattcttctcctttcggcccattttataggaggcatacaccatacatggtacagccagagtaccgaatctatgagatgaacaagagactgcagtctcgcacagaggatagtgacaacctctggtgggacgcctttgccactgaattttttgaagatgacgccacattaaccctttcattttgtttggaagatggaccaaagcgatacactatcggcaggaccctcatcccccgttactttagcactgtgtttgaaggaggggtgaccgacctgtattacattctcaaacactcgaaagagtcataccacaactcatccatcacggtggactgcgaccagtgtaccatggtcacccagcacgggaagcccatgtttaccaaggtatgtacagaaggcagactgatcttggagttcacctttgatgatctcatgagaatcaaaacatggcactttaccattagacaataccgagagttagtcccgagaagcatcctagccatgcatgcacaagatcctcaggtcctggatcagctgtccaaaaacatcaccaggatggggctaacaaacttcaccctcaactacctcaggttgtgtgtaatattggagccaatgcaggaactgatgtcgagacataaaacttacaacctcagtccccgagactgcctgaagacctgcttgtttcagaagtggcagaggatggtggctccgccagcagaacccacaaggcaaccaacaaccaaacggagaaaaaggaaaaattccaccagcagcacttccaacagcagcgctgggaacaatgcaaacagcactggcagcaagaagaagaccacagctgcaaacctgagtctgtccagtcaggtacctgggctaggagcgatcccgaactgcagcctcaaccctgggagggatggagacctgtgtcattcaacagcagtgaccccttctggccaatttaaggagaagcattgaggggccctgaaaggagtcacttccagtcctcctcagaggatgtgatggtggtaggagagccaactctgatgggaggtgagtttggggacgaggacgaaaggctaatcactagattagaaaacacgcaatatgatgcggccaacggcatggacgacgaggaggacttcaacaattcacccgcgctggggaacaacagcccgtggaacagtaaacctcccgccactcaagagaccaaatcagaaaaccccccaccccaggcttcccaataagatgatcggcaccagaatccactgtcaataggcccgtgggtgatcattacaattgcaaatctttacttacaggagaggaaacagaagagataaaaacttttccatgcaaatatctatttctaaaccacaatgatctgattttctttcttctttctttttttctaattgagaggattattcccaataagcttccatgaccctttcttggaggccttcacaggtaatacagatactggcactgattgtaattaaaatgagagaaaactctagcgcatcttctggcacggttttaacaacgtgtttgtgttgaatttcctttttatgcatcaaacgaaggccatattgtccataaatgctcagtgctcaggatctcattaatatgccgaacctaactacagatgactttttaatattgtaaaatattttctgctttttgacttgcatctgagagtttcttgtttcagtaaaaaaagaaaagacaaaaaaatcagctttggaaagtaatttaaatgtaccttattttttttttctttatgttttctttcattgggcaacagctaagagggcccagcaaggtaatttatggttgagctgatgtcaattggttcttgtcttgagtcgactcaatttagcccaagtgctgaaacaagaaatgtcatttttttcatcaaagacaccagggcagatttttaagtaaagaaagacaattggacccttaagaatttatgcatttgtaaagttgctgttgatccaaatattttcaagccatgtaatccattggttttgtgggcagtttaataaacctgaacctttgtgtgttttctaattgtacctgagttgaccatcctttctttttatagtatatttcttgtatgatattttgtaaagctctcacctggttcttttatggggacttttcgtttttgggcaactccagtgtatttatgtgaaactttataagagaattaatttttccatttgcatattaatatgttcctccacacatgtaaaggcacagtggctccgtgtgttaaaaaacagctgtattttatgtatgctttactgataagtgtgccaataataaactgtgttaatgaccaaa

SEQ ID NO: 277910 - DNA, 2405 bp, Homo sapiens
  misc_feature (1)..(1): n is a, c, g, or t
ncccgtgctccctccctccctccctctttccctccctcctctcctctccctctcctctcctgctatagagggctccgacagcagttcccagccagcgtgttcagcctgcctgcctgcctgcctctgtgtgtgtgtgagcgtgtgtgcgtgcgtctactttgtactgggaagaacacagcccatgtgctctgcatggacgttactgatactctgtttagcttgattttcgaaaagcaggaggcatacaccatacatggtacagccagagtaccgaatctatgagatgaacaagagactgcagtctcgcacagaggatagtgacaacctctggtgggacgcctttgccactgaattttttgaagatgacgccacattaaccctttcattttgtttggaagatggaccaaagcgatacactatcggcaggaccctcatcccccgttactttagcactgtgtttgaaggaggggtgaccgacctgtattacattctcaaacactcgaaagagtcataccacaactcatccatcacggtggactgcgaccagtgtaccatggtcacccagcacgggaagcccatgtttaccaaggtatgtacagaaggcagactgatcttggagttcacctttgatgatctcatgagaatcaaaacatggcactttaccattagacaataccgagagttagtcccgagaagcatcctagccatgcatgcacaagatcctcaggtcctggatcagctgtccaaaaacatcaccaggatggggctaacaaacttcaccctcaactacctcaggttgtgtgtaatattggagccaatgcaggaactgatgtcgagacataaaacttacaacctcagtccccgagactgcctgaagacctgcttgtttcagaagtggcagaggatggtggctccgccagcagaacccacaaggcaaccaacaaccaaacggagaaaaaggaaaaattccaccagcagcacttccaacagcagcgctgggaacaatgcaaacagcactggcagcaagaagaagaccacagctgcaaacctgagtctgtccagtcaggtacctgatgtgatggtggtaggagagccaactctgatgggaggtgagtttggggacgaggacgaaaggctaatcactagattagaaaacacgcaatatgatgcggccaacggcatggacgacgaggaggacttcaacaattcacccgcgctggggaacaacagcccgtggaacagtaaacctcccgccactcaagagaccaaatcagaaaaccccccaccccaggcttcccaataagatgatcggcaccagaatccactgtcaataggcccgtgggtgatcattacaattgcaaatctttacttacaggagaggaaacagaagagataaaaacttttccatgcaaatatctatttctaaaccacaatgatctgattttctttcttctttctttttttctaattgagaggattattcccaataagcttccatgaccctttcttggaggccttcacaggtaatacagatactggcactgattgtaattaaaatgagagaaaactctagcgcatcttctggcacggttttaacaacgtgtttgtgttgaatttcctttttatgcatcaaacgaaggccatattgtccataaatgctcagtgctcaggatctcattaatatgccgaacctaactacagatgactttttaatattgtaaaatattttctgctttttgacttgcatctgagagtttcttgtttcagtaaaaaaagaaaagacaaaaaaatcagctttggaaagtaatttaaatgtaccttattttttttttctttatgttttctttcattgggcaacagctaagagggcccagcaaggtaatttatggttgagctgatgtcaattggttcttgtcttgagtcgactcaatttagcccaagtgctgaaacaagaaatgtcatttttttcatcaaagacaccagggcagatttttaagtaaagaaagacaattggacccttaagaatttatgcatttgtaaagttgctgttgatccaaatattttcaagccatgtaatccattggttttgtgggcagtttaataaacctgaacctttgtgtgttttctaattgtacctgagttgaccatcctttctttttatagtatatttcttgtatgatattttgtaaagctctcacctggttcttttatggggacttttcgtttttgggcaactccagtgtatttatgtgaaactttataagagaattaatttttccatttgcatattaatatgttcctccacacatgtaaaggcacagtggctccgtgtgttaaaaaacagctgtattttatgtatgctttactgataagtgtgccaataataaactgtgttaatgaccaaa

SEQ ID NO: 277911 - DNA, 510 bp, Homo sapiens
gcacgaggcaagagactgcagtctcgcacagaggatctctacatggcctcagaaaaccaatttgtttcttttctcatttgatatttctgctacttctgtctctctatatctacctgggagcccacagccgtgaattacggtatgaatcatgataatatgttacatttcctggagcactttgcattttaggtgccacatcattgggaactatgatgatgatgacgacgatgacgacgatacacttattctggattctatcagcaaattaaataatgatagtgacaacctctggtgggacgcctttgccactgaattttttgaagatgacgccacattaaccctttcattttgtttggaagatggaccaaagcgatacagaaccaagaatttaagaccaattggggaaaaaatgaatattaatggaaaatggtgttgctgccagaatttattgtttggggactggagaagagaactgttctacacaataaaaaattattgagaaacacatta

SEQ ID NO: 277912 - DNA, 2838 bp, Homo sapiens
  misc_feature (1)..(1): n is a, c, g, or t
ncccgtgctccctccctccctccctctttccctccctcctctcctctccctctcctctcctgctatagagggctccgacagcagttcccagccagcgtgttcagcctgcctgcctgcctgcctctgtgtgtgtgtgagcgtgtgtgcgtgcgtctactttgtactgggaagaacacagcccatgtgctctgcatggacgttactgatactctgtttagcttgattttcgaaaagcaggcaagatgtccagcacaccacatgaccccttctattcttctcctttcggcccattttataggaggcatacaccatacatggtacagccagagtaccgaatctatgagatgaacaagagactgcagtctcgcacagaggatagtgacaacctctggtgggacgcctttgccactgaattttttgaagatgacgccacattaaccctttcattttgtttggaagatggaccaaagcgatacactatcggcaggaccctcatcccccgttactttagcactgtgtttgaaggaggggtgaccgacctgtattacattctcaaacactcgaaagagtcataccacaactcatccatcacggtggactgcgaccagtgtaccatggtcacccagcacgggaagcccatgtttaccaaggtatgtacagaaggcagactgatcttggagttcacctttgatgatctcatgagaatcaaaacatggcactttaccattagacaataccgagagttagtcccgagaagcatcctagccatgcatgcacaagatcctcaggtcctggatcagctgtccaaaaacatcaccaggatggggctaacaaacttcaccctcaactacctcaggttgtgtgtaatattggagccaatgcaggaactgatgtcgagacataaaacttacaacctcagtccccgagactgcctgaagacctgcttgtttcagaagtggcagaggatggtggctccgccagcagaacccacaaggcaaccaacaaccaaacggagaaaaaggaaaaattccaccagcagcacttccaacagcagcgctgggaacaatgcaaacagcactggcagcaagaagaagaccacagctgcaaacctgagtctgtccagtcaggtacctgggctaggagcgatcccgaactgcagcctcaaccctgggagggatggagacctgtgtcattcaacagcagtgaccccttctggccaatttaaggagaagcattgaggggccctgaaaggagtcacttccagtcctcctcagaggatgtgatggtggtaggagagccaactctgatgggaggtgagtttggggacgaggacgaaaggctaatcactagattagaaaacacgcaatatgatgcggccaacggcatggacgacgaggaggacttcaacaattcacccgcgctggggaacaacagcccgtggaacagtaaacctcccgccactcaagagaccaaatcagaaaaccccccaccccaggcttcccaataagatgatcggcaccagaatccactgtcaataggcccgtgggtgatcattacaattgcaaatctttacttacaggagaggaaacagaagagataaaaacttttccatgcaaatatctatttctaaaccacaatgatctgattttctttcttctttctttttttctaattgagaggattattcccaataagcttccatgaccctttcttggaggccttcacaggtaatacagatactggcactgattgtaattaaaatgagagaaaactctagcgcatcttctggcacggttttaacaacgtgtttgtgttgaatttcctttttatgcatcaaacgaaggccatattgtccataaatgctcagtgctcaggatctcattaatatgccgaacctaactacagatgactttttaatattgtaaaatattttctgctttttgacttgcatctgagagtttcttgtttcagtaaaaaaagaaaagacaaaaaaatcagctttggaaagtaatttaaatgtaccttattttttttttctttatgttttctttcattgggcaacagctaagagggcccagcaaggtaatttatggttgagctgatgtcaattggttcttgtcttgagtcgactcaatttagcccaagtgctgaaacaagaaatgtcatttttttcatcaaagacaccagggcagatttttaagtaaagaaagacaattggacccttaagaatttatgcatttgtaaagttgctgttgatccaaatattttcaagccatgtaatccattggttttgtgggcagtttaataaacctgaacctttgtgtgttttctaattgtacctgagttgaccatcctttctttttatagtatatttcttgtatgatattttgtaaagctctcacctggttcttttatggggacttttcgtttttgggcaactccagtgtatttatgtgaaactttataagagaattaatttttccatttgcatattaatatgttcctccacacatgtaaaggcacagtggctccgtgtgttaaaaaacagctgtattttatgtatgctttactgataagtgtgccaataataaactgtgttaatgaccaaaaaaaaaaaaaaaaaaaaacacaacagaaaaaaaacttttttgcggcccgcttggcgcccggaaaaaattttttataaaccaatgtcggttggggggcgggcccccacatgggtaagtaaacatgggcacaacgggctcccagagagaaccccggcgccgcacagtgcgggggtctccaccaataaaaaacgcgggcacccgcgttctgacacccgaatgggttcgggct

SEQ ID NO: 277913 - DNA, 2784 bp, Homo sapiens
  misc_feature (1)..(1): n is a, c, g, or t
ncccgtgctccctccctccctccctctttccctccctcctctcctctccctctcctctcctgctatagagggctccgacagcagttcccagccagcgtgttcagcctgcctgcctgcctgcctctgtgtgtgtgtgagcgtgtgtgcgtgcgtctactttgtactgggaagaacacagcccatgtgctctgcatggacgttactgatactctgtttagcttgattttcgaaaagcaggcaagatgtccagcacaccacatgaccccttctattcttctcctttcggcccattttataggaggcatacaccatacatggtacagccagagtaccgaatctatgagatgaacaagagactgcagtctcgcacagaggatagtgacaacctctggtgggacgcctttgccactgaattttttgaagatgacgccacattaaccctttcattttgtttggaagatggaccaaagcgatacactatcggcaggaccctcatcccccgttactttagcactgtgtttgaaggaggggtgaccgacctgtattacattctcaaacactcgaaagagtcataccacaactcatccatcacggtggactgcgaccagtgtaccatggtcacccagcacgggaagcccatgtttaccaaggtatgtacagaaggcagactgatcttggagttcacctttgatgatctcatgagaatcaaaacatggcactttaccattagacaataccgagagttagtcccgagaagcatcctagccatgcatgttgtgtgtaatattggagccaatgcaggaactgatgtcgagacataaaacttacaacctcagtccccgagactgcctgaagacctgcttgtttcagaagtggcagaggatggtggctccgccagcagaacccacaaggcaaccaacaaccaaacggagaaaaaggaaaaattccaccagcagcacttccaacagcagcgctgggaacaatgcaaacagcactggcagcaagaagaagaccacagctgcaaacctgagtctgtccagtcaggtacctgggctaggagcgatcccgaactgcagcctcaaccctgggagggatggagacctgtgtcattcaacagcagtgaccccttctggccaatttaaggagaagcattgaggggccctgaaaggagtcacttccagtcctcctcagagattgctagcattgctcgttctccagtgtcaggctgcgcactaaggacataaactcgcgtggttgttacacatcaggaggcgatgtttatttcctgtagaaatcaaatatgcgtctcggcccccgacattgagacttgaccccgttgtacagtacacgagtgtgtctgtcctagattccccgactcctcccactgttattttaagctgagcttctctctcccaaggtttccctgtaataatgtcagctgctgttcacaggatgtgatggtggtaggagagccaactctgatgggaggtgagtttggggacgaggacgaaaggctaatcactagattagaaaacacgcaatatgatgcggccaacggcatggacgacgaggaggacttcaacaattcacccgcgctggggaacaacagcccgtggaacagtaaacctcccgccactcaagagaccaaatcagaaaaccccccaccccaggcttcccaataagatgatcggcaccagaatccactgtcaataggcccgtgggtgatcattacaattgcaaatctttacttacaggagaggaaacagaagagataaaaacttttccatgcaaatatctatttctaaaccacaatgatctgattttctttcttctttctttttttctaattgagaggattattcccaataagcttccatgaccctttcttggaggccttcacaggtaatacagatactggcactgattgtaattaaaatgagagaaaactctagcgcatcttctggcacggttttaacaacgtgtttgtgttgaatttcctttttatgcatcaaacgaaggccatattgtccataaatgctcagtgctcaggatctcattaatatgccgaacctaactacagatgactttttaatattgtaaaatattttctgctttttgacttgcatctgagagtttcttgtttcagtaaaaaaagaaaagacaaaaaaatcagctttggaaagtaatttaaatgtaccttattttttttttctttatgttttctttcattgggcaacagctaagagggcccagcaaggtaatttatggttgagctgatgtcaattggttcttgtcttgagtcgactcaatttagcccaagtgctgaaacaagaaatgtcatttttttcatcaaagacaccagggcagatttttaagtaaagaaagacaattggacccttaagaatttatgcatttgtaaagttgctgttgatccaaatattttcaagccatgtaatccattggttttgtgggcagtttaataaacctgaacctttgtgtgttttctaattgtacctgagttgaccatcctttctttttatagtatatttcttgtatgatattttgtaaagctctcacctggttcttttatggggacttttcgtttttgggcaactccagtgtatttatgtgaaactttataagagaattaatttttccatttgcatattaatatgttcctccacacatgtaaaggcacagtggctccgtgtgttaaaaaacagctgtattttatgtatgctttactgataagtgtgccaataataaactgtgttaatgaccaaa

SEQ ID NO: 277914 - DNA, 2694 bp, Homo sapiens
  misc_feature (1)..(1): n is a, c, g, or t
ncccgtgctccctccctccctccctctttccctccctcctctcctctccctctcctctcctgctatagagggctccgacagcagttcccagccagcgtgttcagcctgcctgcctgcctgcctctgtgtgtgtgtgagcgtgtgtgcgtgcgtctactttgtactgggaagaacacagcccatgtgctctgcatggacgttactgatactctgtttagcttgattttcgaaaagcaggcaagatgtccagcacaccacatgaccccttctattcttctcctttcggcccattttataggaggcatacaccatacatggtacagccagagtaccgaatctatgagatgaacaagagactgcagtctcgcacagaggtgccacatcattgggaactatgatgatgatgacgacgatgacgacgatacacttattctggattctatcagcaaattaaataatgatagtgacaacctctggtgggacgcctttgccactgaattttttgaagatgacgccacattaaccctttcattttgtttggaagatggaccaaagcgatacactatcggcaggaccctcatcccccgttactttagcactgtgtttgaaggaggggtgaccgacctgtattacattctcaaacactcgaaagagtcataccacaactcatccatcacggtggactgcgaccagtgtaccatggtcacccagcacgggaagcccatgtttaccaaggtatgtacagaaggcagactgatcttggagttcacctttgatgatctcatgagaatcaaaacatggcactttaccattagacaataccgagagttagtcccgagaagcatcctagccatgcatgcacaagatcctcaggtcctggatcagctgtccaaaaacatcaccaggatggggctaacaaacttcaccctcaactacctcaggttgtgtgtaatattggagccaatgcaggaactgatgtcgagacataaaacttacaacctcagtccccgagactgcctgaagacctgcttgtttcagaagtggcagaggatggtggctccgccagcagaacccacaaggcaaccaacaaccaaacggagaaaaaggaaaaattccaccagcagcacttccaacagcagcgctgggaacaatgcaaacagcactggcagcaagaagaagaccacagctgcaaacctgagtctgtccagtcaggtacctgggctaggagcgatcccgaactgcagcctcaaccctgggagggatggagacctgtgtcattcaacagcagtgaccccttctggccaatttaaggagaagcattgaggggccctgaaaggagtcacttccagtcctcctcagaggatgtgatggtggtaggagagccaactctgatgggaggtgagtttggggacgaggacgaaaggctaatcactagattagaaaacacgcaatatgatgcggccaacggcatggacgacgaggaggacttcaacaattcacccgcgctggggaacaacagcccgtggaacagtaaacctcccgccactcaagagaccaaatcagaaaaccccccaccccaggcttcccaataagatgatcggcaccagaatccactgtcaataggcccgtgggtgatcattacaattgcaaatctttacttacaggagaggaaacagaagagataaaaacttttccatgcaaatatctatttctaaaccacaatgatctgattttctttcttctttctttttttctaattgagaggattattcccaataagcttccatgaccctttcttggaggccttcacaggtaatacagatactggcactgattgtaattaaaatgagagaaaactctagcgcatcttctggcacggttttaacaacgtgtttgtgttgaatttcctttttatgcatcaaacgaaggccatattgtccataaatgctcagtgctcaggatctcattaatatgccgaacctaactacagatgactttttaatattgtaaaatattttctgctttttgacttgcatctgagagtttcttgtttcagtaaaaaaagaaaagacaaaaaaatcagctttggaaagtaatttaaatgtaccttattttttttttctttatgttttctttcattgggcaacagctaagagggcccagcaaggtaatttatggttgagctgatgtcaattggttcttgtcttgagtcgactcaatttagcccaagtgctgaaacaagaaatgtcatttttttcatcaaagacaccagggcagatttttaagtaaagaaagacaattggacccttaagaatttatgcatttgtaaagttgctgttgatccaaatattttcaagccatgtaatccattggttttgtgggcagtttaataaacctgaacctttgtgtgttttctaattgtacctgagttgaccatcctttctttttatagtatatttcttgtatgatattttgtaaagctctcacctggttcttttatggggacttttcgtttttgggcaactccagtgtatttatgtgaaactttataagagaattaatttttccatttgcatattaatatgttcctccacacatgtaaaggcacagtggctccgtgtgttaaaaaacagctgtattttatgtatgctttactgataagtgtgccaataataaactgtgttaatgaccaaa

SEQ ID NO: 277915 - DNA, 2417 bp, Homo sapiens
  misc_feature (25)..(25): n is a, c, g, or t
attttacaaggaaagtaatatgttntgttttttgtttcagttctgtctattctactctatcggcaggaccctcatcccccgttactttagcactgtgtttgaaggaggggtgaccgacctgtattacattctcaaacactcgaaagagtcataccacaactcatccatcacggtggactgcgaccagtgtaccatggtcacccagcacgggaagcccatgtttaccaaggtatgtacagaaggcagactgatcttggagttcacctttgatgatctcatgagaatcaaaacatggcactttaccattagacaataccgagagttagtcccgagaagcatcctagccatgcatgcacaagatcctcaggtcctggatcagctgtccaaaaacatcaccaggatggggctaacaaacttcaccctcaactacctcaggttgtgtgtaatattggagccaatgcaggaactgatgtcgagactgcctgaagacctgcttgtttcagaagtggcagaggatggtggctccgccagcagaacccacaaggcaaccaacaaccaaacggagaaaaaggaaaaattccaccagcagcacttccaacagcagcgctgggaacaatgcaaacagcactggcagcaagaagaagaccacagctgcaaacctgagtctgtccagtcaggtacctgggctaggagcgatcccgaactgcagcctcaaccctgggagggatggagacctgtgtcattcaacagcagtgaccccttctggccaatttaaggagaagcattgaggggccctgaaaggagtcacttccagtcctcctcagagattgctagcattgctcgttctccagtgtcaggctgcgcactaaggacataaactcgcgtggttgttacacatcaggaggcgatgtttatttcctgtagaaatcaaatatgcgtctcggcccccgacattgagacttgaccccgttgtacagtacacgagtgtgtctgtcctagattccccgactcctcccactgttattttaagctgagcttctctctcccaaggtttccctgtaataatgtcagctgctgttcacaggatgtgatggtggtaggagagccaactctgatgggaggtgagtttggggacgaggacgaaaggctaatcactagattagaaaacacgcaatatgatgcggccaacggcatggacgacgaggaggacttcaacaattcacccgcgctggggaacaacagcccgtggaacagtaaacctcccgccactcaagagaccaaatcagaaaaccccccaccccaggcttcccaataagatgatcggcaccagaatccactgtcaataggcccgtgggtgatcattacaattgcaaatctttacttacaggagaggaaacagaagagataaaaacttttccatgcaaatatctatttctaaaccacaatgatctgattttctttcttctttctttttttctaattgagaggattattcccaataagcttccatgaccctttcttggaggccttcacaggtaatacagatactggcactgattgtaattaaaatgagagaaaactctagcgcatcttctggcacggttttaacaacgtgtttgtgttgaatttcctttttatgcatcaaacgaaggccatattgtccataaatgctcagtgctcaggatctcattaatatgccgaacctaactacagatgactttttaatattgtaaaatattttctgctttttgacttgcatctgagagtttcttgtttcagtaaaaaaagaaaagacaaaaaaatcagctttggaaagtaatttaaatgtaccttattttttttttctttatgttttctttcattgggcaacagctaagagggcccagcaaggtaatttatggttgagctgatgtcaattggttcttgtcttgagtcgactcaatttagcccaagtgctgaaacaagaaatgtcatttttttcatcaaagacaccagggcagatttttaagtaaagaaagacaattggacccttaagaatttatgcatttgtaaagttgctgttgatccaaatattttcaagccatgtaatccattggttttgtgggcagtttaataaacctgaacctttgtgtgttttctaattgtacctgagttgaccatcctttctttttatagtatatttcttgtatgatattttgtaaagctctcacctggttcttttatggggacttttcgtttttgggcaactccagtgtatttatgtgaaactttataagagaattaatttttccatttgcatattaatatgttcctccacacatgtaaaggcacagtggctccgtgtgttaaaaaacagctgtattttatgtatgctttactgataagtgtgccaataataaactgtgttaatgaccaaa

SEQ ID NO: 277916 - DNA, 462 bp, Homo sapiens
tgaagtggttgcactatttaacaaagtttctctgtcactcagttccacaggtcgagacatgtcagtcaagatttcaatgcccttttccagggccttctggaatgactcagaaatgatggttggatgaatccctttctgaagaagcttggtacaagaatctaagagggagccagcaatgatgactactgatgtggtgccatctcctgcttctatatcttgagccttagacagctccaccagcattctggctgctggatgtaatacttgcatttgtttcagaatggtagcaccatcatttgtaatggttacatcaccttttccatcttgaatcattttatccattccttttggtccaaggcttgttctaatagcatcagcaaccgctttggcggcggaaatgttgctgaagcggatctgggctggcttgtcgcggtcctgataggcgcctttcccgcggccgct

SEQ ID NO: 277917 - DNA, 461 bp, Homo sapiens
tgggtggcggtctcagaagagtgacaagttccacaggtcgagacatgtcagtcaagatttcaatgcccttttccagggccttctggaatgactcagaaatgatggttggatgaatccctgtaatttgtgaaagtctagttatttaattgtaacagtaataaagtacatcctacccacctttctgaagaagcttggtacaagaatctaagagggagccagcaatgatgactactgatgtggtgccatctcctgcttctatatcttgagccttagacagctccaccagctaagtgaacagaaaatgccaagttgctcaatgagaaatgacagaacccagtaacacctaattcaaataatcgcaccagtgtcacaaacagaatttgaagatacaacatgattcctgatttcttctgatttgttgtctaccttgggtttcatttaaaattaaagactagtagatg

SEQ ID NO: 277918 - DNA, 329 bp, Homo sapiens
acgcttcttttattagtttttattagtttttcaaaagtatcagaaataacagaatgttgggagaagataaatctgccttttgaaaccaaatatttaatattttcattaaattgtttcaatacaacttcaggcaaatgccaactggaagaccaagcccagaaattcgtaatggttacatcaccttttccatcttgaatcattttatccattccttttggtccaaggcttgttctaatagcatcagcaaccgctttggcggcggaaatgttgctgaagcggatctgggctggcttgtcgcggtcctgataggcgcctttcccgcggccgct

SEQ ID NO: 277919 - DNA, 205 bp, Homo sapiens
acgcttcttttattagtttttattagtttttcaaaagtatcagaaataacagaatgttgggagaagataaatctgccttttgaaaccaaatatttaatattttcattaaattgtttcaatacaacttcaggcaaatgccaactggaagaccaagcccagaaattcagaggaaataatcttccaaacaaggaacaccaaggtgatc

SEQ ID NO: 277920 - DNA, 2438 bp, Homo sapiens
cgggttcctgagaattgtcaatcaggcgcgaggcagagaggagggtgtgacgttccaggagctagtggcctcttcaccctggtgacctctgttccgtattctgtcactgagagacgccctgggacatctgtggtggcttttgtcgcgctgggacctaccctgactacgggagttgggaggacccgggacaccgcacagccgggaaatggactcagtggcctttgaggatgtggctgtgaacttcacccatgaggagtgggctttgctgggtccatcacagaagaatctctacagagatgtgatgcgagaaaccattaggaacctgaactgtataggaatgaaatgggaaaaccagaacattgatgatcagcaccaaaatctcaggagaaatccaaggtgtgatgtggtagagagatttggtaaaagtaaagatggtagtcagtgtggagaaaccttaagccagattcgaaatagtattgtaaacaagaacactcccgccagagtagatgcatgtggaagcagtgtgaatggagaagtcataatgggtcattcatccctgaattgctacatcagagttgatactggacacaaacaccgggagtgtcatgaatatgcagagaagtcatatacacataagcagtgtgggaaaggcttaagttatcgccactcctttcaaacatgtgaaaggcctcacactggaaagaaaccctatgattgtaaggaatgtggaaaaaccttcagttctcctggaaaccttcgaagacatatggtagtaaaaggtggagatggaccttataaatgtgaattgtgtgggaaagcctttttttggcccagtttattacgtatgcatgaaagaactcacactggagagaaaccatatgaatgtaagcagtgttctaaagccttccctgtttacagttcctatctaagacatgaaaaaatacacactggggagaaaccgtatgaatgtaagcagtgttctaaagccttccctgattacagttcatatctaagacatgaaagaactcacactggagagaaaccctacaaatgtaaacaatgtgggaaagccttcagtgtttccggttcccttcgagtacatgaaagaattcacactggagagaaaccctatacatgtaaacagtgtgggaaagcgttttgtcatcttggaagctttcaaagacacatgataatgcacagtggagatggacctcataaatgtaagagatgtgggaaaggctttgattttcctggttcagcacgaattcatgaaggaactcacactctagagaaaccctatgaatgtaagcaatgtgggaaattgttatctcatcgctcaagctttcgaagacacatgatggcacacactggagatggccctcataaatgcacagtatgtgggaaagcctttgattctcctagtgtatttcaaagacatgaaaggactcacactggagagaaaccctatgaatgcaagcaatgtgggaaagccttccgtacttccagttcccttcgaaaacatgaaacaacacacactggagagcaaccctataaatgtaaatgtggaaaagcttttagtgatttattttcctttcaaagtcatgaaacaacacacagtgaagaggagccttatgaatgtaaggagtgtgggaaagcatttagttcttttaaatacttttgtcgccatgaaaggactcacagtgaagaaaaatcttatgagtgtcaaatttgtggcaaagccttcagtcgtttcagttacttaaaaactcatgaaaggactcacacggcagagaagccatatgaatgtaagcaatgcaggaaagcattcttttggccctctttccttctaagacatgaaaggactcacactggagaaagaccctatgaatgtaaacactgtggtaaagccttcagtcgttccagtttctgtcgagaacatgaaagaactcacactggagagaagccctatgaatgactcagtgacctttgaagatgtggctgtgaacttcacccaggaggaatggactttgctggatccttcacagaaaaaactctacagagacgtgatgtgggaaaccttcaggaacctggccactataggaacaaaacaaaaagaatggaacattgaagagcagtacaaaaaccaggggagaaatctcagaaatcatatggtagagagactctgtgaaagtaaagaaggtagtcatggcggagaaggtttcagccagattgcaaatctcagtctgaacaagaaaactccttctggaggaaagctttgggaaagcagtgtatgtggaaaagtcttgagccatcattcatcccttaacaggcacattagatcttacaccagacacaaactgtataagtgtcaggaatatggagagaagccatataaatgtaagaaatgtgggaaacccttcagttatctgcagtcttta

SEQ ID NO: 277921 - DNA, 1117 bp, Homo sapiens
cgggttcctgagaattgtcaatcaggcgcgaggcagagaggagggtgtgacgttccaggagctagtggcctcttcaccctggtgacctctgttccgtattctgtcactgagagacgccctgggacatctgtggtggcttttgtcgcgctgggacctaccctgactacgggagttgggaggacccgggacaccgcacagccgggaaatggccctgtgttatggaactttctggggctaccctaagatgctggaagctgccaatctcatggagggcctagtggatatcggcccttgggtcactcttcccagaggacagcctgaggtgttggagtggggcctcccaaaggatcaggctggagaacttgggacagtggataagtctggtctgttcctgttatctggacttggcagattaatgcaacattctgtgggactttgcaatagctaaagaacttaaatatcctttgtttactaaaggcttcattattatggaagtagtaactgatgtttattatctgagatggatagatacttgtgcttttcttgttgagctataaaatagaagtgacttacaatttccttccctcctgtaaacactgaatttgagtgattttgatagattcatcacacatggagttttgtttgtttgttttatgttttaaatccacgtaaggcatgaaagggtaagcaaatggccttgactggggtggagaggcttgaggccagtgactccaagtggaggccaattttgagcctgcaaagggaggtcattgtgggcccagtttagttggttcttcctggggagcctcccctgcaggtgtcccagcctaatcactccagcaatgggaggaaatcccttgaacccaggaggcggaggctgcagtgggtgacagagcgagattccgtctcaaggaaaaaaaaagaagaatgtgtatatatgtggacagtgaagactcatggggatgagggaggttatttggtggataatgggggttgctccagggatggatgcactgaaaggcctgactttacaaggcaatatatcaatgtagtaaaattgcactggtactccatgaatatatatatataatttatacatatatgtgtatatatatat

SEQ ID NO: 277922 - DNA, 950 bp, Homo sapiens
ggggtagcagagactgaagaacatttatatataaatggacttgtgcagttcaaacctgtgttgttcaggagtcaactatagttcaatgaatgaatcatacatgattgtagtgtacataaaatcttaacaatttttgtatcattttgtaataatttatagtgaattttctggatctctcttttaggaatgaaatgggaaaaccagaacattgatgatcagcaccaaaatctcaggagaaatccaaggtaatttgtacttataagagacaggtgatgtccttgcagtgtttctgagaatgacaagaacttttaaaaagaagcaaagattatgaacaagcccagcttaaatttatttattcttagaaaaatttctctataaaaatatattattaaatgtgacataaatatattattaaatgtgacatagctattcagtgtttgcaaagtagttcccatggaaacaatattaagatttcccatatgaggctgggtgtggtagctcatgcccgcaatcccagcactttgggaggctgagacaggaggatcacttgagcctgggagtttgaggctgcagtgatctgtgatggcactggtgcactctaacctaagtgacagagcaagaccctgtcttaaaaaaaaaaaaaaggccaggcgcagtggcttatgcctgtaatcccagcactttgggaggccgaggtgggtggatccacgaggtcaggagatcgagaccaacctggccaacatggtgaaaccccatctctactaaaaatacacaaaaattagctgggtgtggtggtgcatgcctgtagtcccagctacttgggaggctgaggcaggagaatcacttgaacctgggaggcggaggttgcagcaagccgagacagcaccagctgcactccagcctgatgacagagggagactccatctcaaaaaaaaaaaaaaaaaaaaaaa

SEQ ID NO: 277923 - DNA, 897 bp, Homo sapiens
cgggttcctgagaattgtcaatcaggcgcgaggcagagaggagggtgtgacgttccaggagctagtggcctcttcaccctggtgacctctgttccgtattctgtcactgagagacgccctgggacatctgtggtggcttttgtcgcgctgggacctaccctgactacgggagttgggaggacccgggacaccgcacagccgggaaatggccctgtgttatggaactttctggggctaccctaagatgctggaagctgccaatctcatggagggcctagtggatatcggcccttgggtcactcttcccagaggacagcctgaggtgttggagtggggcctcccaaaggatcaggactcagtggcctttgaggatgtggctgtgaacttcacccatgaggagtgggctttgctgggtccatcacagaagaatctctacagagatgtgatgcgagaaaccattaggaacctgaactgtataggaatgaaatgggaaaaccagaacattgatgatcagcaccaaaatctcaggagaaatccaaggttatcggagacatggttacagaatttcattttgatccattatggtcacctggtagctttgtctgatggaggtttgttacagttttcaacaggacagggtctccctgtcacccaggctggagttcagtagtgttctcttggctcactgaaactgctgcctcccaagcaaatgatcctcccacctcagcctcctgaatagctgggactacaggtgcacactaccatgcccagactgagataaggtatgaggaagccttggccatgccaccagccgcttatcccaaattcctgatccctggaagacatctgggctctccctcctgttccagcccagtagcttccagcaaaggtactggc

SEQ ID NO: 277924 - DNA, 2259 bp, Homo sapiens
aacttttgcaggtatttcttagaaatattttattaactcttttaaaacaacttgtatactaacaactattgtattaatattttccattacctgagaatatatattaaaatatcccattgcaattatgcattttcaggtcaactttgtaattttgtcaggttattcattatacattctaaataatgagtcagtattaccatttgcatataagtccaagtactttttttctttaaaaaatgttaaagaaaatgtaaaggaaaaaattttttaaaattcttacatggtcacaatttttctcatgaatctaatttctcatttagaataccacaggaacaaagcatgcttttgtctgtgccatcttgccagagaccactagaatcacacctatagtcaaagagtggcatgtaaagagttgtaataaggatgaacacaaagcatcaatgacggagggttatccataagagggtgctcaagaggacttcttataggatttgtgtttcttttaggtgatttcattgccattcaacaaagtgaggtgtttgtattggatgctgttaggtgaactcaattccatccttggaaaattctaatagttcttatctaggaggcagaaagaatagagtggcactaacactaattcataagaagcacaagtcatattaggagatttctggtcatttttaaagtttggagtctgttttcttttaggttatcggagacatggttacagaatttcattttgatccattatggtcacctggtagctttgtctgatggaggtttgttacagttttcaacagggtaagacttcgccttgtggtgagttggggagcagctgtcattgggaacagcttttgcttttctcattatttaaacactgaagtatttcctgtggtataatggacactgttatctataaagtacctcagttaaattgttgaccaaaattaagtctgttgaggcagaataatttgataaaggctaatcaaagccaaatgtgaggattggcctgggacgcaccaacaagttgtatatgtttcaaagtctattacaagttggaacactcataagtttaggaggccaggtgccgtggcttatgcctataattccacgtacttgggaggagtgcctgaggctaggaatctgggaccaacctgggcgacatagggagacttcatgtctaaaataaataaataaataaattattagctgggcatagtggtgcccaattgtagtcccagtactcagaagtgtgagtcaggaagatcgtttgaatccaggagttcgacaccaacctgggtaacataatgagacccctctcatctcaaaaaactaacaaattaagaaaaatagactggtttctgcaaggggtaaaaacaataagaaaaaataaatttaaaaaccctgagtggacatttttttcaaagaagacatacaaatggccggaaagcaaatgaaaagggacttaatatcactaatcattagagaaattcaaatcaaaaccacaattacatgttacctcatacatgcaaggatgggtactatcaagagagattagtgttagagtacagagaaaaaggaagctttgtatactgttggtgggaatgtacattggtacagccattgtgaaaaacaatatggaggttctgcaaaaaaaaacaaaaactaccatgtgatccaacagtctcactcctgggtatatgcatatatgaccaaaggcagtgatcagtatttcaaagagatatctgccactcgcatatgttcattacagcattattcacaatagtcaacatatggaaacaaacttagcatccattaatggatgaataaagaaagtgtgatgtatatttaaacagaatattactcagccgtaaaaaggaaatcctgacatttgtcacatgaataaacctggtggacactataaaataaggcagacataggcaaatacttcatgatcccacttaattgtggaatattaaaaacttaaactccgaggcagagggaggaacggtggttactagagtccagaaggtagggaaaatggagaaatgttggtcaaaggttaaaaaccaagttgtaaggtgaacacgttctggagatttaatgtacagcatgggtggtcatcaatgtgttaatttgactgtggtaaccattacagaatgtatatatatacatcaaaacataactgtacatcatgaacatatacaatctttgtgaagtattttaaaataaaaaaggaatgtttactgaaaaaaaaac

SEQ ID NO: 277925 - DNA, 2671 bp, Homo sapiens
ggtcactttctacacctagatgtggtggcacacgtctgtaattccagcatcagaattccagcatcagacagtgagtgcagacacagaataagagtggatttaccacgtcattgaataaatgcttggaaaccacagcatcatgggaagtttatgaaggtgagtataggttctcagtactgtgagtttcaaccttccttttctggacatatgggatgtttcaggactcagtggcctttgaggatgtggctgtgaacttcacccatgaggagtgggctttgctgggtccatcacagaagaatctctacagagatgtgatgcgagaaaccattaggaacctgaactgtataggaatgaaatgggaaaaccagaacattgatgatcagcaccaaaatctcaggagaaatccaaggtgtgatgtggtagagagatttggtaaaagtaaagatggtagtcagtgtggagaaaccttaagccagattcgaaatagtattgtaaacaagaacactcccgccagagtagatgcatgtggaagcagtgtgaatggagaagtcataatgggtcattcatccctgaattgctacatcagagttgatactggacacaaacaccgggagtgtcatgaatatgcagagaagtcatatacacataagcagtgtgggaaaggcttaagttatcgccactcctttcaaacatgtgaaaggcctcacactggaaagaaaccctatgattgtaaggaatgtggaaaaaccttcagttctcctggaaaccttcgaagacatatggtagtaaaaggtggagatggaccttataaatgtgaattgtgtgggaaagcctttttttggcccagtttattacgtatgcatgaaagaactcacactggagagaaaccatatgaatgtaagcagtgttctaaagccttccctgtttacagttcctatctaagacatgaaaaaatacacactggggagaaaccgtatgaatgtaagcagtgttctaaagccttccctgattacagttcatatctaagacatgaaagaactcacactggagagaaaccctacaaatgtaaacaatgtgggaaagccttcagtgtttccggttcccttcgagtacatgaaagaattcacactggagagaaaccctatacatgtaaacagtgtgggaaagcgttttgtcatcttggaagctttcaaagacacatgataatgcacagtggagatggacctcataaatgtaagagatgtgggaaaggctttgattttcctggttcagcacgaattcatgaaggaactcacactctagagaaaccctatgaatgtaagcaatgtgggaaattgttatctcatcgctcaagctttcgaagacacatgatggcacacactggagatggccctcataaatgcacagtatgtgggaaagcctttgattctcctagtgtatttcaaagacatgaaaggactcacactggagagaaaccctatgaatgcaagcaatgtgggaaagccttccgtacttccagttcccttcgaaaacatgaaacaacacacactggagagcaaccctataaatgtaaatgtggaaaagcttttagtgatttattttcctttcaaagtcatgaaacaacacacagtgaagaggagccttatgaatgtaaggagtgtgggaaagcatttagttcttttaaatacttttgtcgccatgaaaggactcacagtgaagaaaaatcttatgagtgtcaaatttgtggcaaagccttcagtcgtttcagttacttaaaaactcatgaaaggactcacacggcagagaagccatatgaatgtaagcaatgcaggaaagcattcttttggccctctttccttctaagacatgaaaggactcacactggagaaagaccctatgaatgtaaacactgtggtaaagccttcagtcgttccagtttctgtcgagaacatgaaagaactcacactggagagaagccctatgaatgtaaggaatgtgggaaagccttcagttctctcagttcctttaatagacataaaaggacacactggaaggatattctataagtgtatggaatgtgggaaagcattcattggttttatcacattcagatacttgaaagaaataaatcctgtgaatgtaaacgtggtaaagccttaagaagtttccaggctgggcgcagcggctcacacctgtaatcccagcactttgagaggccgaggagggcagatcacgaggccaggagatcgagaccagcctggctaacatgggaaaccctgtctctactaaaaatacggaaaaaaaaaaaaatagccaggcatagttgctcacacctgtagtcctagctactcaggaggctgaggcaggagaatcccttgaacccgggaggtggaggttgcagtgagccgagattgcactactgcactccagcttgggtgctagagcgagactccatctcaaaaaaaaaaaaaaagtttccatttctttcaaatagagttgctgcctgctatatgcaagaagattggttccagtacaccctgagtatacctaaatccacagatgccagctcttttataaaatggaatattcgcatgtacctacccacattctcctgtatactctataaatgtctagattaattaaaatatctcatgcattgtaaaaaagctgt

SEQ ID NO: 277926 - DNA, 1728 bp, Homo sapiens
aacttttgcaggtatttcttagaaatattttattaactcttttaaaacaacttgtatactaacaactattgtattaatattttccattacctgagaatatatattaaaatatcccattgcaattatgcattttcaggtcaactttgtaattttgtcaggttattcattatacattctaaataatgagtcagtattaccatttgcatataagtccaagtactttttttctttaaaaaatgttaaagaaaatgtaaaggaaaaaattttttaaaattcttacatggtcacaatttttctcatgaatctaatttctcatttagaataccacaggaacaaagcatgcttttgtctgtgccatcttgccagagaccactagaatcacacctatagtcaaagagtggcatgtaaagagttgtaataaggatgaacacaaagcatcaatgacggagggttatccataagagggtgctcaagaggacttcttataggatttgtgtttcttttaggtgatttcattgccattcaacaaagtgaggtgtttgtattggatgctgttaggtgaactcaattccatccttggaaaattctaatagttcttatctaggaggcagaaagaatagagtggcactaacactaattcataagaagcacaagtcatattaggagatttctggtcatttttaaagtttggagtctgttttcttttaggttatcggagacatggttacagaatttcattttgatccattatggtcacctggtagctttgtctgatggaggtttgttacagttttcaacagggtaagacttcgccttgtggtgagttggggagcagctgtcattgggaacagcttttgcttttctcattatttaaacactgaagtatttcctgtggtataatggacactgttatctataaagtacctcagttaaattgttgaccaaaattaagtctgttgaggcagaataatttgataaaggctaatcaaagccaaatgtgaggattggcctgggacgcaccaacaagttgtatatgtttcaaagtctattacaagttggaacactcataagtttaggaggccaggtgccgtggcttatgcctataattccacgtacttgggaggagtgcctgaggctaggaatctgggaccaacctgggcgacatagggagacttcatgtctaaaataaataaataaataaattattagctgggcatagtggtgcccaattgtagtcccagtactcagaagtgtgagtcaggaagatcgtttgaatccaggagttcgacaccaacctgggtaacataatgagacccctctcatctcaaaaaactaacaaattaagaaaaatagactggtttctgcaaggggtaaaaacaataagaaaaaataaatttaaaaaccctgagtggacatttttttcaaagaagacatacaaatggccggaaagcaaatgaaaagggacttaatatcactaatcattagagaaattcaaatcaaaaccacaattacatgttacctcatacatgcaaggatgggtactatcaagagagattagtgttagagtacagagaaaaaggaagctttgtatactgttggtgggaatgtacattggtacagccattgtgaaaaacaatatggagtgcttgctatatatgacccatggcactgatccggacttcaaagacatatttgtcaatcgcattagttcattcccgcattactcac

SEQ ID NO: 277927 - DNA, 1703 bp, Homo sapiens
aacttttgcaggtatttcttagaaatattttattaactcttttaaaacaacttgtatactaacaactattgtattaatattttccattacctgagaatatatattaaaatatcccattgcaattatgcattttcaggtcaactttgtaattttgtcaggttattcattatacattctaaataatgagtcagtattaccatttgcatataagtccaagtactttttttctttaaaaaatgttaaagaaaatgtaaaggaaaaaattttttaaaattcttacatggtcacaatttttctcatgaatctaatttctcatttagaataccacaggaacaaagcatgcttttgtctgtgccatcttgccagagaccactagaatcacacctatagtcaaagagtggcatgtaaagagttgtaataaggatgaacacaaagcatcaatgacggagggttatccataagagggtgctcaagaggacttcttataggatttgtgtttcttttaggtgatttcattgccattcaacaaagtgaggtgtttgtattggatgctgttaggtgaactcaattccatccttggaaaattctaatagttcttatctaggaggcagaaagaatagagtggcactaacactaattcataagaagcacaagtcatattaggagatttctggtcatttttaaagtttggagtctgttttcttttaggttatcggagacatggttacagaatttcattttgatccattatggtcacctggtagctttgtctgatggaggtttgttacagttttcaacagggtaagacttcgccttgtggtgagttggggagcagctgtcattgggaacagcttttgcttttctcattatttaaacactgaagtatttcctgtggtataatggacactgttatctataaagtacctcagttaaattgttgaccaaaattaagtctgttgaggcagaataatttgataaaggctaatcaaagccaaatgtgaggattggcctgggacgcaccaacaagttgtatatgtttcaaagtctattacaagttggaacactcataagtttaggaggccaggtgccgtggcttatgcctataattccacgtacttgggaggagtgcctgaggctaggaatctgggaccaacctgggcgacatagggagacttcatgtctaaaataaataaataaataaattattagctgggcatagtggtgcccaattgtagtcccagtactcagaagtgtgagtcaggaagatcgtttgaatccaggagttcgacaccaacctgggtaacataatgagacccctctcatctcaaaaaactaacaaattaagaaaaatagactggtttctgcaaggggtaaaaacaataagaaaaaataaatttaaaaaccctgagtggacatttttttcaaagaagacatacaaatggccggaaagcaaatgaaaagggacttaatatcactaatcattagagaaattcaaatcaaaaccacaattacatgttacctcatacatgcaaggatgggtactatcaagagagattagtgttagagtacagagaaaaaggaagctttgtatactgttggtgggaatgtacattggtacagccattgtgaaaaacaatatggaggttctgcaaaaaaaaacacaggcagcgatcagatttcaaagagatatcttgccctccacg

SEQ ID NO: 277928 - DNA, 1055 bp, Homo sapiens
aacttttgcaggtatttcttagaaatattttattaactcttttaaaacaacttgtatactaacaactattgtattaatattttccattacctgagaatatatattaaaatatcccattgcaattatgcattttcaggtcaactttgtaattttgtcaggttattcattatacattctaaataatgagtcagtattaccatttgcatataagtccaagtactttttttctttaaaaaatgttaaagaaaatgtaaaggaaaaaattttttaaaattcttacatggtcacaatttttctcatgaatctaatttctcatttagaataccacaggaacaaagcatgcttttgtctgtgccatcttgccagagaccactagaatcacacctatagtcaaagagtggcatgtaaagagttgtaataaggatgaacacaaagcatcaatgacggagggttatccataagagggtgctcaagaggacttcttataggatttgtgtttcttttaggtgatttcattgccattcaacaaagtgaggtgtttgtattggatgctgttaggtgaactcaattccatccttggaaaattctaatagttcttatctaggaggcagaaagaatagagtggcactaacactaattcataagaagcacaagtcatattaggagatttctggtcatttttaaagtttggagtctgttttcttttaggttatcggagacatggttacagaatttcattttgatccattatggtcacctggtagctttgtctgatggaggtttgttacagttttcaacagggtaagacttcgccttgtggtgagttggggagcagctgtcattgggaacagcttttgcttttctcattatttaaacactgaagtatttcctgtggtataatggacactgttatctataaagtacctcagttaaattgttgaccaaaattaagtctgttgaggcagaataatttgataaaggctaatcaaagccaaatgtgaggattggcctgggacgcaccaacaacacaccagaagtccggaccggctcaatac

SEQ ID NO: 277929 - DNA, 1100 bp, Homo sapiens
cgacaagagggaaactctgtctcccaaaaaaaaaaccaccaaaaaaaaaaaacctaacctctgggacattgacatttttttccccaagcctagtttccattccttggtgacgcatggcttatcagaaaattggatggtgttattcaggggacaagacaaatgatttctgccttctggactctctccgactgtgaagctagaaaactgtttctaaaaactgaaaaacccacccaatgaggttttgcatgagcctgaaaaagacataaggcagtgtctcctaggaatgtggttgctgagcacttcaatgagcaccgtggggctggcggatgtgccaggctggagaacttgggacagtggataagtctggtctgttcctgttatctggacttggcagattaatgcaacattctgtgggactttgcaatagctaaagaacttaaatatcctttgtttactaaaggcttcattattatggaagtagtaactgatgtttattatctgagatggatagatacttgtgcttttcttgttgagctataaaatagaagtgacttacaatttccttccctcctgtaaacactgaatttgagtgattttgatagattcatcacacatggagttttgtttgtttgttttatgttttaaatccacgtaaggcatgaaagggtaagcaaatggccttgactggggtggagaggcttgaggccagtgactccaagtggaggccaattttgagcctgcaaagggaggtcattgtgggcccagtttagttggttcttcctggggagcctcccctgcaggtgtcccagcctaatcactccagcaatgggaggaaatcccttgaacccaggaggcggaggctgcagtgggtgacagagcgagattccgtctcaaggaaaaaaaaagaagaatgtgtatatatgtggacagtgaagactcatggggatgagggaggttatttggtggataatgggggttgctccagggatggatgcactgaaaggcctgactttacaaggcaatatatcaatgtagtaaaattgcactggtactccatgaatatatatatataatttatacatatatgtgtatatatatat

SEQ ID NO: 277930 - DNA, 717 bp, Homo sapiens
cgggttcctgagaattgtcaatcaggcgcgaggcagagaggagggtgtgacgttccaggagctagtggcctcttcaccctggtgacctctgttccgtattctgtcactgagagacgccctgggacatctgtggtggcttttgtcgcgctgggacctaccctgactacgggagttgggaggacccgggacaccgcacagccgggaaatggccctgtgttatggaactttctggggctaccctaagatgctggaagctgccaatctcatggagggcctagtggatatcggcccttgggtcactcttcccagaggacagcctgaggtgttggagtggggcctcccaaaggatcaggactcagtggcctttgaggatgtggctgtgaacttcacccatgaggagtgggctttgctgggtccatcacagaagaatctctacagagatgtgatgcgagaaaccattaggaacctgaactgtataggaatgaaatgggaaaaccagaacattgatgatcagcaccaaaatctcaggagaaatccaagagttgctgcctgctatatgcaagaagattggttccagtacaccctgagtatacctaaatccacagatgccagctcttttataaaatggaatattcgcatgtacctacccacattctcctgtatactctataaatgtctagattaattaaaatatctcatgcattgtaaaaaagctgt

SEQ ID NO: 277931 - DNA, 578 bp, Homo sapiens
ggtcactttctacacctagatgtggtggcacacgtctgtaattccagcatcagaattccagcatcagacagtgagtgcagacacagaataagagtggatttaccacgtcattgaataaatgcttggaaaccacagcatcatgggaagtttatgaaggtgagtataggttctcagtactgtgagtttcaaccttccttttctggacatatgggatgtttcaggactcagtggcctttgaggatgtggctgtgaacttcacccatgaggagtgggctttgctgggtccatcacagaagaatctctacagagatgtgatgcgagaaaccattaggaacctgaactgtataggaatgaaatgggaaaaccagaacattgatgatcagcaccaaaatctcaggagaaatccaagagaggtcgcgtgccacattgcaataagattggtcccagtacaccgggtgtccccatctccccaactcactcttcccttttattctatcagagttgtgtaaatacagtgccacattttctgggttttttaaattaacatttgcaaaaaaaaaaagtatcacgcaaagaaa

SEQ ID NO: 277932 - DNA, 516 bp, Homo sapiens
tggggcggctccggggccggggatggcggcggccgcggttgcggcggctccgggacgagtgagtggatcctgggaagcgctgtgaaatgggctggctcccgagccagccgggaggacacttactacagctgctcagaagcaccactggaaactcaggtattaggttgcagcgtctagggcacaccacagactttagcaagaaaaaaaacgagtgaaatctcagcttgatgaaaagagagtgcgttcccacctccagctctggtgcagttcccacggagcaaagcaaactcgactgaatccaagtgatctgtatctgccaaaaaggagaggacaagaaagctggtcacttagccgcctggctgttcacctgacccctggggttgggtctggggcgtgtctaatcagccgagatggtccctctgcttcttcaagcatgagcccagaatgcctgagcctgccctggcatcgcttacctggagaagcagggaatgcagaggaaagaagatgagatctggt

SEQ ID NO: 277933 - DNA, 503 bp, Homo sapiens
tggggcggctccggggccggggatggcggcggccgcggttgcggcggctccgggacgagtgagtggatcctgggaagcgctgtgaaatgggctggctcccgagccagccgggaggacacttactacagctgctcagaagcaccactggaaactcaggtaataccggcactttgaattccttgtttcaggaaaatatctgggatgtcacagtggaaaaacagaacagaatgtaatatagaaagctcttttcagatccaaagaactggaacctggttggaagaaataggcagcaaagttcatgtgcactgaagtgttcagaccaaaaagttgctttataacaatggacaaaagcatttgtgaaaggtgacaataagagaaaagggaaagagaactttcttatgaatcatacagatacggggaaaaaaacaggcatgtttagaggaatggaaccagaatttcatggagtggtgcctggagcagacctacagtggagaaggagctat

SEQ ID NO: 277934 - DNA, 1243 bp, Homo sapiens
tggggcggctccggggccggggatggcggcggccgcggttgcggcggctccgggacgagtgagtggatcctgggaagcgctgtgaaatgggctggctcccgagccagccgggaggacacttactacagctgctcagaagcaccactggaaactcagatgtgggcgccccagccagaagcagagaggggtacagggaagctacagagaagccccttctgatgccccagggagcaagtcgactccttccaggctccaggaacaccacaaagcaatatgaaacctgttcatgaaaggagtcaggaatgccttccaccaaagaaacgagacctccccgtgaccagcgaggatatggggagaactaccagctgctccactaaccacacaccctccagtgatgcttctgaatggtcccgaggggttgtggtggctgggcagagccaggcaggagccagagtcagcctggggggtgatggagctgaggccatcaccggtctgacagtggaccagtatggcatgctgtataaggtggctgtgccgcctgccaccttttcaccaactggactcccatctgtggtgaatatgagtcccttgcccccaacgtttaatgtagcgtcttcactaattcaacatccaggcatccactatcctccactccactatgctcagctcccatccacctcgctgcagttcattgggtctccttatagccttccctatgctgtgccacctaatttcctaccgagtcccctcctatctccttctgccaaccttgccacctctcaccttccacactttgtgccatatgcctcacttctggctgaaggagccactcctcccccacaggctccctccccggcccactcatttaacaaagctccctctgccacctccccatctgggcaattgccacatcattcaagtactcagccgctggaccttgctccaggtcggatgcccatttattatcagatgtccaggctacctgctgggtatactttgcatgaaacccctccagcaggtgccagcccagttcttacccctcaggagagccagtctgctctggaagcagctgctgcaaatggaggacagagaccacgagagcgaaatttagtaagacgggaaagtgaagcccttgactcccccaacagcaagggtgaaggccagggactggtgccagtggtagaatgtgtggtggatggacagttgttttcaggttctcagactccacgggtagaggtagcag

SEQ ID NO: 277935 - DNA, 700 bp, Homo sapiens
tggggcggctccggggccggggatggcggcggccgcggttgcggcggctccgggacgagtgagtggatcctgggaagcgctgtgaaatgggctggctcccgagccagccgggaggacacttactacagctgctcagaagcaccactggaaactcagatgtgggcgccccagccagaagcagagaggggtacagggaagctacagagaagccccttctgatgccccagggagcaagtcgactccttccaggctccaggaacaccacaaagcaatatgaaacctgttcatgaaaggagtcaggaatgccttccaccaaagaaacgagacctccccgtgaccagcgaggatatggggagaactaccagctgctccactaaccacacaccctccagtgatgcttctgaatggtcccgaggggttgtggtggctgggcagagccaggcaggagccagagtcagcctggggggtgatggagctgaggccatcaccggtctgacagtggaccagtatggcatgctgtataaggtggctgtgccgcctgccaccttttcaccaactggactcccatctgtggtgaatatgagtcccttgcccccaacgtttaatgtagcgtcttcactaattcaacatccaggcatccactatcctccactccactatgctcagcgttcctggacagtgcacgaccctggataacaca

SEQ ID NO: 277936 - DNA, 474 bp, Homo sapiens
tgtttttctctctgttcaactgcctgggcactctgggtaaatgtactgtttacctgtggagaagaagatgaggcaaggacgtgtatactctaatgctttggaattacctttcatggtgaccctggggagaattagaggtcaggcagccgcttactccattcctgtttctatcttctaggctcccgagccagccgggaggacacttactacagctgctcagaagcaccactggaaactcaggtaataccggcactttgaattccttgtttcaggaaaatatctgggatgtcacagtggaaaaacagaacagaatgtaatatagaaagctcttttcagatccaaagaactggaacctggttggaagaaataggcagcaaagttcatgtgcactgaagtgttcagaccaaaaagttgctttataacaatggacaaaagcatttgtgaaaggtgacaataagagaaaagggaaagaga

SEQ ID NO: 277937 - DNA, 6551 bp, Homo sapiens
caaaacatagagtaccccggcagccggcaagaggaagagagagtggcttccacatccccaatatcctagaggcggctgagccggaggcggtcgcacaaagcgggccccgggggccgttccagccgcggccgaccatagagatgcggctcccgccggctctgggtctggagataggaaagctgaggcccagagaagcgaagcgactgtgtctgtccaagaccacgcgccctcctgcccggaagataagcgtatttcttctctggtgcccacctgtctcctacctcaccctgccctcccgcaggtgaaggttcttaatcttgacggctcagcgtcctccttggctccccccggaggccatgtatggtcaagcttgaagattccccagaacagcgctaatattcacatttaagaagccaaaacacacaagtcggtggtgatgacagacccccttttggactcacagccagccagtagcaccggggagatggatggactgtgccctgagctattgctgatccccccgcctctctctaaccgtggaatcctggggcctgtccagagcccctgtccttcccgggaccctgcacctatacctactgagccaggctgcctgctggtagaggccacagcaactgaagagggaccagggaacatggagatcattgtggagacagtagctggaaccctgaccccaggtgctcctggagagaccccagctcccaaactgcctccaggagagagagaaccttcacaggaagcaggtacacccttgcctgggcaggagacagctgaagaggagaatgtagagaaagaagagaagagtgacacccagaaggactcccaaaaggctgtggataaaggccaaggggctcagcggctggaaggggatgtggtctctggcaccgagtccctcttcaagacccatatgtgtccagagtgtaagcgctgctttaagaagcggactcatctggtggagcacctgcatctccacttcccagaccccagcctccagtgccctaactgccagaagttcttcaccagtaagagcaagctcaagacccatctgctgcgggagctgggtgaaaaggcccaccactgcccactgtgccactacagtgcggtggagaggaatgcactcaaccgccacatggccagcatgcatgaagatatttccaacttctactcagacacctatgcctgtcctgtctgccgtgaggaattccgcctcagccaggccctaaaggagcacctcaagagccacacggcagcagccgcagcagagccattaccccttcgctgctttcaggagggctgcagctatgcagcacccgaccgcaaggccttcattaagcacctgaaggagacccatggggtgcgggctgtggagtgccgccatcactcatgtcccatgctctttgccacagccgaagccatggaggcccaccacaagagtcactacgccttccactgcccccactgtgattttgcttgttccaataagcacctattccgtaaacacaagaagcagggccaccctggcagtgaagagctgcgctgcaccttctgcccctttgccaccttcaacccagtggcttaccaggatcatgtaggcaagatgcatgctcatgaaaagatccaccagtgtcctgagtgcaactttgccactgcccacaagagggtgctcatccgacacatgcttctacatacgggtgagaagccccacaagtgtgagctgtgtgacttcacatgccgagacgtgagctacctatccaagcacatgctgacccactccaacaccaaggattacatgtgcactgaatgtggctatgtcaccaagtggaagcactacctccgtgtgcacatgcgaaaacatgcaggggacctcaggtatcagtgcaaccagtgctcctatcgctgtcaccgggctgatcagctgagcagccacaagctgcggcatcagggcaagtctctgatgtgtgaggtgtgtgccttcgcctgcaagcggaagtatgagctgcagaagcacatggcttcccagcaccaccctggcacaccggccccactctacccttgccactactgcagttaccagagccgccacaagcaggctgtgctgagccatgagaactgcaagcatacccgcctccgtgagttccactgtgccctctgtgactaccgcaccttcagcaacaccacactcttgttccataaacgcaaggcccatggctatgtacctggagaccaggcctggcagctccgctatgcaagccaggagccagaaggggccatgcagggcccaacacccccaccagattcagagccctcaaaccagctgtcagcccgacctgaggggccaggtcacgaacctgggactgtggtggaccccagcttggaccaggccctgccagagatgagtgaggaggtcaacactggaagacaggagggcagtgaggctccccatgggggtgacctgggtggcagtcccagcccagcagaggtggaggagggcagctgcacactacacctagaggccctgggagtagagctggagtctgtgactgagccaccccttgaggaggtcactgaaacagcccctatggagttcaggcccctgggactggaagggccagatggactggaaggaccagagctatctagctttgaaggtattgggacttctgacttgggtgctgaagaaaatccccttctggaaaagccagtgtctgagccctccacaaatcctccatccttagaggaggctcctaacaactgggtaggaaccttcaagacaactccacctgctgagacagcacccttgcccccattacctgagtcagagtcattactcaaggccctaaggagacaggacaaagaacaagcagaggcattggtgctagaggggcgggtgcagatggtagtgatccagggagaggggcgagccttccgctgcccacactgcccttttatcactcgccgggagaaggccctgaatctgcactccaggactgggtgccaaggccgccgagagcccctgctgtgccccgagtgtggggctagcttcaagcaacaacgcggcctcagcacccacctgctgaagaagtgccctgttctactcagaaagaacaagggcttgcccagaccagattcacccatccctctgcaacctgtgctcccaggtacccaggcctcagaggacacagaaagtgggaagcccccacctgcatcacaagaagcagagctactgcttccaaaagatgctcctttggagcttcccagggagccagaagaaacagaagagcctcttgccacagtctctggttccccagtccctcctgcaggaaactccttgcccacagaggcccctaagaagcactgctttgacccagtccctcctgcaggaaactcctcacccacggaggcccctaagaagcaccaccttgacccagtccctcctgcaggaaactcctcacccacagaggccctgaagaagcaccgctttgagcagggcaagtttcactgcaactcctgcccattcctttgttcccggctctcctctattacctctcacgtggctgaaggctgcagggggggacgtggcgggggaggaaaacgagggaccccccagacccagcctgatgtgtccccgttgagcaatggggactctgctcccccgaagaatgggagtacagagtccagctctggtgatggggatacagttctggttcaaaagcagaagggggctcgcttctcctgccctacatgtccctttagctgccagcaggaacgggctctgaggactcaccagatccggggctgccccctcgaggagtctggagagctgcactgcagcctctgcccattcactgctcctgctgccactgccttaaggctccaccagaagcggaggcaccccactgcagccccagcccgtgggccccggccccatctacagtgtggggactgtggcttcacctgtaaacagagccgttgcatgcagcagcaccggcggctcaagcacgagggggtgaagccccatcagtgccccttctgtgacttttcgaccaccagacggtaccggttagaggctcaccagtcccgacacacaggcattggccgcatcccctgcagctcttgcccccagacgtttggtaccaactcgaaactgcgcttgcaccggttaagggtacatgacaaaacacctacccacttctgtccactttgtgactatagtggctaccttcgccatgacatcactcgtcatgtcaacagctgccaccaaggcaccccagcctttgcctgctcccagtgtgaagcccagttcagctcagagacagcacttaagcagcatgctctgcgccgacaccccgagcctgcacagcctgcccctggctctcctgcagagaccactgagggccccctgcactgttcccgctgtgggttgctgtgccccagccctgccagcttacgaggacacacccgtaaacagcacccacggcttgagtgtggggcctgccaggaggccttccctagccgactggctctggatgagcaccggaggcagcagcatttcagccaccgctgtcagctctgtgactttgctgcccgggagcgggtgggcctggtaaagcactacctggaacagcatgaggagacttcagcagccgtggcagcctcagatggggatggggatgctggccagcccccgctacactgccccttttgtgacttcacatgccgccatcagctggtactagatcaccatgtgaaagggcatgggggcactcgtctctacaagtgcaccgattgtgcttacagcaccaagaaccgacagaagatcacctggcacagccgcatccacactggggaaaagccttaccactgtcacctctgcccctatgcctgtgctgatccctctcgtctcaagtaccacatgcggatccacaaggaggaacggaagtacctgtgccctgagtgtggctacaagtgcaagtgggtcaaccagctgaaataccacatgaccaagcatacaggactgaagccataccagtgtcccgagtgtgagtactgcaccaaccgggctgatgcactgcgtgtgcaccaggagacccggcatcgagaagcacgggctttcatgtgtgagcagtgtggcaaggccttcaagacgcgcttcctgctgcgcacccaccttcgcaagcacagtgaggccaaaccctatgtgtgcaatgtgtgccaccgtgctttccgctgggctgctggcctgcgccatcatgccctcacccacaccgaccgccaccccttcttttgccgcctctgcaactacaaggccaagcaaaagttccaggtggtcaagcacgtacgcaggcaccaccctgaccaagccgacccaaaccagggtgtgggcaaagaccccaccacccccacagtgcacctgcatgatgtgcagctggaggatcccagccctcctgctcctgccgctccccacactggacctgagggctgaaagcctgccccacctcctgtataggaagagggtatggtctgagatgtgcagactgggaccagcgctagcctgaggagctcagagcctaaggaaagactggcttttggggtacaagggtgactagaaccttcctgggactctggctatagtactttgaaattatcacccatataaaagagggacatggactataacgttgatttcttattgctgtacattgcgtttttaacctgcaagttctcagtttcttcaccatcactccatcaaagtccctggctataagatctggattttacccactccatcttctctttccttcttactgtgtcaattcctattttctttcagaatcttctaaaaacagttgtatctaaccgcatgtgctgttgtgcctaatgctctataaagcatgttaaacagaaagtggttactacattatagattcatccaaatccctgtcttaacatttccaggctgtcatcttgatcaactctgtcccctctcagacctctgcctcccttttgtcccttccatcttcactcagtattgatactgaaacaggcctaggtctgccttctccctgtccttgagccatcttgacccttgacctgctccctacttccaagctcctttgtctacctgtatctatagagggaggattgctacccactaagcctcctcctagaagcaactttagctcatcatcaatcctcagactggctcagcagctacactaaggtgttaaagcacaaggatactatggaaaggcagatgactagagaggaaaatctccaattcagaattctataactgcttcacagtataattctgtagtgccttactatataattgatcatctaaactgagacacactgggaaaacttaaagagggtactattaataattatgctgggacaacagacataaaccaggatggttccagccagactcttcaggaaggctgggaccacataaccttttgtctgcttttgccctgattcttaaaagccatactctgtgtccttcctatgtagcacatgcaagaggtctc

SEQ ID NO: 277938 - DNA, 509 bp, Homo sapiens
aaaattatttatcctaaccaataaatttatgggggggggggggggggggggggggggggggggggggggggggggggacgggggggggcgggggggggggggaggggggggggggggggggggtggtgaggagagaagggccaagcaaaagttccaggtggtcaagcacgtacgcaggcaccaccctgaccaagccgacccaaaccagggtgtgggcaaagaccccaccacccccacagtgcacctgcatgatgtgcagctggaggatcccagccctcctgctcctgccgctccccacactggacctgagggctgaaagcctgccccacctcctgtataggaagagggtatggtctgagatgtgcagactgggaccagcgctagcctgaggagctcagagcctaaggaaagactggcttttggggtacaagggtgactagaaccttcctgggactctggctatagtactttgaaattatcacccatataaaagagggacatggactata

SEQ ID NO: 277939 - DNA, 6470 bp, Homo sapiens
caaaacatagagtaccccggcagccggcaagaggaagagagagtggcttccacatccccaatatcctagaggcggctgagccggaggcggtcgcacaaagcgggccccgggggccgttccagccgcggccgaccatagagatgcggctcccgccggctctgggtctggagccttccaggttacaaaccgcctttccagttcgctggctcttatgatccagctcctgcccgacgatgtggacactgtcatcacctccattttacagataggaaagctgaggcccagagaagcgaagcgactgtgtctgtccaagaccacgcgcatttaagaagccaaaacacacaagtcggtggtgatgacagacccccttttggactcacagccagccagtagcaccggggagatggatggactgtgccctgagctattgctgatccccccgcctctctctaaccgtggaatcctggggcctgtccagagcccctgtccttcccgggaccctgcacctatacctactgagccaggctgcctgctggtagaggccacagcaactgaagagggaccagggaacatggagatcattgtggagacagtagctggaaccctgaccccaggtgctcctggagagaccccagctcccaaactgcctccaggagagagagaaccttcacaggaagcaggtacacccttgcctgggcaggagacagctgaagaggagaatgtagagaaagaagagaagagtgacacccagaaggactcccaaaaggctgtggataaaggccaaggggctcagcggctggaaggggatgtggtctctggcaccgagtccctcttcaagacccatatgtgtccagagtgtaagcgctgctttaagaagcggactcatctggtggagcacctgcatctccacttcccagaccccagcctccagtgccctaactgccagaagttcttcaccagtaagagcaagctcaagacccatctgctgcgggagctgggtgaaaaggcccaccactgcccactgtgccactacagtgcggtggagaggaatgcactcaaccgccacatggccagcatgcatgaagatatttccaacttctactcagacacctatgcctgtcctgtctgccgtgaggaattccgcctcagccaggccctaaaggagcacctcaagagccacacggcagcagccgcagcagagccattaccccttcgctgctttcaggagggctgcagctatgcagcacccgaccgcaaggccttcattaagcacctgaaggagacccatggggtgcgggctgtggagtgccgccatcactcatgtcccatgctctttgccacagccgaagccatggaggcccaccacaagagtcactacgccttccactgcccccactgtgattttgcttgttccaataagcacctattccgtaaacacaagaagcagggccaccctggcagtgaagagctgcgctgcaccttctgcccctttgccaccttcaacccagtggcttaccaggatcatgtaggcaagatgcatgctcatgaaaagatccaccagtgtcctgagtgcaactttgccactgcccacaagagggtgctcatccgacacatgcttctacatacgggtgagaagccccacaagtgtgagctgtgtgacttcacatgccgagacgtgagctacctatccaagcacatgctgacccactccaacaccaaggattacatgtgcactgaatgtggctatgtcaccaagtggaagcactacctccgtgtgcacatgcgaaaacatgcaggggacctcaggtatcagtgcaaccagtgctcctatcgctgtcaccgggctgatcagctgagcagccacaagctgcggcatcagggcaagtctctgatgtgtgaggtgtgtgccttcgcctgcaagcggaagtatgagctgcagaagcacatggcttcccagcaccaccctggcacaccggccccactctacccttgccactactgcagttaccagagccgccacaagcaggctgtgctgagccatgagaactgcaagcatacccgcctccgtgagttccactgtgccctctgtgactaccgcaccttcagcaacaccacactcttgttccataaacgcaaggcccatggctatgtacctggagaccaggcctggcagctccgctatgcaagccaggagccagaaggggccatgcagggcccaacacccccaccagattcagagccctcaaaccagctgtcagcccgacctgaggggccaggtcacgaacctgggactgtggtggaccccagcttggaccaggccctgccagagatgagtgaggaggtcaacactggaagacaggagggcagtgaggctccccatgggggtgacctgggtggcagtcccagcccagcagaggtggaggagggcagctgcacactacacctagaggccctgggagtagagctggagtctgtgactgagccaccccttgaggaggtcactgaaacagcccctatggagttcaggcccctgggactggaagggccagatggactggaaggaccagagctatctagctttgaaggtattgggacttctgacttgggtgctgaagaaaatccccttctggaaaagccagtgtctgagccctccacaaatcctccatccttagaggaggctcctaacaactgggtaggaaccttcaagacaactccacctgctgagacagcacccttgcccccattacctgagtcagagtcattactcaaggccctaaggagacaggacaaagaacaagcagaggcattggtgctagaggggcgggtgcagatggtagtgatccagggagaggggcgagccttccgctgcccacactgcccttttatcactcgccgggagaaggccctgaatctgcactccaggactgggtgccaaggccgccgagagcccctgctgtgccccgagtgtggggctagcttcaagcaacaacgcggcctcagcacccacctgctgaagaagtgccctgttctactcagaaagaacaagggcttgcccagaccagattcacccatccctctgcaacctgtgctcccaggtacccaggcctcagaggacacagaaagtgggaagcccccacctgcatcacaagaagcagagctactgcttccaaaagatgctcctttggagcttcccagggagccagaagaaacagaagagcctcttgccacagtctctggttccccagtccctcctgcaggaaactccttgcccacagaggcccctaagaagcactgctttgacccagtccctcctgcaggaaactcctcacccacggaggcccctaagaagcaccaccttgacccagtccctcctgcaggaaactcctcacccacagaggccctgaagaagcaccgctttgagcagggcaagtttcactgcaactcctgcccattcctttgttcccggctctcctctattacctctcacgtggctgaaggctgcagggggggacgtggcgggggaggaaaacgagggaccccccagacccagcctgatgtgtccccgttgagcaatggggactctgctcccccgaagaatgggagtacagagtccagctctggtgatggggatacagttctggttcaaaagcagaagggggctcgcttctcctgccctacatgtccctttagctgccagcaggaacgggctctgaggactcaccagatccggggctgccccctcgaggagtctggagagctgcactgcagcctctgcccattcactgctcctgctgccactgccttaaggctccaccagaagcggaggcaccccactgcagccccagcccgtgggccccggccccatctacagtgtggggactgtggcttcacctgtaaacagagccgttgcatgcagcagcaccggcggctcaagcacgagggggtgaagccccatcagtgccccttctgtgacttttcgaccaccagacggtaccggttagaggctcaccagtcccgacacacaggcattggccgcatcccctgcagctcttgcccccagacgtttggtaccaactcgaaactgcgcttgcaccggttaagggtacatgacaaaacacctacccacttctgtccactttgtgactatagtggctaccttcgccatgacatcactcgtcatgtcaacagctgccaccaaggcaccccagcctttgcctgctcccagtgtgaagcccagttcagctcagagacagcacttaagcagcatgctctgcgccgacaccccgagcctgcacagcctgcccctggctctcctgcagagaccactgagggccccctgcactgttcccgctgtgggttgctgtgccccagccctgccagcttacgaggacacacccgtaaacagcacccacggcttgagtgtggggcctgccaggaggccttccctagccgactggctctggatgagcaccggaggcagcagcatttcagccaccgctgtcagctctgtgactttgctgcccgggagcgggtgggcctggtaaagcactacctggaacagcatgaggagacttcagcagccgtggcagcctcagatggggatggggatgctggccagcccccgctacactgccccttttgtgacttcacatgccgccatcagctggtactagatcaccatgtgaaagggcatgggggcactcgtctctacaagtgcaccgattgtgcttacagcaccaagaaccgacagaagatcacctggcacagccgcatccacactggggaaaagccttaccactgtcacctctgcccctatgcctgtgctgatccctctcgtctcaagtaccacatgcggatccacaaggaggaacggaagtacctgtgccctgagtgtggctacaagtgcaagtgggtcaaccagctgaaataccacatgaccaagcatacaggactgaagccataccagtgtcccgagtgtgagtactgcaccaaccgggctgatgcactgcgtgtgcaccaggagacccggcatcgagaagcacgggctttcatgtgtgagcagtgtggcaaggccttcaagacgcgcttcctgctgcgcacccaccttcgcaagcacagtgaggccaaaccctatgtgtgcaatgtgtgccaccgtgctttccgctgggctgctggcctgcgccatcatgccctcacccacaccgaccgccaccccttcttttgccgcctctgcaactacaaggccaagcaaaagttccaggtggtcaagcacgtacgcaggcaccaccctgaccaagccgacccaaaccagggtgtgggcaaagaccccaccacccccacagtgcacctgcatgatgtgcagctggaggatcccagccctcctgctcctgccgctccccacactggacctgagggctgaaagcctgccccacctcctgtataggaagagggtatggtctgagatgtgcagactgggaccagcgctagcctgaggagctcagagcctaaggaaagactggcttttggggtacaagggtgactagaaccttcctgggactctggctatagtactttgaaattatcacccatataaaagagggacatggactataacgttgatttcttattgctgtacattgcgtttttaacctgcaagttctcagtttcttcaccatcactccatcaaagtccctggctataagatctggattttacccactccatcttctctttccttcttactgtgtcaattcctattttctttcagaatcttctaaaaacagttgtatctaaccgcatgtgctgttgtgcctaatgctctataaagcatgttaaacagaaagtggttactacattatagattcatccaaatccctgtcttaacatttccaggctgtcatcttgatcaactctgtcccctctcagacctctgcctcccttttgtcccttccatcttcactcagtattgatactgaaacaggcctaggtctgccttctccctgtccttgagccatcttgacccttgacctgctccctacttccaagctcctttgtctacctgtatctatagagggaggattgctacccactaagcctcctcctagaagcaactttagctcatcatcaatcctcagactggctcagcagctacactaaggtgttaaagcacaaggatactatggaaaggcagatgactagagaggaaaatctccaattcagaattctataactgcttcacagtataattctgtagtgccttactatataattgatcatctaaactgagacacactgggaaaacttaaagagggtactattaataattatgctgggacaacagacataaaccaggatggttccagccagactcttcaggaaggctgggaccacataaccttttgtctgcttttgccctgattcttaaaagccatactctgtgtccttcctatgtagcacatgcaagaggtctc

SEQ ID NO: 277940 - DNA, 6521 bp, Homo sapiens
caaaacatagagtaccccggcagccggcaagaggaagagagagtggcttccacatccccaatatcctagaggcggctgagccggaggcggtcgcacaaagcgggccccgggggccgttccagccgcggccgaccatagagatgcggctcccgccggctctgggtctggagccttccaggttacaaaccgcctttccagttcgctggctcttatgatccagctcctgcccgacgatgtggacactgtcatcacctccattttacagataggaaagctgaggcccagagaagcgaagcgactgtgtctgtccaagaccacgcgccctcctgcccggaagataagcgtatttcttctctggtgcccacctgtctcctacctcaccctgccctcccgcaggtgaaggttcttaatcttgacggctcagcgtcctccttggctccccccggaggccatgtatggtcaagcttgaagattccccagaacagcgctaatattcacatttaagaagccaaaacacacaagtcggtggtgatgacagacccccttttggactcacagccagccagtagcaccggggagatggatggactgtgccctgagctattgctgatccccccgcctctctctaaccgtggaatcctggggcctgtccagagcccctgtccttcccgggaccctgcacctatacctactgagccaggctgcctgctggtagaggccacagcaactgaagagggaccagggaacatggagatcattgtggagacagtagctggaaccctgaccccaggtgctcctggagagaccccagctcccaaactgcctccaggagagagagaaccttcacaggaagcaggtacacccttgcctgggcaggagacagctgaagaggagaatgtagagaaagaagagaagagtgacacccagaaggactcccaaaaggctgtggataaaggccaaggggctcagcggctggaaggggatgtggtctctggcaccgagtccctcttcaagacccatatgtgtccagagtgtaagcgctgctttaagaagcggactcatctggtggagcacctgcatctccacttcccagaccccagcctccagtgccctaactgccagaagttcttcaccagtaagagcaagctcaagacccatctgctgcgggagctgggtgaaaaggcccaccactgcccactgtgccactacagtgcggtggagaggaatgcactcaaccgccacatggccagcatgcatgaagatatttccaacttctactcagacacctatgcctgtcctgtctgccgtgaggaattccgcctcagccaggccctaaaggagcacctcaagagccacacggcagcagccgcagcagagccattaccccttcgctgctttcaggagggctgcagctatgcagcacccgaccgcaaggccttcattaagcacctgaaggagacccatggggtgcgggctgtggagtgccgccatcactcatgtcccatgctctttgccacagccgaagccatggaggcccaccacaagagtcactacgccttccactgcccccactgtgattttgcttgttccaataagcacctattccgtaaacacaagaagcagggccaccctggcagtgaagagctgcgctgcaccttctgcccctttgccaccttcaacccagtggcttaccaggatcatgtaggcaagatgcatgctcatgaaaagatccaccagtgtcctgagtgcaactttgccactgcccacaagagggtgctcatccgacacatgcttctacatacgggtgagaagccccacaagtgtgagctgtgtgacttcacatgccgagacgtgagctacctatccaagcacatgctgacccactccaacaccaaggattacatgtgcactgaatgtggctatgtcaccaagtggaagcactacctccgtgtgcacatgcgaaaacatgcaggggacctcaggtatcagtgcaaccagtgctcctatcgctgtcaccgggctgatcagctgagcagccacaagctgcggcatcagggcaagtctctgatgtgtgaggtgtgtgccttcgcctgcaagcggaagtatgagctgcagaagcacatggcttcccagcaccaccctggcacaccggccccactctacccttgccactactgcagttaccagagccgccacaagcaggctgtgctgagccatgagaactgcaagcatacccgcctccgtgagttccactgtgccctctgtgactaccgcaccttcagcaacaccacactcttgttccataaacgcaaggcccatggctatgtacctggagaccaggcctggcagctccgctatgcaagccaggagccagaaggggccatgcagggcccaacacccccaccagattcagagccctcaaaccagctgtcagcccgacctgaggggccaggtcacgaacctgggactgtggtggaccccagcttggaccaggccctgccagagatgagtgaggaggtcaacactggaagacaggagggcagtgaggctccccatgggggtgacctgggtggcagtcccagcccagcagaggtggaggagggcagctgcacactacacctagaggccctgggagtagagctggagtctgtgactgagccaccccttgaggaggtcactgaaacagcccctatggagttcaggcccctgggactggaagggccagatggactggaaggaccagagctatctagctttgaaggtattgggacttctgacttgggtgctgaagaaaatccccttctggaaaagccagtgtctgagccctccacaaatcctccatccttagaggaggctcctaacaactgggtaggaaccttcaagacaactccacctgctgagacagcacccttgcccccattacctgagtcagagtcattactcaaggccctaaggagacaggacaaagaacaagcagaggcattggtgctagaggggcgggtgcagatggtagtgatccagggagaggggcgagccttccgctgcccacactgcccttttatcactcgccgggagaaggccctgaatctgcactccaggactgggtgccaaggccgccgagagcccctgctgtgccccgagtgtggggctagcttcaagcaacaacgcggcctcagcacccacctgctgaagaagtgccctgttctactcagaaagaacaagggcttgcccagaccagattcacccatccctctgcaacctgtgctcccaggtacccaggcctcagaggacacagaaagtgggaagcccccacctgcatcacaagaagcagagctactgcttccaaaagatgctcctttggagcttcccagggagccagaagaaacagaagagcctcttgccacagtctctggttccccagtccctcctgcaggaaactccttgcccacagaggcccctaagaagcactgctttgacccagtccctcctgcaggaaactcctcacccacggaggcccctaagaagcaccaccttgacccagtccctcctgcaggaaactcctcacccacagaggccctgaagaagcaccgctttgagcagggcaagtttcactgcaactcctgcccattcctttgttcccggctctcctctattacctctcacgtggctgaaggctgcagggggggacgtggcgggggaggaaaacgagggaccccccagacccagcctgatgtgtccccgttgagcaatggggactctgctcccccgaagaatgggagtacagagtccagctctggtgatggggatacagttctggttcaaaagcagaagggggctcgcttctcctgccctacatgtccctttagctgccagcaggaacgggctctgaggactcaccagatccggggctgcccatctacagtgtggggactgtggcttcacctgtaaacagagccgttgcatgcagcagcaccggcggctcaagcacgagggggtgaagccccatcagtgccccttctgtgacttttcgaccaccagacggtaccggttagaggctcaccagtcccgacacacaggcattggccgcatcccctgcagctcttgcccccagacgtttggtaccaactcgaaactgcgcttgcaccggttaagggtacatgacaaaacacctacccacttctgtccactttgtgactatagtggctaccttcgccatgacatcactcgtcatgtcaacagctgccaccaaggcaccccagcctttgcctgctcccagtgtgaagcccagttcagctcagagacagcacttaagcagcatgctctgcgccgacaccccgagcctgcacagcctgcccctggctctcctgcagagaccactgagggccccctgcactgttcccgctgtgggttgctgtgccccagccctgccagcttacgaggacacacccgtaaacagcacccacggcttgagtgtggggcctgccaggaggccttccctagccgactggctctggatgagcaccggaggcagcagcatttcagccaccgctgtcagctctgtgactttgctgcccgggagcgggtgggcctggtaaagcactacctggaacagcatgaggagacttcagcagccgtggcagcctcagatggggatggggatgctggccagcccccgctacactgccccttttgtgacttcacatgccgccatcagctggtactagatcaccatgtgaaagggcatgggggcactcgtctctacaagtgcaccgattgtgcttacagcaccaagaaccgacagaagatcacctggcacagccgcatccacactggggaaaagccttaccactgtcacctctgcccctatgcctgtgctgatccctctcgtctcaagtaccacatgcggatccacaaggaggaacggaagtacctgtgccctgagtgtggctacaagtgcaagtgggtcaaccagctgaaataccacatgaccaagcatacaggactgaagccataccagtgtcccgagtgtgagtactgcaccaaccgggctgatgcactgcgtgtgcaccaggagacccggcatcgagaagcacgggctttcatgtgtgagcagtgtggcaaggccttcaagacgcgcttcctgctgcgcacccaccttcgcaagcacagtgaggccaaaccctatgtgtgcaatgtgtgccaccgtgctttccgctgggctgctggcctgcgccatcatgccctcacccacaccgaccgccaccccttcttttgccgcctctgcaactacaaggccaagcaaaagttccaggtggtcaagcacgtacgcaggcaccaccctgaccaagccgacccaaaccagggtgtgggcaaagaccccaccacccccacagtgcacctgcatgatgtgcagctggaggatcccagccctcctgctcctgccgctccccacactggacctgagggctgaaagcctgccccacctcctgtataggaagagggtatggtctgagatgtgcagactgggaccagcgctagcctgaggagctcagagcctaaggaaagactggcttttggggtacaagggtgactagaaccttcctgggactctggctatagtactttgaaattatcacccatataaaagagggacatggactataacgttgatttcttattgctgtacattgcgtttttaacctgcaagttctcagtttcttcaccatcactccatcaaagtccctggctataagatctggattttacccactccatcttctctttccttcttactgtgtcaattcctattttctttcagaatcttctaaaaacagttgtatctaaccgcatgtgctgttgtgcctaatgctctataaagcatgttaaacagaaagtggttactacattatagattcatccaaatccctgtcttaacatttccaggctgtcatcttgatcaactctgtcccctctcagacctctgcctcccttttgtcccttccatcttcactcagtattgatactgaaacaggcctaggtctgccttctccctgtccttgagccatcttgacccttgacctgctccctacttccaagctcctttgtctacctgtatctatagagggaggattgctacccactaagcctcctcctagaagcaactttagctcatcatcaatcctcagactggctcagcagctacactaaggtgttaaagcacaaggatactatggaaaggcagatgactagagaggaaaatctccaattcagaattctataactgcttcacagtataattctgtagtgccttactatataattgatcatctaaactgagacacactgggaaaacttaaagagggtactattaataattatgctgggacaacagacataaaccaggatggttccagccagactcttcaggaaggctgggaccacataaccttttgtctgcttttgccctgattcttaaaagccatactctgtgtccttcctatgtagcacatgcaagaggtctc

SEQ ID NO: 277941 - DNA, 1865 bp, Homo sapiens
agctgtgatcacaccagttcactccagcctgggcaacagagtgagaccctgtctctttaaaaaaaaaaaaaaaaaaatccctagcaagtaaactgaagattaagaaaaacaaagttccataatgtctgcttgccatatgataaaggcatagaacagggcaagaataacctggataataacagctaacatttattgagcacttactatattttctgctttttgctcttgcctcttccagtaccacatgcggatccacaaggaggaacggaagtacctgtgccctgagtgtggctacaagtgcaagtgggtcaaccagctgaaataccacatgaccaagcatacaggactgaagccataccagtgtcccgagtgtgagtactgcaccaaccgggctgatgcactgcgtgtgcaccaggagacccggcatcgagaagcacgggctttcatgtgtgagcagtgtggcaaggccttcaagacgcgcttcctgctgcgcacccaccttcgcaagcacagtgaggccaaaccctatgtgtgcaatgtgtgccaccgtgctttccgctgggctgctggcctgcgccatcatgccctcacccacaccgaccgccaccccttcttttgccgcctctgcaactacaaggccaagcaaaagttccaggtggtcaagcacgtacgcaggcaccaccctgaccaagccgacccaaaccagggtgtgggcaaagaccccaccacccccacagtgcacctgcatgatgtgcagctggaggatcccagccctcctgctcctgccgctccccacactggacctgagggctgaaagcctgccccacctcctgtataggaagagggtatggtctgagatgtgcagactgggaccagcgctagcctgaggagctcagagcctaaggaaagactggcttttggggtacaagggtgactagaaccttcctgggactctggctatagtactttgaaattatcacccatataaaagagggacatggactataacgttgatttcttattgctgtacattgcgtttttaacctgcaagttctcagtttcttcaccatcactccatcaaagtccctggctataagatctggattttacccactccatcttctctttccttcttactgtgtcaattcctattttctttcagaatcttctaaaaacagttgtatctaaccgcatgtgctgttgtgcctaatgctctataaagcatgttaaacagaaagtggttactacattatagattcatccaaatccctgtcttaacatttccaggctgtcatcttgatcaactctgtcccctctcagacctctgcctcccttttgtcccttccatcttcactcagtattgatactgaaacaggcctaggtctgccttctccctgtccttgagccatcttgacccttgacctgctccctacttccaagctcctttgtctacctgtatctatagagggaggattgctacccactaagcctcctcctagaagcaactttagctcatcatcaatcctcagactggctcagcagctacactaaggtgttaaagcacaaggatactatggaaaggcagatgactagagaggaaaatctccaattcagaattctataactgcttcacagtataattctgtagtgccttactatataattgatcatctaaactgagacacactgggaaaacttaaagagggtactattaataattatgctgggacaacagacataaaccaggatggttccagccagactcttcaggaaggctgggaccacataaccttttgtctgcttttgccctgattcttaaaagccatactctgtgtccttcctatgtagcacatgcaagaggtctc

SEQ ID NO: 277942 - DNA, 3037 bp, Homo sapiens
caaaacatagagtaccccggcagccggcaagaggaagagagagtggcttccacatccccaatatcctagaggcggctgagccggaggcggtcgcacaaagcgggccccgggggccgttccagccgcggccgaccatagagatgcggctcccgccggctctgggtctggagccttccaggttacaaaccgcctttccagttcgctggctcttatgatccagctcctgcccgacgatgtggacactgtcatcacctccattttacagataggaaagctgaggcccagagaagcgaagcgactgtgtctgtccaagaccacgcgccctcctgcccggaagataagcgtatttcttctctggtgcccacctgtctcctacctcaccctgccctcccgcaggtgaaggttcttaatcttgacggctcagcgtcctccttggctccccccggaggccatgtatggtcaagcttgaagattccccagaacagcgctaatattcacatttaagaagccaaaacacacaagtcggtggtgatgacagacccccttttggactcacagccagccagtagcaccggggagatggatggactgtgccctgagctattgctgatccccccgcctctctctaaccgtggaatcctggggcctgtccagagcccctgtccttcccgggaccctgcacctatacctactgagccaggctgcctgctggtagaggccacagcaactgaagagggaccagggaacatggagatcattgtggagacagtagctggaaccctgaccccaggtgctcctggagagaccccagctcccaaactgcctccaggagagagagaaccttcacaggaagcaggtacacccttgcctgggcaggagacagctgaagaggagaatgtagagaaagaagagaagagtgacacccagaaggactcccaaaaggctgtggataaaggccaaggggctcagcggctggaaggggatgtggtctctggcaccgagtccctcttcaagacccatatgtgtccagagtgtaagcgctgctttaagaagcggactcatctggtggagcacctgcatctccacttcccagaccccagcctccagtgccctaactgccagaagttcttcaccagtaagagcaagctcaagacccatctgctgcgggagctgggtgaaaaggcccaccactgcccactgtgccactacagtgcggtggagaggaatgcactcaaccgccacatggccagcatgcatgaagatatttccaacttctactcagacacctatgcctgtcctgtctgccgtgaggaattccgcctcagccaggccctaaaggagcacctcaagagccacacggcagcagccgcagcagagccattaccccttcgctgctttcaggagggctgcagctatgcagcacccgaccgcaaggccttcattaagcacctgaaggagacccatggggtgcgggctgtggagtgccgccatcactcatgtcccatgctctttgccacagccgaagccatggaggcccaccacaagagtcactacgccttccactgcccccactgtgattttgcttgttccaataagcacctattccgtaaacacaagaagcagggccaccctggcagtgaagagctgcgctgcaccttctgcccctttgccaccttcaacccagtggcttaccaggatcatgtaggcaagatgcatgctcatgaaaagatccaccagtgtcctgagtgcaactttgccactgcccacaagagggtgctcatccgacacatgcttctacatacgggtgagaagccccacaagtgtgagctgtgtgacttcacatgccgagacgtgagctacctatccaagcacatgctgacccactccaacaccaaggattacatgtgcactgaatgtggctatgtcaccaagtggaagcactacctccgtgtgcacatgcgaaaacatgcaggggacctcaggtatcagtgcaaccagtgctcctatcgctgtcaccgggctgatcagctgagcagccacaagctgcggcatcagggcaagtctctgatgtgtgaggtgtgtgccttcgcctgcaagcggaagtatgagctgcagaagcacatggcttcccagcaccaccctggcacaccggccccactctacccttgccactactgcagttaccagagccgccacaagcaggctgtgctgagccatgagaactgcaagcatacccgcctccgtgagttccactgtgccctctgtgactaccgcaccttcagcaacaccacactcttgttccataaacgcaaggcccatggctatgtacctggagaccaggcctggcagctccgctatgcaagccaggagccagaaggggccatgcagggcccaacacccccaccagattcagagccctcaaaccagctgtcagcccgacctgaggggccaggtcacgaacctgggactgtggtggaccccagcttggaccaggccctgccagagatgagtgaggaggtcaacactggaagacaggagggcagtgaggctccccatgggggtgacctgggtggcagtcccagcccagcagaggtggaggagggcagctgcacactacacctagaggccctgggagtagagctggagtctgtgactgagccaccccttgaggaggtcactgaaacagcccctatggagttcaggcccctgggactggaagggccagatggactggaaggaccagagctatctagctttgaaggtattgggacttctgacttgggtgctgaagaaaatccccttctggaaaagccagtgtctgagccctccacaaatcctccatccttagaggaggctcctaacaactgggtaggaaccttcaagacaactccacctgctgagacagcacccttgcccccattacctgagtcagagtcattactcaaggccctaaggagacaggacaaagaaccttcctgggactctggctatagtactttgaaattatcacccatataaaagagggacatggactata

SEQ ID NO: 277943 - DNA, 495 bp, Homo sapiens
gacgatgtggacactgtcatcacctccattttacagataggaaagctgaggcccagagaagcgaagcgactgtgtctgtccaagaccacgcggtgagtcagagccagaggcaggtgggaacctgggtcgctaggccggggcccgttgtttctccaggccttctctctgccttagtctgtcctttctcttcctcagccctcctgcccggaagataagcgtatttcttctctggtgcccacctgtctcctacctcaccctgccctcccgcaggtgaaggttcttaatcttgacggctcagcgtcctccttggctccccccggaggccatgtatggtcaagcttgaagattccccagaacagcgctaatattcagtaagtggaggctgcagtttccagagaatccctctgaccacgggagtgcactttccagccaccttgtgaatccctgtgatctgttgttttgagtccatgggattctggaaatagggactatcag

SEQ ID NO: 277944 - DNA, 6646 bp, Homo sapiens
caaaacatagagtaccccggcagccggcaagaggaagagagagtggcttccacatccccaatatcctagaggcggctgagccggaggcggtcgcacaaagcgggccccgggggccgttccagccgcggccgaccatagagatgcggctcccgccggctctgggtctggagccttccaggttacaaaccgcctttccagttcgctggctcttatgatccagctcctgcccgacgatgtggacactgtcatcacctccattttacagataggaaagctgaggcccagagaagcgaagcgactgtgtctgtccaagaccacgcgccctcctgcccggaagataagcgtatttcttctctggtgcccacctgtctcctacctcaccctgccctcccgcaggtgaaggttcttaatcttgacggctcagcgtcctccttggctccccccggaggccatgtatggtcaagcttgaagattccccagaacagcgctaatattcacatttaagaagccaaaacacacaagtcggtggtgatgacagacccccttttggactcacagccagccagtagcaccggggagatggatggactgtgccctgagctattgctgatccccccgcctctctctaaccgtggaatcctggggcctgtccagagcccctgtccttcccgggaccctgcacctatacctactgagccaggctgcctgctggtagaggccacagcaactgaagagggaccagggaacatggagatcattgtggagacagtagctggaaccctgaccccaggtgctcctggagagaccccagctcccaaactgcctccaggagagagagaaccttcacaggaagcaggtacacccttgcctgggcaggagacagctgaagaggagaatgtagagaaagaagagaagagtgacacccagaaggactcccaaaaggctgtggataaaggccaaggggctcagcggctggaaggggatgtggtctctggcaccgagtccctcttcaagacccatatgtgtccagagtgtaagcgctgctttaagaagcggactcatctggtggagcacctgcatctccacttcccagaccccagcctccagtgccctaactgccagaagttcttcaccagtaagagcaagctcaagacccatctgctgcgggagctgggtgaaaaggcccaccactgcccactgtgccactacagtgcggtggagaggaatgcactcaaccgccacatggccagcatgcatgaagatatttccaacttctactcagacacctatgcctgtcctgtctgccgtgaggaattccgcctcagccaggccctaaaggagcacctcaagagccacacggcagcagccgcagcagagccattaccccttcgctgctttcaggagggctgcagctatgcagcacccgaccgcaaggccttcattaagcacctgaaggagacccatggggtgcgggctgtggagtgccgccatcactcatgtcccatgctctttgccacagccgaagccatggaggcccaccacaagagtcactacgccttccactgcccccactgtgattttgcttgttccaataagcacctattccgtaaacacaagaagcagggccaccctggcagtgaagagctgcgctgcaccttctgcccctttgccaccttcaacccagtggcttaccaggatcatgtaggcaagatgcatgctcatgaaaagatccaccagtgtcctgagtgcaactttgccactgcccacaagagggtgctcatccgacacatgcttctacatacgggtgagaagccccacaagtgtgagctgtgtgacttcacatgccgagacgtgagctacctatccaagcacatgctgacccactccaacaccaaggattacatgtgcactgaatgtggctatgtcaccaagtggaagcactacctccgtgtgcacatgcgaaaacatgcaggggacctcaggtatcagtgcaaccagtgctcctatcgctgtcaccgggctgatcagctgagcagccacaagctgcggcatcagggcaagtctctgatgtgtgaggtgtgtgccttcgcctgcaagcggaagtatgagctgcagaagcacatggcttcccagcaccaccctggcacaccggccccactctacccttgccactactgcagttaccagagccgccacaagcaggctgtgctgagccatgagaactgcaagcatacccgcctccgtgagttccactgtgccctctgtgactaccgcaccttcagcaacaccacactcttgttccataaacgcaaggcccatggctatgtacctggagaccaggcctggcagctccgctatgcaagccaggagccagaaggggccatgcagggcccaacacccccaccagattcagagccctcaaaccagctgtcagcccgacctgaggggccaggtcacgaacctgggactgtggtggaccccagcttggaccaggccctgccagagatgagtgaggaggtcaacactggaagacaggagggcagtgaggctccccatgggggtgacctgggtggcagtcccagcccagcagaggtggaggagggcagctgcacactacacctagaggccctgggagtagagctggagtctgtgactgagccaccccttgaggaggtcactgaaacagcccctatggagttcaggcccctgggactggaagggccagatggactggaaggaccagagctatctagctttgaaggtattgggacttctgacttgggtgctgaagaaaatccccttctggaaaagccagtgtctgagccctccacaaatcctccatccttagaggaggctcctaacaactgggtaggaaccttcaagacaactccacctgctgagacagcacccttgcccccattacctgagtcagagtcattactcaaggccctaaggagacaggacaaagaacaagcagaggcattggtgctagaggggcgggtgcagatggtagtgatccagggagaggggcgagccttccgctgcccacactgcccttttatcactcgccgggagaaggccctgaatctgcactccaggactgggtgccaaggccgccgagagcccctgctgtgccccgagtgtggggctagcttcaagcaacaacgcggcctcagcacccacctgctgaagaagtgccctgttctactcagaaagaacaagggcttgcccagaccagattcacccatccctctgcaacctgtgctcccaggtacccaggcctcagaggacacagaaagtgggaagcccccacctgcatcacaagaagcagagctactgcttccaaaagatgctcctttggagcttcccagggagccagaagaaacagaagagcctcttgccacagtctctggttccccagtccctcctgcaggaaactccttgcccacagaggcccctaagaagcactgctttgacccagtccctcctgcaggaaactcctcacccacggaggcccctaagaagcaccaccttgacccagtccctcctgcaggaaactcctcacccacagaggccctgaagaagcaccgctttgagcagggcaagtttcactgcaactcctgcccattcctttgttcccggctctcctctattacctctcacgtggctgaaggctgcagggggggacgtggcgggggaggaaaacgagggaccccccagacccagcctgatgtgtccccgttgagcaatggggactctgctcccccgaagaatgggagtacagagtccagctctggtgatggggatacagttctggttcaaaagcagaagggggctcgcttctcctgccctacatgtccctttagctgccagcaggaacgggctctgaggactcaccagatccggggctgccccctcgaggagtctggagagctgcactgcagcctctgcccattcactgctcctgctgccactgccttaaggctccaccagaagcggaggcaccccactgcagccccagcccgtgggccccggccccatctacagtgtggggactgtggcttcacctgtaaacagagccgttgcatgcagcagcaccggcggctcaagcacgagggggtgaagccccatcagtgccccttctgtgacttttcgaccaccagacggtaccggttagaggctcaccagtcccgacacacaggcattggccgcatcccctgcagctcttgcccccagacgtttggtaccaactcgaaactgcgcttgcaccggttaagggtacatgacaaaacacctacccacttctgtccactttgtgactatagtggctaccttcgccatgacatcactcgtcatgtcaacagctgccaccaaggcaccccagcctttgcctgctcccagtgtgaagcccagttcagctcagagacagcacttaagcagcatgctctgcgccgacaccccgagcctgcacagcctgcccctggctctcctgcagagaccactgagggccccctgcactgttcccgctgtgggttgctgtgccccagccctgccagcttacgaggacacacccgtaaacagcacccacggcttgagtgtggggcctgccaggaggccttccctagccgactggctctggatgagcaccggaggcagcagcatttcagccaccgctgtcagctctgtgactttgctgcccgggagcgggtgggcctggtaaagcactacctggaacagcatgaggagacttcagcagccgtggcagcctcagatggggatggggatgctggccagcccccgctacactgccccttttgtgacttcacatgccgccatcagctggtactagatcaccatgtgaaagggcatgggggcactcgtctctacaagtgcaccgattgtgcttacagcaccaagaaccgacagaagatcacctggcacagccgcatccacactggggaaaagccttaccactgtcacctctgcccctatgcctgtgctgatccctctcgtctcaagtaccacatgcggatccacaaggaggaacggaagtacctgtgccctgagtgtggctacaagtgcaagtgggtcaaccagctgaaataccacatgaccaagcatacaggactgaagccataccagtgtcccgagtgtgagtactgcaccaaccgggctgatgcactgcgtgtgcaccaggagacccggcatcgagaagcacgggctttcatgtgtgagcagtgtggcaaggccttcaagacgcgcttcctgctgcgcacccaccttcgcaagcacagtgaggccaaaccctatgtgtgcaatgtgtgccaccgtgctttccgctgggctgctggcctgcgccatcatgccctcacccacaccgaccgccaccccttcttttgccgcctctgcaactacaaggccaagcaaaagttccaggtggtcaagcacgtacgcaggcaccaccctgaccaagccgacccaaaccagggtgtgggcaaagaccccaccacccccacagtgcacctgcatgatgtgcagctggaggatcccagccctcctgctcctgccgctccccacactggacctgagggctgaaagcctgccccacctcctgtataggaagagggtatggtctgagatgtgcagactgggaccagcgctagcctgaggagctcagagcctaaggaaagactggcttttggggtacaagggtgactagaaccttcctgggactctggctatagtactttgaaattatcacccatataaaagagggacatggactataacgttgatttcttattgctgtacattgcgtttttaacctgcaagttctcagtttcttcaccatcactccatcaaagtccctggctataagatctggattttacccactccatcttctctttccttcttactgtgtcaattcctattttctttcagaatcttctaaaaacagttgtatctaaccgcatgtgctgttgtgcctaatgctctataaagcatgttaaacagaaagtggttactacattatagattcatccaaatccctgtcttaacatttccaggctgtcatcttgatcaactctgtcccctctcagacctctgcctcccttttgtcccttccatcttcactcagtattgatactgaaacaggcctaggtctgccttctccctgtccttgagccatcttgacccttgacctgctccctacttccaagctcctttgtctacctgtatctatagagggaggattgctacccactaagcctcctcctagaagcaactttagctcatcatcaatcctcagactggctcagcagctacactaaggtgttaaagcacaaggatactatggaaaggcagatgactagagaggaaaatctccaattcagaattctataactgcttcacagtataattctgtagtgccttactatataattgatcatctaaactgagacacactgggaaaacttaaagagggtactattaataattatgctgggacaacagacataaaccaggatggttccagccagactcttcaggaaggctgggaccacataaccttttgtctgcttttgccctgattcttaaaagccatactctgtgtccttcctatgtagcacatgcaagaggtctc

SEQ ID NO: 277945 - DNA, 6613 bp, Homo sapiens
gggaactctcggaaggaggtactgaagggagcacccagacgagctgggccccggcgctgcagtcgcgtcacggttctggaccccgcccgggtacctgctgctctcaggacaaaatcatgacgatgctccatcccaagccttccaggttacaaaccgcctttccagttcgctggctcttatgatccagctcctgcccgacgatgtggacactgtcatcacctccattttacagataggaaagctgaggcccagagaagcgaagcgactgtgtctgtccaagaccacgcgccctcctgcccggaagataagcgtatttcttctctggtgcccacctgtctcctacctcaccctgccctcccgcaggtgaaggttcttaatcttgacggctcagcgtcctccttggctccccccggaggccatgtatggtcaagcttgaagattccccagaacagcgctaatattcacatttaagaagccaaaacacacaagtcggtggtgatgacagacccccttttggactcacagccagccagtagcaccggggagatggatggactgtgccctgagctattgctgatccccccgcctctctctaaccgtggaatcctggggcctgtccagagcccctgtccttcccgggaccctgcacctatacctactgagccaggctgcctgctggtagaggccacagcaactgaagagggaccagggaacatggagatcattgtggagacagtagctggaaccctgaccccaggtgctcctggagagaccccagctcccaaactgcctccaggagagagagaaccttcacaggaagcaggtacacccttgcctgggcaggagacagctgaagaggagaatgtagagaaagaagagaagagtgacacccagaaggactcccaaaaggctgtggataaaggccaaggggctcagcggctggaaggggatgtggtctctggcaccgagtccctcttcaagacccatatgtgtccagagtgtaagcgctgctttaagaagcggactcatctggtggagcacctgcatctccacttcccagaccccagcctccagtgccctaactgccagaagttcttcaccagtaagagcaagctcaagacccatctgctgcgggagctgggtgaaaaggcccaccactgcccactgtgccactacagtgcggtggagaggaatgcactcaaccgccacatggccagcatgcatgaagatatttccaacttctactcagacacctatgcctgtcctgtctgccgtgaggaattccgcctcagccaggccctaaaggagcacctcaagagccacacggcagcagccgcagcagagccattaccccttcgctgctttcaggagggctgcagctatgcagcacccgaccgcaaggccttcattaagcacctgaaggagacccatggggtgcgggctgtggagtgccgccatcactcatgtcccatgctctttgccacagccgaagccatggaggcccaccacaagagtcactacgccttccactgcccccactgtgattttgcttgttccaataagcacctattccgtaaacacaagaagcagggccaccctggcagtgaagagctgcgctgcaccttctgcccctttgccaccttcaacccagtggcttaccaggatcatgtaggcaagatgcatgctcatgaaaagatccaccagtgtcctgagtgcaactttgccactgcccacaagagggtgctcatccgacacatgcttctacatacgggtgagaagccccacaagtgtgagctgtgtgacttcacatgccgagacgtgagctacctatccaagcacatgctgacccactccaacaccaaggattacatgtgcactgaatgtggctatgtcaccaagtggaagcactacctccgtgtgcacatgcgaaaacatgcaggggacctcaggtatcagtgcaaccagtgctcctatcgctgtcaccgggctgatcagctgagcagccacaagctgcggcatcagggcaagtctctgatgtgtgaggtgtgtgccttcgcctgcaagcggaagtatgagctgcagaagcacatggcttcccagcaccaccctggcacaccggccccactctacccttgccactactgcagttaccagagccgccacaagcaggctgtgctgagccatgagaactgcaagcatacccgcctccgtgagttccactgtgccctctgtgactaccgcaccttcagcaacaccacactcttgttccataaacgcaaggcccatggctatgtacctggagaccaggcctggcagctccgctatgcaagccaggagccagaaggggccatgcagggcccaacacccccaccagattcagagccctcaaaccagctgtcagcccgacctgaggggccaggtcacgaacctgggactgtggtggaccccagcttggaccaggccctgccagagatgagtgaggaggtcaacactggaagacaggagggcagtgaggctccccatgggggtgacctgggtggcagtcccagcccagcagaggtggaggagggcagctgcacactacacctagaggccctgggagtagagctggagtctgtgactgagccaccccttgaggaggtcactgaaacagcccctatggagttcaggcccctgggactggaagggccagatggactggaaggaccagagctatctagctttgaaggtattgggacttctgacttgggtgctgaagaaaatccccttctggaaaagccagtgtctgagccctccacaaatcctccatccttagaggaggctcctaacaactgggtaggaaccttcaagacaactccacctgctgagacagcacccttgcccccattacctgagtcagagtcattactcaaggccctaaggagacaggacaaagaacaagcagaggcattggtgctagaggggcgggtgcagatggtagtgatccagggagaggggcgagccttccgctgcccacactgcccttttatcactcgccgggagaaggccctgaatctgcactccaggactgggtgccaaggccgccgagagcccctgctgtgccccgagtgtggggctagcttcaagcaacaacgcggcctcagcacccacctgctgaagaagtgccctgttctactcagaaagaacaagggcttgcccagaccagattcacccatccctctgcaacctgtgctcccaggtacccaggcctcagaggacacagaaagtgggaagcccccacctgcatcacaagaagcagagctactgcttccaaaagatgctcctttggagcttcccagggagccagaagaaacagaagagcctcttgccacagtctctggttccccagtccctcctgcaggaaactccttgcccacagaggcccctaagaagcactgctttgacccagtccctcctgcaggaaactcctcacccacggaggcccctaagaagcaccaccttgacccagtccctcctgcaggaaactcctcacccacagaggccctgaagaagcaccgctttgagcagggcaagtttcactgcaactcctgcccattcctttgttcccggctctcctctattacctctcacgtggctgaaggctgcagggggggacgtggcgggggaggaaaacgagggaccccccagacccagcctgatgtgtccccgttgagcaatggggactctgctcccccgaagaatgggagtacagagtccagctctggtgatggggatacagttctggttcaaaagcagaagggggctcgcttctcctgccctacatgtccctttagctgccagcaggaacgggctctgaggactcaccagatccggggctgccccctcgaggagtctggagagctgcactgcagcctctgcccattcactgctcctgctgccactgccttaaggctccaccagaagcggaggcaccccactgcagccccagcccgtgggccccggccccatctacagtgtggggactgtggcttcacctgtaaacagagccgttgcatgcagcagcaccggcggctcaagcacgagggggtgaagccccatcagtgccccttctgtgacttttcgaccaccagacggtaccggttagaggctcaccagtcccgacacacaggcattggccgcatcccctgcagctcttgcccccagacgtttggtaccaactcgaaactgcgcttgcaccggttaagggtacatgacaaaacacctacccacttctgtccactttgtgactatagtggctaccttcgccatgacatcactcgtcatgtcaacagctgccaccaaggcaccccagcctttgcctgctcccagtgtgaagcccagttcagctcagagacagcacttaagcagcatgctctgcgccgacaccccgagcctgcacagcctgcccctggctctcctgcagagaccactgagggccccctgcactgttcccgctgtgggttgctgtgccccagccctgccagcttacgaggacacacccgtaaacagcacccacggcttgagtgtggggcctgccaggaggccttccctagccgactggctctggatgagcaccggaggcagcagcatttcagccaccgctgtcagctctgtgactttgctgcccgggagcgggtgggcctggtaaagcactacctggaacagcatgaggagacttcagcagccgtggcagcctcagatggggatggggatgctggccagcccccgctacactgccccttttgtgacttcacatgccgccatcagctggtactagatcaccatgtgaaagggcatgggggcactcgtctctacaagtgcaccgattgtgcttacagcaccaagaaccgacagaagatcacctggcacagccgcatccacactggggaaaagccttaccactgtcacctctgcccctatgcctgtgctgatccctctcgtctcaagtaccacatgcggatccacaaggaggaacggaagtacctgtgccctgagtgtggctacaagtgcaagtgggtcaaccagctgaaataccacatgaccaagcatacaggactgaagccataccagtgtcccgagtgtgagtactgcaccaaccgggctgatgcactgcgtgtgcaccaggagacccggcatcgagaagcacgggctttcatgtgtgagcagtgtggcaaggccttcaagacgcgcttcctgctgcgcacccaccttcgcaagcacagtgaggccaaaccctatgtgtgcaatgtgtgccaccgtgctttccgctgggctgctggcctgcgccatcatgccctcacccacaccgaccgccaccccttcttttgccgcctctgcaactacaaggccaagcaaaagttccaggtggtcaagcacgtacgcaggcaccaccctgaccaagccgacccaaaccagggtgtgggcaaagaccccaccacccccacagtgcacctgcatgatgtgcagctggaggatcccagccctcctgctcctgccgctccccacactggacctgagggctgaaagcctgccccacctcctgtataggaagagggtatggtctgagatgtgcagactgggaccagcgctagcctgaggagctcagagcctaaggaaagactggcttttggggtacaagggtgactagaaccttcctgggactctggctatagtactttgaaattatcacccatataaaagagggacatggactataacgttgatttcttattgctgtacattgcgtttttaacctgcaagttctcagtttcttcaccatcactccatcaaagtccctggctataagatctggattttacccactccatcttctctttccttcttactgtgtcaattcctattttctttcagaatcttctaaaaacagttgtatctaaccgcatgtgctgttgtgcctaatgctctataaagcatgttaaacagaaagtggttactacattatagattcatccaaatccctgtcttaacatttccaggctgtcatcttgatcaactctgtcccctctcagacctctgcctcccttttgtcccttccatcttcactcagtattgatactgaaacaggcctaggtctgccttctccctgtccttgagccatcttgacccttgacctgctccctacttccaagctcctttgtctacctgtatctatagagggaggattgctacccactaagcctcctcctagaagcaactttagctcatcatcaatcctcagactggctcagcagctacactaaggtgttaaagcacaaggatactatggaaaggcagatgactagagaggaaaatctccaattcagaattctataactgcttcacagtataattctgtagtgccttactatataattgatcatctaaactgagacacactgggaaaacttaaagagggtactattaataattatgctgggacaacagacataaaccaggatggttccagccagactcttcaggaaggctgggaccacataaccttttgtctgcttttgccctgattcttaaaagccatactctgtgtccttcctatgtagcacatgcaagaggtctc

SEQ ID NO: 277946 - DNA, 5788 bp, Homo sapiens
caaaacatagagtaccccggcagccggcaagaggaagagagagtggcttccacatccccaatatcctagaggcggctgagccggaggcggtcgcacaaagcgggccccgggggccgttccagccgcggccgaccatagagatgcggctcccgccggctctgggtctggagccttccaggttacaaaccgcctttccagttcgctggctcttatgatccagctcctgcccgacgatgtggacactgtcatcacctccattttacagataggaaagctgaggcccagagaagcgaagcgactgtgtctgtccaagaccacgcgccctcctgcccggaagataagcgtatttcttctctggtgcccacctgtctcctacctcaccctgccctcccgcaggtgaaggttcttaatcttgacggctcagcgtcctccttggctccccccggaggccatgtatggtcaagcttgaagattccccagaacagcgctaatattcacatttaagaagccaaaacacacaagtcggtggtgatgacagacccccttttggactcacagccagccagtagcaccggggagatggatggactgtgccctgagctattgctgatccccccgcctctctctaaccgtggaatcctggggcctgtccagagcccctgtccttcccgggaccctgcacctatacctactgagccaggctgcctgctggtagaggccacagcaactgaagagggaccagggaacatggagatcattgtggagacagtagctggaaccctgaccccaggtgctcctggagagaccccagctcccaaactgcctccaggagagagagaaccttcacaggaagcaggtacacccttgcctgggcaggagacagctgaagaggagaatgtagagaaagaagagaagagtgacacccagaaggactcccaaaaggctgtggataaaggccaaggggctcagcggctggaaggggatgtggtctctggcaccgagtccctcttcaagacccatatgtgtccagagtgtaagcgctgctttaagaagcggactcatctggtggagcacctgcatctccacttcccagaccccagcctccagtgccctaactgccagaagttcttcaccagtaagagcaagctcaagacccatctgctgcgggagctgggtgaaaaggcccaccactgcccactgtgccactacagtgcggtggagaggaatgcactcaaccgccacatggccagcatgcatgaagatatttccaacttctactcagacacctatgcctgtcctgtctgccgtgaggaattccgcctcagccaggccctaaaggagcacctcaagagccacacggcagcagccgcagcagagccattaccccttcgctgctttcaggagggctgcagctatgcagcacccgaccgcaaggccttcattaagcacctgaaggagacccatggggtgcgggctgtggagtgccgccatcactcatgtcccatgctctttgccacagccgaagccatggaggcccaccacaagagtcactacgccttccactgcccccactgtgattttgcttgttccaataagcacctattccgtaaacacaagaagcagggccaccctggcagtgaagagctgcgctgcaccttctgcccctttgccaccttcaacccagtggcttaccaggatcatgtaggcaagatgcatgctcatgaaaagatccaccagtgtcctgagtgcaactttgccactgcccacaagagggtgctcatccgacacatgcttctacatacgggtgagaagccccacaagtgtgagctgtgtgacttcacatgccgagacgtgagctacctatccaagcacatgctgacccactccaacaccaaggattacatgtgcactgaatgtggctatgtcaccaagtggaagcactacctccgtgtgcacatgcgaaaacatgcaggggacctcaggtatcagtgcaaccagtgctcctatcgctgtcaccgggctgatcagctgagcagccacaagctgcggcatcagggcaagtctctgatgtgtgaggtgtgtgccttcgcctgcaagcggaagtatgagctgcagaagcacatggcttcccagcaccaccctggcacaccggccccactctacccttgccactactgcagttaccagagccgccacaagcaggctgtgctgagccatgagaactgcaagcatacccgcctccgtgagttccactgtgccctctgtgactaccgcaccttcagcaacaccacactcttgttccataaacgcaaggcccatggctatgtacctggagaccaggcctggcagctccgctatgcaagccaggagccagaaggggccatgcagggcccaacacccccaccagattcagagccctcaaaccagctgtcagcccgacctgaggggccaggtcacgaacctgggactgtggtggaccccagcttggaccaggccctgccagagatgagtgaggaggtcaacactggaagacaggagggcagtgaggctccccatgggggtgacctgggtggcagtcccagcccagcagaggtggaggagggcagctgcacactacacctagaggccctgggagtagagctggagtctgtgactgagccaccccttgaggaggtcactgaaacagcccctatggagttcaggcccctgggactggaagggccagatggactggaaggaccagagctatctagctttgaaggtattgggacttctgacttgggtgctgaagaaaatccccttctggaaaagccagtgtctgagccctccacaaatcctccatccttagaggaggctcctaacaactgggtaggaaccttcaagacaactccacctgctgagacagcacccttgcccccattacctgagtcagagtcattactcaaggccctaaggagacaggacaaagaacaagcagaggcattggtgctagaggggcgggtgcagatggtagtgatccagggagaggggcgagccttccgctgcccacactgcccttttatcactcgccgggagaaggccctgaatctgcactccaggactgggtgccaaggccgccgagagcccctgctgtgccccgagtgtggggctagcttcaagcaacaacgcggcctcagcacccacctgctgaagaagtgccctgttctactcagaaagaacaagggcttgcccagaccagattcacccatccctctgcaacctgtgctcccaggtacccaggcctcagaggacacagaaagtgggaagcccccacctgcatcacaagaagcagagctactgcttccaaaagatgctcctttggagcttcccagggagccagaagaaacagaagagcctcttgccacagtctctggttccccagtccctcctgcaggaaactccttgcccacagaggcccctaagaagcactgctttgacccagtccctcctgcaggaaactcctcacccacggaggcccctaagaagcaccaccttgacccagtccctcctgcaggaaactcctcacccacagaggccctgaagaagcaccgctttgagcagggcaagtttcactgcaactcctgcccattcctttgttcccggctctcctctattacctctcacgtggctgaaggctgcagggggggacgtggcgggggaggaaaacgagggaccccccagacccagcctgatgtgtccccgttgagcaatggggactctgctcccccgaagaatgggagtacagagtccagctctggtgatggggatacagttctggttcaaaagcagaagggggctcgcttctcctgccctacatgtccctttagctgccagcaggaacgggctctgaggactcaccagatccggggctgccccctcgaggagtctggagagctgcactgcagcctctgcccattcactgctcctgctgccactgccttaaggctccaccagaagcggaggcaccccactgcagccccagcccgtgggccccggccccatctacagtgtggggactgtggcttcacctgtaaacagagccgttgcatgcagcagcaccggcggctcaagcacgagggggtgaagccccatcagtgccccttctgtgacttttcgaccaccagacggtaccggttagaggctcaccagtcccgacacacaggcattggccgcatcccctgcagctcttgcccccagacgtttggtaccaactcgaaactgcgcttgcaccggttaagggtacatgacaaaacacctacccacttctgtccactttgtgactatagtggctaccttcgccatgacatcactcgtcatgtcaacagctgccaccaaggcaccccagcctttgcctgctcccagtgtgaagcccagttcagctcagagacagcacttaagcagcatgctctgcgccgacaccccgagcctgcacagcctgcccctggctctcctgcagagaccactgagggccccctgcactgttcccgctgtgggttgctgtgccccagccctgccagcttacgaggacacacccgtaaacagcacccacggcttgagtgtggggcctgccaggaggccttccctagccgactggctctggatgagcaccggaggcagcagcatttcagccaccgctgtcagctctgtgactttgctgcccgggagcgggtgggcctggtaaagcactacctggaacagcatgaggagacttcagcagccgtggcagcctcagatggggatggggatgctggccagcccccgctacactgccccttttgtgacttcacatgccgccatcagctggtactagatcaccatgtgaaagggcatgggggcactcgtctctacaagtgcaccgattgtgcttacagcaccaagaaccgacagaagatcacctggcacagccgcatccacactggggaaaagccttaccactgtcacctctgcccctatgcctgtgctgatccctctcgtctcaagtaccacatgcggatccacaaggaggaacggaagtacctgtgccctgagtgtggctacaagtgcaagtgggtcaaccagctgaaataccacatgaccaagcatacaggactgaagccataccagtgtcccgagtgtgagtactgcaccaaccgggctgatgcactgcgtgtgcaccaggagacccggcatcgagaagcacgggctttcatgtgtgagcagtgtggcaaggccttcaagacgcgcttcctgctgcgcacccaccttcgcaagcacagtgaggccaaaccctatgtgtgcaatgtgtgccaccgtgctttccgctgggctgctggcctgcgccatcatgccctcacccacaccgaccgccaccccttcttttgccgcctctgcaactacaaggccaagcaaaagttccaggtggtcaagcacgtacgcaggcaccaccctgaccaagccgacccaaaccagggtgtgggcaaagaccccaccacccccacagtgcacctgcatgatgtgcagctggaggatcccagccctcctgctcctgccgctccccacactggacctgagggctgaaagcctgccccacctcctgtataggaagagggtatggtctgagatgtgcagactgggaccagcgctagcctgaggagctcagagcctaaggaaagactggcttttggggtacaagggtgactagaaccttcctgggactctggctatagtactttgaaattatcacccatataaaagagggacatggactata

SEQ ID NO: 277947 - DNA, 5040 bp, Homo sapiens
caaaacatagagtaccccggcagccggcaagaggaagagagagtggcttccacatccccaatatcctagaggcggctgagccggaggcggtcgcacaaagcgggccccgggggccgttccagccgcggccgaccatagagatgcggctcccgccggctctgggtctggagccttccaggttacaaaccgcctttccagttcgctggctcttatgatccagctcctgcccgacgatgtggacactgtcatcacctccattttacagataggaaagctgaggcccagagaagcgaagcgactgtgtctgtccaagaccacgcgccctcctgcccggaagataagcgtatttcttctctggtgcccacctgtctcctacctcaccctgccctcccgcaggtgaaggttcttaatcttgacggctcagcgtcctccttggctccccccggaggccatgtatggtcaagcttgaagattccccagaacagcgctaatattcacatttaagaagccaaaacacacaagtcggtggtgatgacagacccccttttggactcacagccagccagtagcaccggggagatggatggactgtgccctgagctattgctgatccccccgcctctctctaaccgtggaatcctggggcctgtccagagcccctgtccttcccgggaccctgcacctatacctactgagccaggctgcctgctggtagaggccacagcaactgaagagggaccagggaacatggagatcattgtggagacagtagctggaaccctgaccccaggtgctcctggagagaccccagctcccaaactgcctccaggagagagagaaccttcacaggaagcaggtacacccttgcctgggcaggagacagctgaagaggagaatgtagagaaagaagagaagagtgacacccagaaggactcccaaaaggctgtggataaaggccaaggggctcagcggctggaaggggatgtggtctctggcaccgagtccctcttcaagacccatatgtgtccagagtgtaagcgctgctttaagaagcggactcatctggtggagcacctgcatctccacttcccagaccccagcctccagtgccctaactgccagaagttcttcaccagtaagagcaagctcaagacccatctgctgcgggagctgggtgaaaaggcccaccactgcccactgtgccactacagtgcggtggagaggaatgcactcaaccgccacatggccagcatgcatgaagatatttccaacttctactcagacacctatgcctgtcctgtctgccgtgaggaattccgcctcagccaggccctaaaggagcacctcaagagccacacggcagcagccgcagcagagccattaccccttcgctgctttcaggagggctgcagctatgcagcacccgaccgcaaggccttcattaagcacctgaaggagacccatggggtgcgggctgtggagtgccgccatcactcatgtcccatgctctttgccacagccgaagccatggaggcccaccacaagagtcactacgccttccactgcccccactgtgattttgcttgttccaataagcacctattccgtaaacacaagaagcagggccaccctggcagtgaagagctgcgctgcaccttctgcccctttgccaccttcaacccagtggcttaccaggatcatgtaggcaagatgcatgctcatgaaaagatccaccagtgtcctgagtgcaactttgccactgcccacaagagggtgctcatccgacacatgcttctacatacgggtgagaagccccacaagtgtgagctgtgtgacttcacatgccgagacgtgagctacctatccaagcacatgctgacccactccaacaccaaggattacatgtgcactgaatgtggctatgtcaccaagtggaagcactacctccgtgtgcacatgcgaaaacatgcaggggacctcaggtatcagtgcaaccagtgctcctatcgctgtcaccgggctgatcagctgagcagccacaagctgcggcatcagggcaagtctctgatgtgtgaggtgtgtgccttcgcctgcaagcggaagtatgagctgcagaagcacatggcttcccagcaccaccctggcacaccggccccactctacccttgccactactgcagttaccagagccgccacaagcaggctgtgctgagccatgagaactgcaagcatacccgcctccgtgagttccactgtgccctctgtgactaccgcaccttcagcaacaccacactcttgttccataaacgcaaggcccatggctatgtacctggagaccaggcctggcagctccgctatgcaagccaggagccagaaggggccatgcagggcccaacacccccaccagattcagagccctcaaaccagctgtcagcccgacctgaggggccaggtcacgaacctgggactgtggtggaccccagcttggaccaggccctgccagagatgagtgaggaggtcaacactggaagacaggagggcagtgaggctccccatgggggtgacctgggtggcagtcccagcccagcagaggtggaggagggcagctgcacactacacctagaggccctgggagtagagctggagtctgtgactgagccaccccttgaggaggtcactgaaacagcccctatggagttcaggcccctgggactggaagggccagatggactggaaggaccagagctatctagctttgaaggtattgggacttctgacttgggtgctgaagaaaatccccttctggaaaagccagtgtctgagccctccacaaatcctccatccttagaggaggctcctaacaactgggtaggaaccttcaagacaactccacctgctgagacagcacccttgcccccattacctgagtcagagtcattactcaaggccctaaggagacaggacaaagaacaagcagaggcattggtgctagaggggcgggtgcagatggtagtgatccagggagaggggcgagccttccgctgcccacactgcccttttatcactcgccgggagaaggccctgaatctgcactccaggactgggtgccaaggccgccgagagcccctgctgtgccccgagtgtggggctagcttcaagcaacaacgcggcctcagcacccacctgctgaagaagtgccctgttctactcagaaagaacaagggcttgcccagaccagattcacccatccctctgcaacctgtgctcccaggtacccaggcctcagaggacacagaaagtgggaagcccccacctgcatcacaagaagcagagctactgcttccaaaagatgctcctttggagcttcccagggagccagaagaaacagaagagcctcttgccacagtctctggttccccagtccctcctgcaggaaactccttgcccacagaggcccctaagaagcactgctttgacccagtccctcctgcaggaaactcctcacccacggaggcccctaagaagcaccaccttgacccagtccctcctgcaggaaactcctcacccacagaggccctgaagaagcaccgctttgagcagggcaagtttcactgcaactcctgcccattcctttgttcccggctctcctctattacctctcacgtggctgaaggctgcagggggggacgtggcgggggaggaaaacgagggaccccccagacccagcctgatgtgtccccgttgagcaatggggactctgctcccccgaagaatgggagtacagagtccagctctggtgatggggatacagttctggttcaaaagcagaagggggctcgcttctcctgccctacatgtccctttagctgccagcaggaacgggctctgaggactcaccagatccggggctgccccctcgaggagtctggagagctgcactgcagcctctgcccattcactgctcctgctgccactgccttaaggctccaccagaagcggaggcaccccactgcagccccagcccgtgggccccggccccatctacagtgtggggactgtggcttcacctgtaaacagagccgttgcatgcagcagcaccggcggctcaagcacgagggggtgaagccccatcagtgccccttctgtgacttttcgaccaccagacggtaccggttagaggctcaccagtcccgacacacaggcattggccgcatcccctgcagctcttgcccccagacgtttggtaccaactcgaaactgcgcttgcaccggttaagggtacatgacaaaacacctacccacttctgtccactttgtgactatagtggctaccttcgccatgacatcactcgtcatgtcaacagctgccaccaaggcaccccagcctttgcctgctcccagtgtgaagcccagttcagctcagagacagcacttaagcagcatgctctgcgccgacaccccgagcctgcacagcctgcccctggctctcctgcagagaccactgagggccccctgcactgttcccgctgtgggttgctgtgccccagccctgccagcttacgaggacacacccgtaaacagcacccacggcttgagtgtggggcctgccaggaggccttccctagccgactggctctggatgagcaccggaggcagcagcatttcagccaccgctgtcagctctgtgactttgctgcccgggagcgggtgggcctggtaaagcactacctggaacagcatgaggagacttcagcagccgtggcagcctcagatggggatggggatgctggccagcccccgctacactgccccttttgtgacttcacatgccgccatcagctggtactagatcaccatgtgaaagggcatgggggcactcgtctctacaagtgcaccgattgtgcttacagcaccaagaaccgacagaagatcacctggcacagccgcatccacactggggaaaagccttaccactgtcacctctgcccctatgcctgtgctgatccctctcgtctcaaggtaatgtcagaggatatgggg

SEQ ID NO: 277948 - DNA, 550 bp, Homo sapiens
ctgaagagggaccagggaacatggagatcattgtggagacagtagctggaaccctgaccccaggtgctcctggagagaccccaggtacaaacacagttgcaagcaggccagtgggacaagcagctctgaggttttgtctgggttatttttgattctgtataaatatgatgagaacacaaggtagcatcctatttttatacttggagatgttgtcatttggtttgcagttggtgcatgttgattgaaggctggcgaagtggtgcacagccttctaccaagcttttggcagtctgtcctgcaagggcttcatgtgtgctaggcagtaatccagaaagtaagacctttctgacacctccgcccaatcctggcttgtccctactcttacagtccttggagattctttcctccatattgaccctcctacccaggaactgcagccagggattaagcaaaaaccctgtctctaccaccctgggcttggcagggctttccagaagtgatctggtatttccctgccctagttttttgtgtataacatactttactcatc

SEQ ID NO: 277949 - DNA, 870 bp, Homo sapiens
tgggcattctggagactctgattggctgggcagatgggctgactggctgggcagatgggtgggtgagttccctctccccagagccatcggccaggtaccaaagctcagctgtatggattcccaacaggaggacctgcgcttccctgggatgtgggtctcattgtactttggaatcctggggctgtgttctgtgataactggagggtgcattatctttctgcactggaggaagaacttgaggcgggaagagcatgcccagcagtgggtggaggtgatgagagctgccacattcacctacagcccattgttgtactggattaacaagcgacggcgctacggcatgaatgcagccatcaacacgggccctgcccctgctgtcaccaagactgagactgaggtccagaatccagatgttctgtgggatttggacatccccgaaggcaggagccatgctgaccaagacagcaaccccaaggcggaagcccctgctcccctgcaacctgcactgcagctggctccacagcagccccaggccagatccccattcccacttcccatctttcaggaggtgccctttgccccacccttgtgcaacctaccccccctgctgaaccactctgtctcctatcctttggccacctgtcctgaaaggaatgttctcttccattccctcctgaatctggcccaggaagaccatagcttcaatgccaagccttttccttcagaactgtagcctcctctcactgaaggtgggagctgcaggaatcaggtgcagagtaggaaatggaactaacctcaggaaggtggtattgacagaggtcaggacccacctggatgtcatgctatgaaacattaaaagaaaaaaaaaaa

SEQ ID NO: 277950 - DNA, 975 bp, Homo sapiens
cacatgcccccgctagacctagcttttgtgatctgtaaagagttaaaggtggtgcttaagctccctggaaatctagctttgactgaataagggaatgatgaggcaagtcaataagggagggaaggaacggtgagagtagttaagtggatggagtgattgatgcatgggttaagtgaaagaggaatgagaaacagctcaggccccaagctacagctatcagccagcatgcctctttttctttcttgctgccttagtgtgggtctcattgtactttggaatcctggggctgtgttctgtgataactggagggtgcattatctttctgcactggaggaagaacttgaggcgggaagagcatgcccagcagtgggtggaggtgatgagagctgccacattcacctacagcccattgttgtactggattaacaagcgacggcgctacggcatgaatgcagccatcaacacgggccctgcccctgctgtcaccaagactgagactgaggtccagaatccagatgttctgtgggatttggacatccccgaaggcaggagccatgctgaccaagacagcaaccccaaggcggaagcccctgctcccctgcaacctgcactgcagctggctccacagcagccccaggccagatccccattcccacttcccatctttcaggaggtgccctttgccccacccttgtgcaacctaccccccctgctgaaccactctgtctcctatcctttggccacctgtcctgaaaggaatgttctcttccattccctcctgaatctggcccaggaagaccatagcttcaatgccaagccttttccttcagaactgtagcctcctctcactgaaggtgggagctgcaggaatcaggtgcagagtaggaaatggaactaacctcaggaaggtggtattgacagaggtcaggacccacctggatgtcatgctatgaaacattaaaagaaaaaaaaaaa

SEQ ID NO: 277951 - DNA, 2143 bp, Homo sapiens
ctgcgcagcagctggatcttgtcgcggtagcggtcgtagaaagggttggcctggagctcggcctcggccccgaccccgctgctgtcggcgcccccctcgggccggcccgagccggggcgcactgggaagacgcgcagctgcgcgggtgacacgagccccaggcccagggcgcggctgcgcaccgcgcacaggccccggtagagaccggccacctgcaggaccgccggtcccgcgccacccgcagccgccaccaccacagcagccatggccgcccccgcctcctcctcctcctcaggcgcgtcggcctcggcccgcggcccgcgcgcccgctccatcccgctccgagtgcgccgcgcccgcgctccggcaccgaggttccgcgcgcccaaggttccgggcgcgggatagcggcgaggcggggcggggaggagggggcgcgccgctctggccccggcactgcgcgctctcgccgccctgtgtatgccacggcccgcctcctccagggaggctgcccaaattcaacgcccttcctccctctgggaccagcagcctctgcgcgccaagtccgttctctaaagccagcggatctccaggtcctcgcggtgcttgcccctggcactcgctgtagtgccaggcactcgatgtagtagtccgtccttcagcatcgaaggtcttttcatcaactataatcacagcagcaagcttctctttactgaggttgctatgtgcaggacactgagcggcttcatactctgtgtggcagtattatcctcatctaacaaataaggaaactgaggccgagagtaattatgtgacttgttcaagttctacccgacagctgagctcttttcaagatggcagctgcctcccaagcctccttttcctctgcttcctgacatcctccttgaactccagccacagtgacctattctctcccaaagaaacaccaggattactccttgaagagtccttattcaggccctttttgacccctggaatcctctctccttccattctctcaacccaaatgccacaatcttccttaccgtctgaaccaggtgtgagctcctagggtcagggacagtgacattaacatctctgtgtcccacctgctcacagaacagggccagtcctggagtgggctctctgggacagtactcatcatcaggtccttcttgtctgggttttgtctgattgaagcccctcctgggacaggggcagagccttcaactctgctcaatccaacctatgctcatggagatcagccctgagccctgccctgtgcgaggaacagtgtaatggaagatgaataagtccttcaagtatgccagcccatacctggctcacactcctaacacttgctgttttctctgtggatctgcatgtggctgcctcctcatcatctaagggctcagttcacattgtgggtctcattgtactttggaatcctggggctgtgttctgtgataactggagggtgcattatctttctgcactggaggaagaacttgaggcgggaagagcatgcccagcagtgggtggaggtgatgagagctgccacattcacctacagcccattgttgtactggattaacaagcgacggcgctacggcatgaatgcagccatcaacacgggccctgcccctgctgtcaccaagactgagactgaggtccagaatccagatgttctgtgggatttggacatccccgaaggcaggagccatgctgaccaagacagcaaccccaaggcggaagcccctgctcccctgcaacctgcactgcagctggctccacagcagccccaggccagatccccattcccacttcccatctttcaggaggtgccctttgccccacccttgtgcaacctaccccccctgctgaaccactctgtctcctatcctttggccacctgtcctgaaaggaatgttctcttccattccctcctgaatctggcccaggaagaccatagcttcaatgccaagccttttccttcagaactgtagcctcctctcactgaaggtgggagctgcaggaatcaggtgcagagtaggaaatggaactaacctcaggaaggtggtattgacagaggtcaggacccacctggatgtcatgctatgaaacattaaaagaaaaaaaaaaa

SEQ ID NO: 277952 - DNA, 719 bp, Homo sapiens
tgggcattctggagactctgattggctgggcagatgggctgactggctgggcagatgggtgggtgagttccctctccccagagccatcggccaggtaccaaagctcagctgtatggattcccaacaggaggacctgcgcttccctgggacccattgttgtactggattaacaagcgacggcgctacggcatgaatgcagccatcaacacgggccctgcccctgctgtcaccaagactgagactgaggtccagaatccagatgttctgtgggatttggacatccccgaaggcaggagccatgctgaccaagacagcaaccccaaggcggaagcccctgctcccctgcaacctgcactgcagctggctccacagcagccccaggccagatccccattcccacttcccatctttcaggaggtgccctttgccccacccttgtgcaacctaccccccctgctgaaccactctgtctcctatcctttggccacctgtcctgaaaggaatgttctcttccattccctcctgaatctggcccaggaagaccatagcttcaatgccaagccttttccttcagaactgtagcctcctctcactgaaggtgggagctgcaggaatcaggtgcagagtaggaaatggaactaacctcaggaaggtggtattgacagaggtcaggacccacctggatgtcatgctatgaaacattaaaagaaaaaaaaaaa

SEQ ID NO: 277953 - DNA, 794 bp, Homo sapiens
cgtcagtcccgctgtctgtgtcaaatcagaaaaagaacctgaccgtgaggactagagtaagaggctgtgaagactgccgcctcctcgcacgacccacaccgtcgagtgtccggagatggacgggaaaagctaccacagtggcatggccttatttcctgatcttaacagcatttgtttgccatgagaggctgcatgacttggagccagtcaatctacggtgacagcaaagcagttgtgactctaatgtactgccaccaaaaacactttcttttccgtctctcagccttagcaggatcatctgagccactgccagttcagagtgagctggggctgcttttccaggagggcagttggggacctgacttttgaggagattctgaggtttactgaaggagcaaaccctatggggttagacagagttttgtgaaatctgagctctgccttctctgtacttcagttactgcctctgtaaaatgggggtgtggacactgtagacattaaatggcagtgtataaaggaggcaccatctggagcatttgtccagcctgcaatgatgccgtttgtctgagaaggttgtagggatcatttctggtttgaatctcagccctcttcccagctcagccaccagccatctggaattgtgggagaggtcagacggctgcaaagcctctatgtggaattggaactaaatacacatatttatcagtatttaatggaagactgcaggatgcttgcagagtctacagaaggcactggtaaggtggctcttttagtctgggaacaagaactgggca

SEQ ID NO: 277954 - DNA, 428 bp, Homo sapiens
tgtctctagctttatagctttgtaagtgcatcatcatttgaagataacaaaatgctctccttggattttatcctgaatttatcctacatattctcaggtcctaaactctgagtccgcagactgagatgacgccccggattttgtgggcagcgctgcaacttaccctctccgaaagcccgggagtaggggagcggctcctccggcccccagccctcggcgctcccagtcacctctccgaaatgactggaggtccagttgagcggtgactgtcggtgcttctgagtggcaaccttggtgacttcctctctaccgccgttatgtttctctctttgatagcctttaaaaaatattgaaaatgtgagactgataatgattgagaaacaaatattttatgcaattaaaactgaaattatgaataaaatgtttct

SEQ ID NO: 277955 - DNA, 399 bp, Homo sapiens
actggaaattaacaaggaatgatgcagatgaacacctgcagcaagaaccactctacacctgtccacaggtcctaaactctgagtccgcagactgagatgacgccccggattttgtgggcagcgctgcaacttaccctctccgaaagcccgggagtaggggagcggctcctccggcccccagccctcggcgctcccagtcacctctccgaaatgactggaggtccagttgagcggtgactgtcggtgcttctgagtggcaaccttggtgacttcctctctaccgccgttatgtttctctctttgatagcctttaaaaaatattgaaaatgtgagactgataatgattgagaaacaaatattttatgcaattaaaactgaaattatgaataaaatgtttct

SEQ ID NO: 277956 - DNA, 618 bp, Homo sapiens
cccggtttctgcaaagtggagcgggggtggggcggggtagcggaactcatgcgctgggcgtcagaaacccggcaggggaatggggtcccagattccgggcacgtgcacatgggtgaagaagctgttgaaaatacagctacaatctttttctgctctcctcccaactcatcttgcccctccctacctctgaacagtcgccttccaacacaagcaacaataaagtttagtctacggtcctcagagctgccggaagagaagaatcaatggatgataaaataactagacaatgatgggtaggagtgatggaagttcactgtaagctcctataaccccccatcaccatcaccacatgcctaatacaacctgcagacacacttactcgcaacagacctgcaatctgggctctcttttccttcttgatggaggcctcaaaacctcagcagttgtacccattaaactaaaatgctttttccctcttagtatttcttggtttcccgtgtgtactttacttccaaagagttgcaaatgcatttgcatccccatagttctgcagtcggtgaaccctggaattttgatggactcccacgggggtgctggatgccacaggaactttttaca

SEQ ID NO: 277957 - DNA, 480 bp, Homo sapiens
cccggtttctgcaaagtggagcgggggtggggcggggtagcggaactcatgcgctgggcgtcagaaacccggcaggggaatggggtcccagattccgggcacgtgcacatgggtgaagaagctgttgaaaatacagctacaatctttttctgctctcctcccaactcatcttgcccctccctacctctgaacagtcgccttccaacacaagcaacaataaagtttagtctacggtcctcagagctgccggaagagaagaatcaatggatgataaaataactagacaatgatgggtaggagtgatggaagttcactgtaagctcctataaccccccatcaccatcaccacatgcctaatacaacctgcagacacacttactcgcaacagacctgcaatctgggctctcttttccttcttgatggaggcctcaaaacctcagcagttgtacccattaaactaaaatgctttttccctcttag

SEQ ID NO: 277958 - DNA, 1065 bp, Homo sapiens
caaccaccaggtctatgagggtccctgttgtccctcagccaaggctgctctctcccctagatccccacctcaccagggtcacaaggatacacacaactattgcaggaaacataggttcttcctgcaatacaattaaagctgctaacatttactgagtacctactggttgttgtgaggatattgaggttcagaagggctaagtgacttgcccaaggtcatccagttaattgttaaggcagtattcataactcgagcctgtcagactctagaatccactttatttttcctctgctacactgccctggctccctaccctacaagtgcttagagatctaaagcaaagtagaaaaggaaaagtgagcaagacggaggggcttttacattttcactgcctggctcccaacccagactctggcaaggctaattccatgatgtttcactcagcggcagtcccaccagcctggagccctggggagctgaccagagtcaaaaggctccctggcaggcttgttctggcagctgcccagccgacttgtgctaacacagcaacaggcacaggaaagagtctagaaagagtggaaaagcaccagacactgaaccgctgcagggagagaagtgattcctgccgtgctcggagaggaccctatactaaagccaccaccatcattgggctgggaagagacgggggtaagcggggagcaaaaagccccaagcacatccactcactcatgtgtttcagtgaactgtgactggaaggccagtcaaaaagagggtcacatgcctccaaggtgaatcagcaagcatggaagaaaaccggtctgcaccttggttcatcccagcaaccctgacctgtctatacccacgtccacataaaccttgctatctaatgtcacccgagcagaggcaagagcacatatactatcttacagccaccgcaacggctgatttcagccagcctgtgggaaagaaagatctagctgagaacactaatagacttgctagaggaagaattcagtgacaaagtgcccttggaaaggaaagaaaagaatttaaaagggggcacaa

SEQ ID NO: 277959 - DNA, 924 bp, Homo sapiens
aagcatgaaagaaaaactgtcactcaccaaagtgaagcttctggagcgagagctgctgcttcgactctccaggctgccgcctctgctgaaggctcggagcctgcagctgggggacgtgtctgagttcatgtcagatgcgtctgatttccggtgggttacaggcatctccacagagtcctcagggccggctcgatcacaggaagcagggcaggagccagcagcccattctgcggcaacagctcactcctagagacaccaaacacgaatgacaatggtcagtaagccgagactgtaaaacgcctcaatccctcaaaaacatggcttagattaatctccactctcagactcgaccattagggtaaaggcgattgggaaacgctaagtcaaccagtttgaggatgctgactgccatgtctcctttatattgttaaccattctgaacacataagaataatttttaaaagtttgttgttgtttttttttcagagatagagtcttgctatgttgtccaggctgacactgaactcttgggctccaacgatcctcctgccccggcctcctgagtacctgggattataggcacaagtcaccatgcccagccggaataatctgaaggaaagacgggtatattcaagatgactttgctgctggaaatatgacagaataatgtggtatcttcttctgcacttccaagctctttcacactcaggctcttcctggcttttctgcctcagccaccataaactgtggttgcttctccagctctgttacagttcagacttgaggggaggtgacaagagctaacatgttaccatggggagcctggctgacatctccgaaactgaagactctatggaagcctcatgctattgcaatgtgtacatcaaaagtaaagtaccccaggttaaaactatgaggaagttg

SEQ ID NO: 277960 - DNA, 676 bp, Homo sapiens
aatctgtgcagttttttctagaaaacaaggctgtgaacgagaccagagccataaccgcaatgagatacatgtacagttttgattataaaaccaaagaataatggcttcacaagatgacggctgggctcctgggctgccttcagtgtctttaaacaggtaatacagatcttgctttcttctctctctctctgagagatcttgactgagacagacacaccccaagtgtgcagcatttgaggcgctccgagaccctcatgagcttgggtcctccatggctgcctcgtcactatatggtgagttcctaaaagggggcaaactgagtcttatcccatcacctctcagttcttatatacagtaggcatgtatgaaatgttgagtgaattggccttttagaacagctactgagttatgttttaaagcagctgtttgaccaggaccatttggattccagctgggtgagaaggcagcatgaaagggcggggttatggctgatggggcggctcctccctcaaggcacctccggttcagtgtcccctcctgaagtcacagagcaaacagcacatcagatttctagcacactcctcagactttgctccggcccggccacgtgggaagccccccagtgcttgccatgccttcttagtccatgagccatgtgtggggccaaaggtgtcaa

SEQ ID NO: 277961 - DNA, 2185 bp, Homo sapiens
accttggtgtgtggtgttcccccccctggtgttcttctcccccccccccaggctgtgggtgtgctctctttccccaccagttgatccgccctcgcgccgcgctgctttctctcgcctcccctgtgctgtgggttgttttatagcgccgcggccgccgcccgctgtcgcctgtgatagttgaaggctcgcccccctccactttgtgggggcgccccttctgtttctcgcataagcatcgtgtggctggcgcgtgcacttggtgtgcccctccgcgcggcggggttttgggggggcccccccctctctttttttttttttttttttttttttttttttttttttttttttttttttttttttttttttttttttttttttttttttgaaacaagcatttttttttattattttcttagaaaaggcggcgagaatcctgagtggaagggatctgaactttcatgtcatgtacttcgagaagagggtagatgagactcaagaatgataatcagaccagtcctactcctcccaacccccaaaagatggcatttacacatcacggaaacctatgggtctaacaggttattctctctctctcagttcttgggaaaagggagacaagccctcggccagattcctttagggaagagttctctgtgccggtggctggagcttgcggtgcgtgctcagccaggaggccccagccaggcacctctagactccgatgtgccacagagggcaggggctcccgctgtcacttccattttagaccaaacagctcctgggtgcagcgactctttcaccctctcttcagggtggggagaaacagggtggactggagcccgcgcggccctcacgaactctccctgagcagccccagcttccgcagggcctccctgcgcgcctcctccgaggagccgcggcccacgaactgcacggtgatgccctggggccggggcagggagtctgcgcggcgccagtcctgggcgccgttgggctgccggggcccggggaagctctgacgggcccgcgtgctgggcagggccgggccagggcggaagcagagggacttcccagcgggcgcgaaggagctgggtgcgctcttcagggcctcgtgcgcacttgggaagccgttggccagcgccgggccccgcggagcctgaccccctgcccggagactctcagcggggcccggcaggccccggccacgcgccacccgctccggggaggagccgccccctggggccccctcgccggcgtcccccgcggcggggaaggcgccggcgtggccgtggatggtggccaacacctgcgccctgcgctcctgcacgctgacggccgccctggacagggtcctgcggggctcccgggccgcgccgttggtgcaggccctggaagacaagggaggagcctgtgagccaccggcccacgtgaaagtaaatgcatgaagttccctctcgctgaactgaaaagagcctcaacctggacctgacaccaacttcgccggtgctgcctggctggttgctctagcgccctgaaggagaggaatgcagtcatatttcactgtgattttcagtgtcatttccacgaagactaatgatgttgagcttgtttttctccataatacaggaaagagacccaaacccatgaagaatgagatacatgtacagttttgattataaaaccaaagaataatggcttcacaagatgacggctgggctcctgggctgccttcagtgtctttaaacagagatagagtcttgctatgttgtccaggctgacactgaactcttgggctccaacgatcctcctgccccggcctcctgagtacctgggattataggcacaagtcaccatgcccagccggaataatctgaaggaaagacgggtatattcaagatgactttgctgctggaaatatgacagaataatgtggtatcttcttctgcacttccaagctctttcacactcaggctcttcctggcttttctgcctcagccaccataaactgtggttgcttctccagctctgttacagttcagacttgaggggaggtgacaagagctaacatgttaccatggggagcctggctgacatctccgaaactgaagactctatggaagcctcatgctattgcaatgtgtacatcaaaagtaaagtaccccaggttaaaactatgaggaagttg

SEQ ID NO: 277962 - DNA, 1993 bp, Homo sapiens
cagtaaaaaacaaaactgggcaaactaaagtacgtcaagaaacaaaagcaaagtaccatgatgcctcacccttcaaaaacaaaagcaagtatattaagacattaaaaaatgaaacaagcatttttttttattattttcttagaaaaggcggcgagaatcctgagtggaagggatctgaactttcatgtcatgtacttcgagaagagggtagatgagactcaagaatgataatcagaccagtcctactcctcccaacccccaaaagatggcatttacacatcacggaaacctatgggtctaacaggttattctctctctctcagttcttgggaaaagggagacaagccctcggccagattcctttagggaagagttctctgtgccggtggctggagcttgcggtgcgtgctcagccaggaggccccagccaggcacctctagactccgatgtgccacagagggcaggggctcccgctgtcacttccattttagaccaaacagctcctgggtgcagcgactctttcaccctctcttcagggtggggagaaacagggtggactggagcccgcgcggccctcacgaactctccctgagcagccccagcttccgcagggcctccctgcgcgcctcctccgaggagccgcggcccacgaactgcacggtgatgccctggggccggggcagggagtctgcgcggcgccagtcctgggcgccgttgggctgccggggcccggggaagctctgacgggcccgcgtgctgggcagggccgggccagggcggaagcagagggacttcccagcgggcgcgaaggagctgggtgcgctcttcagggcctcgtgcgcacttgggaagccgttggccagcgccgggccccgcggagcctgaccccctgcccggagactctcagcggggcccggcaggccccggccacgcgccacccgctccggggaggagccgccccctggggccccctcgccggcgtcccccgcggcggggaaggcgccggcgtggccgtggatggtggccaacacctgcgccctgcgctcctgcacgctgacggccgccctggacagggtcctgcggggctcccgggccgcgccgttggtgcaggccctggaagacaagggaggagcctgtgagccaccggcccacgtgaaagtaaatgcatgaagttccctctcgctgaactgaaaagagcctcaacctggacctgacaccaacttcgccggtgctgcctggctggttgctctagcgccctgaaggagaggaatgcagtcatatttcactgtgattttcagtgtcatttccacgaagactaatgatgttgagcttgtttttctccataatacaggaaagagacccaaacccatgaagaatgagatacatgtacagttttgattataaaaccaaagaataatggcttcacaagatgacggctgggctcctgggctgccttcagtgtctttaaacaggtaatacagatcttgctttcttctctctctctctgagagatcttgactgagacagacacaccccaagtgtgcagcatttgaggcgctccgagaccctcatgagcttgggtcctccatggctgcctcgtcactatatggtgagttcctaaaagggggcaaactgagtcttatcccatcacctctcagttcttatatacagtaggcatgtatgaaatgttgagtgaattggccttttagaacagctactgagttatgttttaaagcagctgtttgaccaggaccatttggattccagctgggtgagaaggcagcatgaaagggcggggttatggctgatggggcggctcctccctcaaggcacctccggttcagtgtcccctcctgaagtcacagagcaaacagcacatcagatttctagcacactcctcagactttgctccggcccggccacgtgggaagccccccagtgcttgccatgccttcttagtccatgagccatgtgtggggccaaaggtgtcaa

SEQ ID NO: 277963 - DNA, 367 bp, Homo sapiens
ccactgcacccggccaataatggttacttctagctagatactactgtcatgtttcaagatggctcacttaaacctgtacttctggcaggaaagagacccaaacccatgaagaatgagatacatgtacagttttgattataaaaccaaagaataatggcttcacaagatgacggctgggctcctgggctgccttcagtgtctttaaacaggtaatacagatcttgctttcttctctctctctctgagagatcttgactgagacagacacaccccaagtgtgcagcatttgaggcgctccgagaccctcatgagcttgggtcctccatggctgcctcgtcactatatggtgagttcctaaaagggggca

SEQ ID NO: 277964 - DNA, 1911 bp, Homo sapiens
cagtaaaaaacaaaactgggcaaactaaagtacgtcaagaaacaaaagcaaagtaccatgatgcctcacccttcaaaaacaaaagcaagtatattaagacattaaaaaatgaaacaagcatttttttttattattttcttagaaaaggcggcgagaatcctgagtggaagggatctgaactttcatgtcatgtacttcgagaagagggtagatgagactcaagaatgataatcagaccagtcctactcctcccaacccccaaaagatggcatttacacatcacggaaacctatgggtctaacaggttattctctctctctcagttcttgggaaaagggagacaagccctcggccagattcctttagggaagagttctctgtgccggtggctggagcttgcggtgcgtgctcagccaggaggccccagccaggcacctctagactccgatgtgccacagagggcaggggctcccgctgtcacttccattttagaccaaacagctcctgggtgcagcgactctttcaccctctcttcagggtggggagaaacagggtggactggagcccgcgcggccctcacgaactctccctgagcagccccagcttccgcagggcctccctgcgcgcctcctccgaggagccgcggcccacgaactgcacggtgatgccctggggccggggcagggagtctgcgcggcgccagtcctgggcgccgttgggctgccggggcccggggaagctctgacgggcccgcgtgctgggcagggccgggccagggcggaagcagagggacttcccagcgggcgcgaaggagctgggtgcgctcttcagggcctcgtgcgcacttgggaagccgttggccagcgccgggccccgcggagcctgaccccctgcccggagactctcagcggggcccggcaggccccggccacgcgccacccgctccggggaggagccgccccctggggccccctcgccggcgtcccccgcggcggggaaggcgccggcgtggccgtggatggtggccaacacctgcgccctgcgctcctgcacgctgacggccgccctggacagggtcctgcggggctcccgggccgcgccgttggtgcaggccctggaagacaagggaggagcctgtgagccaccggcccacgtgaaagtaaatgcatgaagttccctctcgctgaactgaaaagagcctcaacctggacctgacaccaacttcgccggtgctgcctggctggttgctctagcgccctgaaggagaggaatgcagtcatatttcactgtgattttcagtgtcatttccacgaagactaatgatgttgagcttgtttttctccataatacaggaaagagacccaaacccatgaagaatgagatacatgtacagttttgattataaaaccaaagaataatggcttcacaagatgacggctgggctcctgggctgccttcagtgtctttaaacagagatagagtcttgctatgttgtccaggctgacactgaactcttgggctccaacgatcctcctgccccggcctcctgagtacctgggattataggcacaagtcaccatgcccagccggaataatctgaaggaaagacgggtatattcaagatgactttgctgctggaaatatgacagaataatgtggtatcttcttctgcacttccaagctctttcacactcaggctcttcctggcttttctgcctcagccaccataaactgtggttgcttctccagctctgttacagttcagacttgaggggaggtgacaagagctaacatgttaccatggggagcctggctgacatctccgaaactgaagactctatggaagcctcatgctattgcaatgtgtacatcaaaagtaaagtaccccaggttaaaactatgaggaagttg

SEQ ID NO: 277965 - DNA, 602 bp, Homo sapiens
atcaaattgcttatctttaaaaaccaatgataaagaggaaatgttacaagaaaccaggcttttcttttttctttttaaggatgtcttacactccaaaaacaaagattaagaatgaaagcaaaatcttccctgaaaacattcgatctagaaaacaggagagtactaaaagaaaaaactgtcaacttagaattccacaggcagctattataaaatatctttctaaaacaaatacaaaataaaggcttttttggatataaaagcagaaagaactaatcactagcagaccaacactacaataaatgctaaaagaactatttcagacaaataataaatgaaatgtgaatataccaaaaagaaggaagagcattagaaatgttcattgctaatagtaaatatagtacagagagatgatgatgatgtgaaatttctcatcacaccactcaaaacagtgtgcaaattataatgtatttatttctggaattttctattcaatatttttcagaccgcagttgactgaagataactgaaactgtgaaaagagataaggaaggagtaacagacaaatacagtaaaaatggtaaacaataaagacttgttccatt

SEQ ID NO: 277966 - DNA, 156 bp, Homo sapiens
agtttgagcccgcttatatcctgctgtaggaaggctggaattacccaaatctccagaccgcagttgactgaagataactgaaactgtgaaaagagataaggaaggagtaacagacaaatacagtaaaaatggtaaacaataaagacttgttccatt

SEQ ID NO: 277967 - DNA, 610 bp, Homo sapiens
agcaggtcacaatgaagggcaggtgacaatgaagaagggcagggaaggtgactgagatggaagatacagtcaaaatggtgttcgaaaatacagagggatccagcataattaagagcattaagcaatcatctcagcccaaggaggcagttgaagaaaagaacagagtttgggcaacacttggggaaataaattccacagcctttcaccaagttgaaatcttggctttggacacacataaaaatgagcctggcccaatcttagctctcagtggacatctgccatatcacaagatttgacccaattggcctgccttaccatagagaaggccactgctggagcagcagatggtactgctggtaagagccaacgtggacggacagggctgtggcagggaaatggcagagcacagctggccccagcctgggtaggaggctttgctttgaagagaatcatttttgtgatgcatttttttaaaataacatcgatctgatttccttctctcgtagacttcaatcacttttcatgtcctacagaacattgctaattattcttttttttctctcttgtcaccagtactgtcatacagtagtaaaacaagtgctaaactcta

SEQ ID NO: 277968 - DNA, 787 bp, Homo sapiens
gccgcggtggtcgcctctggcagtgccgctagctttcaggcagtcgcctctcctcccgacatcccgccttgaggaggctgaggcggaatcgcggctggcggcggggggacggaccggccctgcagtggccgcagtgacagcccggacccggccctccgcccgctctcgcctcggcgcccgcagccacgatgaaccggggcggcggcagcccgtcggccgccgccaactacctgctctgtaccaactgccggaaagtgctgcggaaggataaaagaatcagagtgtctcaacccttgacaagaggaccaagtgcctttattccagagaaggaagttgtccaagcaaacacagtggatgaacgtactaactttcttgtggaagaatactctacatccggtcgtctggacaacatcacacaggtcatgagtttacacactcagtacctggagtctttcttgcggagccagttttacatgttgcgcatggatggtccccttcctctaccatacaggcactatattgcaataatggctgcagctagacatcagtgttcttacttaataaacatgcatgtggatgaatttttaaagactggaggtattgctgagtggttgaatggtttggaatatgtgccacaaagactgaaaaatcttaatgaaattaataagctgctagcacatcgaccttggctgatcacaaaagagcacattcagaaacttgtcaaaactggagaaaataattggtctctgcctgaactggtacacgcatagtggtacctcctggcaca

SEQ ID NO: 277969 - DNA, 890 bp, Homo sapiens
aatgcacagtcctgtggccacggccatggccgggtggggagctgggctccagtgagcacagagctccttgccagtaggcgatgcaagttatctctggggcccggaggacacgagtgaggaccgggcaccaatcaggttctcgctctgcgccggcctttgttctcactcgggagcaggttgcgggcgtctagcatcgggaacccgcattcgactcggacgcgcattgctagccccttcgggagacctggctcccctacccgtctgtcccgccacactcggtcagcctgcgctttccccagtcaagtctgccttctctccgcagaacgtggacgctaaaaccctgacttaccattttaagctttagaagaggataaaagaatcagagtgtctcaacccttgacaagaggaccaagtgcctttattccagagaaggaagttgtccaagcaaacacagtggatgaacgtactaactttcttgtggaagaatactctacatccggtcgtctggacaacatcacacaggtcatgagtttacacactcagtacctggagtctttcttgcggagccagttttacatgttgcgcatggatggtccccttcctctaccatacaggcactatattgcaataatggctgcagctagacatcagtgttcttacttaataaacatgcatgtggatgaatttttaaagactggaggtattgctgagtggttgaatggtttggaatatgtgccacaaagactgaaaaatcttaatgaaattaataagctgctagcacatcgaccttggctgatcacaaaagagcacattcagaaacttgtcaaaactggagaaaataattggtctctgcctgaactggtacacgcatagtggtacctcctggcaca

SEQ ID NO: 277970 - DNA, 503 bp, Homo sapiens
cagttttcccaggtaaggaatggattttttagccttctagttataggtctgtgacctgaatttctcaaatgagttgagcccagggaggggtcctcatgccctctgcaagagcggaaaccaggtacagttctatgatcccacctgaaatgggtgtgtggttctgggaagctaaatacccatttcggagatcaagcatggggttggtgaatcactcatcctctgaatcatatgtgtgttcttcagtgtactaatctcatttttcctgctagagcctttcatccatgaaagcctccctgattcccatgcaggaactacctcaccttcttccaatctcttagtacattcccgtgaaaagaaggcagagatgttttgctgtgcccagtgtgaggaagcgaaggaaaagaaagatcttttgaaaatgtgtacatctacttgcagcttgaaaattccaagggccagacatttttcttggaggaaataaatgttttcaatttattcatttt

SEQ ID NO: 277971 - DNA, 402 bp, Homo sapiens
ataatctgccatctgcaacctggagactaaggagagccagtggaattgtgccagttgaagttcaaaagcatgagaaccagaagaactgatgatgtgaacagatgggtctcactcagtgacccaggctgaatgcagtggaacaatcatggcttactgtagccttgaccttgagggcttaagcaatcctgccacctcagcctgcctagtactgggactacagaaacatcaaatatattcagctcccgtctctcttcaaccatgtaaaattatttcaacaactatcagctattgaaggtgaaactggcatgtctgtttgttcttctcttcctggtgtcaaagactcttaaagcatgcatataaaatatgaaagtaaataaaacgtaatcaaaaatactaacattc

SEQ ID NO: 277972 - DNA, 403 bp, Homo sapiens
ccatggtccccatgacttgcctgtttgcctgctctggctaagggtcttgaccagtggggcactgaagaagcgagccacacctccatcgtacgccctgcgaggaggggtctcactcagtgacccaggctgaatgcagtggaacaatcatggcttactgtagccttgaccttgagggcttaagcaatcctgccacctcagcctgcctagtactgggactacagaaacatcaaatatattcagctcccgtctctcttcaaccatgtaaaattatttcaacaactatcagctattgaaggtgaaactggcatgtctgtttgttcttctcttcctggtgtcaaagactcttaaagcatgcatataaaatatgaaagtaaataaaacgtaatcaaaaatactaacattc

SEQ ID NO: 277973 - DNA, 556 bp, Homo sapiens
gcgctgatcaactgcagggcgtattcccgggggcagttggggagcgcagatcccgaagcagcgctgggagcgtaagtgcgggcagagcactgcgccgtttgggaacgcaactttgaggagacagtgcggtggacttcagtgaagttccttatgacttcccctgaaattgcttccttatcatgggggcaaatgaaagtaaaaggctctaatacaacctataaggactgcaaagtatggccagggggtagtcggacttgggattggagagaaacaggaactgagcattctcctggtgtgcagcctgcagatgtgaaggaagttgttgagaagggtgtacagactcttgtgattggccgagggatgagtgaggccttgaaggtgccttcatcaactgtggagtacctcaagaaacatggcattgatgtgcgggtcctccagacagagcaggcagtgaaggagtataatgccttggttgcccaaggggtcagggtgggaggtgtcttccattccacctgctgatggagccttaagaggagaataaatcactaagtgccta

SEQ ID NO: 277974 - DNA, 598 bp, Homo sapiens
gcgctgatcaactgcagggcgtattcccgggggcagttggggagcgcagatcccgaagcagcgctgggagcgtaagtgcgggcagagcactgcgccgtttgggaacgcaactttgaggagacagtgcggtggttctggaggctgggaagtccaagaccagttggctcgcatctgacttcagtgaagttccttatgacttcccctgaaattgcttccttatcatgggggcaaatgaaagtaaaaggctctaatacaacctataaggactgcaaagtatggccagggggtagtcggacttgggattggagagaaacaggaactgagcattctcctggtgtgcagcctgcagatgtgaaggaagttgttgagaagggtgtacagactcttgtgattggccgagggatgagtgaggccttgaaggtgccttcatcaactgtggagtacctcaagaaacatggcattgatgtgcgggtcctccagacagagcaggcagtgaaggagtataatgccttggttgcccaaggggtcagggtgggaggtgtcttccattccacctgctgatggagccttaagaggagaataaatcactaagtgccta

SEQ ID NO: 277975 - DNA, 723 bp, Homo sapiens
gcgctgatcaactgcagggcgtattcccgggggcagttggggagcgcagatcccgaagcagcgctgggagcgtaagtgcgggcagagcactgcgccgtttgggaacgcaactttgaggagacagtgcggtggttctggaggctgggaagtccaagaccagttggctcgcatctgacttcagtgaagttccttatgacttcccctgaaattgcttccttatcatgggggcaaatgaaagtaaaaggctctaatacaacctataaggactgcaaagtatggccagggggtagtcggacttgggattggagagaaacaggaactgagcattctcctggtgtgcagcctgcagatgtgaaggaagttgttgagaagggtgtacagactcttgtgattggccgagggatgagtgaggccttgaaggctccaacccagcagctgccatcaggtgttcatgtcagggctggggtacaattccacctggctacagcttcatggcacatcctttgagagatgcaaaacaggagctggactgacatcaaacatgctgtaacttgcaatgaagtcacctaagtacttttttggatcaaatctatgatgccatcattcttaagatcaccctttattttaatgaaattgtaggaaaccaaaaaccacttttgggacaccatcaaaatatctgatttcagagaagttacaataataaaaaatgtgtatcttggaatc

SEQ ID NO: 277976 - DNA, 1333 bp, Homo sapiens
gcgctgatcaactgcagggcgtattcccgggggcagttggggagcgcagatcccgaagcagcgctgggagcgtaagtgcgggcagagcactgcgccgtttgggaacgcaactttgaggagacagtgcggtggacttcagtgaagttccttatgacttcccctgaaattgcttccttatcatgggggcaaatgaaagtaaaaggctctaatacaacctataaggactgcaaagtatggccagggggtagtcggacttgggattggagagaaacaggaactgagcattctcctggtgtgcagcctgcagatgtgaaggaagttgttgagaagggtgtacagactcttgtgattggccgagggatgagtgaggccttgaaggtgccttcatcaactgtggagtacctcaagaaacatggcattgatgtgcgggtcctccagacagagcaggcagtgaaggagtataatgccttggttgcccaaggggtcagggtgggaggtgtcttccattccacctgctgatggagccttaagaggagaataaatcactaagtgcctaaaaaaaaaaaaaaaacaaaacacaaaaagacacaacaaaaacacaaaacaacaaacaacaacaaaaaaacaaacaaaaacaacacaagacaacagcaaaacacaaaaaaacacgaaaaacaagaaaaacaaacagagcgcaaaaaaaacaacgagacggagaaacaaaacaccacaacacaagaaaacacaaaagacaaaaaagaggcggcacaaacaacagcgagaaaccacgcaggacagaaacacacacgtgacacagtacaaccaagaaaaaggagacacaagtggcaccacccagagaaagaatacaaccgaacacacagagcccgcgcagagcatccacgacctagtcatcaacagcacaagggcagacgaagaaacagagaacggacgacgagccaacacgagagcaaaagagaagaaaaaacagaagaaccaagggaacgaaggagaaggagagaaagacaacagcaaaacgaaagagaagcagacagcaaggccagaacagagaggacaacgacagaagaagaaagacaggaagagacaaagcagaacgacaagaaaaaaacaggaagaaaagaaaaaaagaaaacgaaaagagaaagaagaacaaacgaaaagaggaacagaaaaacgagaaaaacagaaaaacaaagaaaaaagagagaccaagaaaaagaacaagcaagaacacagaagagagaaaaaaaagaaacgaagagaaacgaaaagaaagaaagaaacgaaaaaaaagagaaaaaaagaaagaacgaag

SEQ ID NO: 277977 - DNA, 653 bp, Homo sapiens
gctcgaccgaagcagcgctgggagcgtaagtgcgggcagagcactgcgccgtttgggaacgcaactttgaggagacagtgcggtggacttcagtgaagttccttatgacttcccctgaaattgcttccttatcatgggggcaaatgaaagtaaaaggctctaatacaacctataaggactgcaaagtatggccagggggtagtcggacttgggattggagagaaacaggaactgagcattctcctggtgtgcagcctgcagatgtgaaggaagttgttgagaagggtgtacagactcttgtgattggccgagggatgagtgaggccttgaaggtgccttcatcaactgtggagtacctcaagaaacatggcattgatgtgcgggtcctccagacagagcaggcagtgaaggagtataatgccttggttgcccaaggggtcagggtgggaggtgtcttccattccacctgctgatggagccttaagaggagaataaatcactaagtgcctaaaaaaaaaaaaaaaacaaaactcgggggggcccggtcccaatcgccctattggagtgattacaattaatggccgccgtttacaacgcgggctggaaaacctgcgttcccaactaatgcttggaaacatcccttttgccgctgg

SEQ ID NO: 277978 - DNA, 511 bp, Homo sapiens
ccttttataatgaacctactactcctgcaataacagcataatctattcatgagggtggaaccctcatggcctaatcagctcttaaagacttcagtgaagttccttatgacttcccctgaaattgcttccttatcatgggggcaaatgaaagtaaaaggctctaatacaacctataaggactgcaaagtatggccagggggtagtcggacttgggattggagagaaacaggaactgagcattctcctggtgtgcagcctgcagatgtgaaggaagttgttgagaagggtgtacagactcttgtgattggccgagggatgagtgaggccttgaaggtgccttcatcaactgtggagtacctcaagaaacatggcattgatgtgcgggtcctccagacagagcaggcagtgaaggagtataatgccttggttgcccaaggggtcagggtgggaggtgtcttccattccacctgctgatggagccttaagaggagaataaatcactaagtgccta

SEQ ID NO: 277979 - DNA, 660 bp, Homo sapiens
gcgctgatcaactgcagggcgtattcccgggggcagttggggagcgcagatcccgaagcagcgctgggagcgtaagtgcgggcagagcactgcgccgtttgggaacgcaactttgaggagacagtgcggtggacttcagtgaagttccttatgacttcccctgaaattgcttccttatcatgggggcaaatgaaagtaaaaggctctaatacaacctataaggactgcaaagtatggccagggggtagtcggacttgggattggagagaaacaggaactgagcattctcctggtgtgcagcctgcagatgtgaaggaagttgttgagaagggtgtacagactcttgtgattggccgagggatgagtgaggccttgaaggtgccttcatcaactgtggagtacctcaagaaacatggcattgatgtgcgggtcctccagacagagcaggcagtgaaggagtataatgccttggttgcccaaggggtcagggtgggaggtgtcttccattccacctgctgatggagccttaagaggagaataaatcactaagtgcctaaaaaaaaattattctctactctattcttcatagtttttctacttttatctcttcttattgctcttgtaatttaatcctttctttatattattcctttctcattc

SEQ ID NO: 277980 - DNA, 334 bp, Homo sapiens
gcttgttcaacctctgcccaaactcatctagcctggagaattctataccccctagtacagcccgttcaattcttacacagcttttaaaaatgtattctgataccaagccaaaacctgtcccttagtgcatgtctacctttgatggaagaagtactacattttgcatttttaagacaggatcaagtcctggctttgtcccttaggagacagacattatctcaaagcctctgtttccttacatggaaaatgagggctaacttggaggatttttgcttcgatcggccgctcgaagacgagaaattagccgtcgccccaggtctcgacatgggtgggc

SEQ ID NO: 277981 - DNA, 1375 bp, Homo sapiens
gcgctgatcaactgcagggcgtattcccgggggcagttggggagcgcagatcccgaagcagcgctgggagcgtaagtgcgggcagagcactgcgccgtttgggaacgcaactttgaggagacagtgcggtggttctggaggctgggaagtccaagaccagttggctcgcatctgacttcagtgaagttccttatgacttcccctgaaattgcttccttatcatgggggcaaatgaaagtaaaaggctctaatacaacctataaggactgcaaagtatggccagggggtagtcggacttgggattggagagaaacaggaactgagcattctcctggtgtgcagcctgcagatgtgaaggaagttgttgagaagggtgtacagactcttgtgattggccgagggatgagtgaggccttgaaggtgccttcatcaactgtggagtacctcaagaaacatggcattgatgtgcgggtcctccagacagagcaggcagtgaaggagtataatgccttggttgcccaaggggtcagggtgggaggtgtcttccattccacctgctgatggagccttaagaggagaataaatcactaagtgcctaaaaaaaaaaaaaaaacaaaacacaaaaagacacaacaaaaacacaaaacaacaaacaacaacaaaaaaacaaacaaaaacaacacaagacaacagcaaaacacaaaaaaacacgaaaaacaagaaaaacaaacagagcgcaaaaaaaacaacgagacggagaaacaaaacaccacaacacaagaaaacacaaaagacaaaaaagaggcggcacaaacaacagcgagaaaccacgcaggacagaaacacacacgtgacacagtacaaccaagaaaaaggagacacaagtggcaccacccagagaaagaatacaaccgaacacacagagcccgcgcagagcatccacgacctagtcatcaacagcacaagggcagacgaagaaacagagaacggacgacgagccaacacgagagcaaaagagaagaaaaaacagaagaaccaagggaacgaaggagaaggagagaaagacaacagcaaaacgaaagagaagcagacagcaaggccagaacagagaggacaacgacagaagaagaaagacaggaagagacaaagcagaacgacaagaaaaaaacaggaagaaaagaaaaaaagaaaacgaaaagagaaagaagaacaaacgaaaagaggaacagaaaaacgagaaaaacagaaaaacaaagaaaaaagagagaccaagaaaaagaacaagcaagaacacagaagagagaaaaaaaagaaacgaagagaaacgaaaagaaagaaagaaacgaaaaaaaagagaaaaaaagaaagaacgaag

SEQ ID NO: 277982 - DNA, 495 bp, Homo sapiens
gcgctgatcaactgcagggcgtattcccgggggcagttggggagcgcagatcccgaagcagcgctgggagcacttcagtgaagttccttatgacttcccctgaaattgcttccttatcatgggggcaaatgaaagtaaaaggctctaatacaacctataaggactgcaaagtatggccagggggtagtcggacttgggattggagagaaacaggaactgagcattctcctggtgtgcagcctgcagatgtgaaggaagttgttgagaagggtgtacagactcttgtgattggccgagggatgagtgaggccttgaaggtgccttcatcaactgtggagtacctcaagaaacatggcattgatgtgcgggtcctccagacagagcaggcagtgaaggagtataatgccttggttgcccaaggggtcagggtgggaggtgtcttccattccacctgctgatggagccttaagaggagaataaatcactaagtgccta

SEQ ID NO: 277983 - DNA, 860 bp, Homo sapiens
gcgctgatcaactgcagggcgtattcccgggggcagttggggagcgcagatcccgaagcagcgctgggagcgtaagtgcgggcagagcactgcgccgtttgggaacgcaactttgaggagacagtgcggtggttctggaggctgggaagtccaagaccagttggctcgcatctgacttcagtgaagttccttatgacttcccctgaaattgcttccttatcatgggggcaaatgaaagtaaaaggctctaatacaacctataaggactgcaaagtatggccagggggtagtcggacttgggattggagagaaacaggaactgagcattctcctggtgtgcagcctgcagatgtgaaggaagttgttgagaagggtgtacagactcttgtgattggccgagggatgagtgaggccttgaaggctccaacccagcagctgccatcaggtgttcatgtcagggctggggtacaattccacctggctacagcttcatggcacatcctttgagagatgcaaaacagggtcttactctgccacccaggctggagtgcagtggcacgatcataactcactgaagcctcaaactcctgggcgcaagtgatcttcctgcctcagcctcctgaggagtggggattacaggcacgtgccaccacgccaggagctggactgacatcaaacatgctgtaacttgcaatgaagtcacctaagtacttttttggatcaaatctatgatgccatcattcttaagatcaccctttattttaatgaaattgtaggaaaccaaaaaccacttttgggacaccatcaaaatatctgatttcagagaagttacaataataaaaaatgtgtatcttggaatc

SEQ ID NO: 277984 - DNA, 642 bp, Homo sapiens
gcgctgatcaactgcagggcgtattcccgggggcagttggggagcgcagatcccgaagcagcgctgggagcgtaagtgcgggcagagcactgcgccgtttgggaacgcaactttgaggagacagtgcggtggttctggaggctgggaagtccaagaccagttggctcgcatctgacttcagtgaagttccttatgacttcccctgaaattgcttccttatcatgggggcaaatgaaagtaaaaggctctaatacaacctataaggactgcaaagtatggccagggggtagtcggacttgggattggagagaaacaggaactgaggtgccttcatcaactgtggagtacctcaagaaacatggcattgatgtgcgggtcctccagacagagcaggcagtgaaggagtataatgccttggttgcccaaggggtcagggtgggaggtgtcttccattccacctgctgatggagccttaagaggagaataaatcactaagtgcctaaaaaaaaaaaaaaacccttataacccctcctgaaacaaactgttagcaccaaaccggatcacctctctagaaactacactgccggcgtttacaacgtaggcctgggaaaccctggggttcccaccttaacgctttgaact

SEQ ID NO: 277985 - DNA, 485 bp, Homo sapiens
gagaattctataccccctagtacagcccgttcaattcttacacagcttttaaaaatgtattctgataccaagccaaaacctgtcccttagtgcatgtctacctttgatggaagaagtactacattttgcatttttaagacaggatcaagtcctggctttgtcccttaggagacagacattatctcaaagcctctgtttccttacatggaaaatgagggctaacttggaggatttttataaaaggggtacttatctgaaaaatatcagcatattcttcccttagaaggttttctataattacagcacgatgggctcaggcagcagccatggttcttcatgtttttgtctaggctccaacccagcagctgccatcaggtgttcatgtcagggctggggtacaattccacctggctacagcttcatggcacatcctttgagagatgcaaaacaggtaagcacactagaaaagtcagctccctggagtt

SEQ ID NO: 277986 - DNA, 581 bp, Homo sapiens
gcgctgatcaactgcagggcgtattcccgggggcagttggggagcgcagatcccgaagcagcgctgggagcacttcagtgaagttccttatgacttcccctgaaattgcttccttatcatgggggcaaatgaaagtaaaaggctctaatacaacctataaggactgcaaagtatggccagggggtagtcggacttgggattggagagaaacaggaactgagcattctcctggtgtgcagcctgcagatgtgaaggaagttgttgagaagggtgtacagactcttgtgattggccgagggatgagtgaggccttgaaggatggaatacagggggcacagttagatctgaattgttaagcagaggctgcttgatgcagaagatgaagacagaagaaagaatgagcctaggccgggcacagtggctcacgcctgtaattccagcactttgggaggccgaggcgggaggatcacttgagctcaggagtttgagaccagcctggccaccatggtgaaacctcgactctacaaaaaaaaaaaagccaaaattagccaggtgtggtggcatatgcctgtggtcccagc

SEQ ID NO: 277987 - DNA, 674 bp, Homo sapiens
gcgctgatcaactgcagggcgtattcccgggggcagttggggagcgcagatcccgaagcagcgctgggagcgtaagtgcgggcagagcactgcgccgtttgggaacgcaactttgaggagacagtgcggtggagatgaggtttcaccatgttggccagtctggtcttgaactcctgacctcaagtgatccacccacttcggcctctcagaagtgctgggattacaggcatgagccaccacgcctggccagacttcagtgaagttccttatgacttcccctgaaattgcttccttatcatgggggcaaatgaaagtaaaaggctctaatacaacctataaggactgcaaagtatggccagggggtagtcggacttgggattggagagaaacaggaactgagcattctcctggtgtgcagcctgcagatgtgaaggaagttgttgagaagggtgtacagactcttgtgattggccgagggatgagtgaggccttgaaggtgccttcatcaactgtggagtacctcaagaaacatggcattgatgtgcgggtcctccagacagagcaggcagtgaaggagtataatgccttggttgcccaaggggtcagggtgggaggtgtcttccattccacctgctgatggagccttaagaggagaataaatcactaagtgccta

SEQ ID NO: 277988 - DNA, 629 bp, Homo sapiens
gctcgaccgaagcagcgctgggagcttctggaggctgggaagtccaagaccagttggctcgcatctgacttcagtgaagttccttatgacttcccctgaaattgcttccttatcatgggggcaaatgaaagtaaaaggctctaatacaacctataaggactgcaaagtatggccagggggtagtcggacttgggattggagagaaacaggaactgagagtctcactctgttgcccaggctggagtgcagtggcgcgatctcggctcactgcaacctccacctcccaggttcatgccattctcctgcctcagcctcccaagtagctgggactacaggtgcctgccaccacacccagcattctcctggtgtgcagcctgcagatgtgaaggaagttgttgagaagggtgtacagactcttgtgattggccgagggatgagtgaggccttgaaggtgccttcatcaactgtggagtacctcaagaaacatggcattgatgtgcgggtcctccagacagagcaggcagtgaaggagtataatgccttggttgcccaaggggtcagggtgggaggtgtcttccattccacctgctgatggagccttaagaggagaataaatcactaagtgccta

SEQ ID NO: 277989 - DNA, 408 bp, Homo sapiens
tctaaaataacaacaacaacaacaacaacaacaataataataataataataatatagagaatgaccaggtggatggcaagagttttacaactttagatagggtgatcacaagtcacttaagtggacagtacataactaaggagtcagccataagaaagtccaagtacagagggaatagtaaatagacttaagtatatatattttgtgagaaatttgttttcagtttttataccttataatttatatggaagagctaattcttggactcttgtctatgtggaaaaaaaaatatttcaagccaaagaaattactggaaattttggagacaaactcatctctctatatatgcattgtcactaacttgagtatttattttttatgtcctcaaggctgaactcatgtggatta

SEQ ID NO: 277990 - DNA, 306 bp, Homo sapiens
ccctatttttcaccatgttaggattaagaagtggatccctgacacagtcagaatcaaatagctgtcgtttttggccacagtcttgtgaattttggtactgagggtcctgggttgaaggcccagacaatggtgcatcgggatcaaggtaatagatctcatttgttcgaacatacggaataaaatgggatgattcagaaatcccagatgataattctgtttgattacttcctgagatcaaattctctctctcatagctactgttttttagtggtaaatgtaatgtattttgagtttgttgggttctgt

SEQ ID NO: 277991 - DNA, 8134 bp, Homo sapiens
cggctccgaggaccgggcagcgcatttggggtgcccgctacagggccccccaagaggctgccaggtcgggagcgcagcctgaggccacggggggaagggggtgggtgggctgagagcagctcggcggcgagactggcccgccgccccttccccccacacccgtcgaccttgtgggcagaagcttcccagagctccttaggccggcgcgatggcgactgctgtggagacggaggcctgtcagccgacggatgcgagttgggaaagtggcggcggcggagacgacgagatgaagcaggcgcttccggagcttgagtcctcccaacaaaatggcggcggcggcggcctcaacatcgctgagcccagcggcggcgctgggcgtgaggagaacgcgggggccgaggccgcccagagcctcagccacgagcagcctcaggactcctctgaggcgggcgcggccgccctgcccagaggccccgaagagcccgaaaggcctgttaggaggagttttcagatccccaggaagagcagagaaaagaaagcacttttccagccattaactccaggctctcgagaatttgaagatgttgtaaatattctccattcttcttaccttgaaccaacctcagtaacaaattttaactacagacgtgcttgcttggtacacaatgagcttttggaaaaggagtttacagaaaagcgaagagaactgaagtttgatggtcgtttagataaggaactttcagaatcctatgcatttctgatggttgatcgataccaggttcaaaccatatgtgaaaaaggattacatgtgggtcagtccaaaataacaattcttggcagtccttccatgggtgtctatctttctaggtatgctgatttattacaagcgaatcctttggacacgggggcaatgggtgatgttgttatttttaaaataatgaagggtaaaataaagagtatatatgaccccatgggtgtaaaaagtttggaatctatgttaaataagagtgctttggaccccacaccaaagcatgaatgtcacgtgtcaaagaatgccaatcgaattacatcacttttggcttacagagcctatgagcttactcagtattatttttatgagtatggctttgatgagctaaggcgaagaccaagacacgtttgtccatatgcagttgtgtcttttacttacaaagatgatatacaaactccgaagtttgtaccttcatcaagatctaacagctttaatacagatagaaacatagataaatataactataccttgtggaaaggacagcttttaaataaaggaaaacttttgtgttatatttctctgaggtcagccactcgtgcttttttgcctatcaaactacctgagaaattagatgttgaaacagttatgagtattgatcatctgaaacagaaaatccctccagcactgttttataaggaaacatacttaggtccaaatgaagttttgaagaatggaatgtattgcagcctttatgaagttgtggaaaagacaagaattggaagtaacatggagagtttactgcaaaaactagacagagaaaaacttgttcttgttaaacctttgggagaccgaggatacctttttcttctctccccttatcagatggttcctccatatgaatatcagactgccaagtctcgagtcctacatgctttgtttctatttcaagaacctagaagcatagttacttcacaaaaaggttcaaccaatgcagcaccacaggagaggcatgagagcatgccagatgtattaaaaatagctcagtttttacaattttctttgattcagtgtcgaaaggaattcaaaaatataagcgccataaattttcattctgttgttgaaaagtatgtaagtgaattttttaagcgaggttttggttcaggtaaacgagagtttattatgtttccatatgattcacgattagatgataaaaaattcttatactcagctcccagaaataaatcccatattgatacttgtttgcatgcctatatttttcggcctgaagtgtatcagttacctatttgtaaattaaaagaactatttgaagaaaatagaaaacttcagcagtttagtccactttcagattatgaaggtcaagaagaagaaatgaatggtacaaaaatgaaatttggaaaacgaaataactcaagaggtgaagccattatatctggaaagcaaagatcatctcattctttggattatgataaggatagagtcaaagaattgattaatttaattcagtgtaggaaaaagagtgtgggtggggactcagacacagaagatatgagaagcaaaactgtcttgaagaggaagcttgaggatctacctgaaaatatgagaaagctcgccaaaaccagtaatttatctgaaaattgccatctgtatgaagagtctccacagcctattggctcacttggacatgatgctgacttgaggcggcagcagcaggatacctgtaactccggcattgctgacatccataggctgtttaattggttatcagaaacactagcaaatgcgcgccattctgatgcatctctgacagacacagtcaacaaagccttaggattgagcactgatgatgcctatgaagagctgaggcaaaaacatgagtatgagttgaactctaccccagataagaaagactatgagcagcctacttgtgcaaaagttgaaaatgcacagtttaagggtactcagagcttattactagaagttgatgcaacatctaagtattctgttgctatttctaccagcgaagtgggcactgaccataagctacatttgaaagaagatccaaatttaattagcgtgaataattttgaagattgcagtttgtgtcccagtgttcccattgaacatggatttcgtagacaacagtctaagtcaaataatgttgaagagactgaaatacattggaaactgattccaattacaggagggaatgcaagaagcccagaagaccagctggggaaacatggtgagaaacaaacaccaggtatgaaatcaccagaagaacaactggtgtgtgtgccaccacaggaggcctttcctaacgacccccgggtaataaatagacagagaagttctgattaccagtttccatcctctccatttacagacacactaaagggcaccactgaggatgacgtgttgacaggtcaggtggaggagcagtgtgtgccagcagcagaggcagagccgcctgcagtgagcgaaaccacagagaggacagtgttaggagagtacaatctcttttctaggaagatagaagagattttgaagcaaaagaatgtttcatatgtcagtagagtttccacacctatcttttcaacacaagagaagatgaaacggctttccgagttcatatattctaagacttccaaagctggtgtgcaggagtttgtagatggtttgcatgagaagctaaatactattattattaaagcatcagccaagggtgggaatttgccaccagtcagtcctaacgattctggtgctaagatagcatcgaatcctctggaaaggcatgtcataccagtttcctcaagtgacttcaacaataaacatctccttgagccactgtgtagtgatcctttgaaagataccaactctgatgagcagcattccacttcggctttaactgaagtagaaatgaaccagcctcaacatgccacagagttaatggtgacttctgatcatattgtacctggtgatatggcccgggaaccagtagaagaaacaacaaaatcccccagtgatgtaaacatttctgctcaaccagctctttcaaattttataagccagttagaacctgaagtatttaatagtttggttaaaatcatgaaagacgtccagaaaaatactgtgaaattttatattcatgaagaagaagagagtgtgctctgtaaagaaataaaggaatatcttatcaaattaggcaatacagaatgtcatcctgaacagtttttggaaagaagatcaaaattagataaactattgattattattcaaaatgaagacattgcaggtttcattcacaagatacctggcttggtgactttaaagaagctcccctgtgttagttttgctggtgttgatagcctggatgatgttaaaaatcatacatacaatgaattatttgtatctggaggttttatcgtatctgatgaatcaattctaaacccagaggttgtcacagttgagaaccttaaaaattttttgacattccttgaggaacttagtactccagaaggaaaatggcaatggaaagtccactgtaaatttcagaagaaactaaaggaactaggcagattgaatgctaaagctctaagtctgttgacgcttctgaatgtctatcagaagaaacatctggttgaaattttgtcataccacaattgtgattcacaaactcgaaatgctccagaattggattgccttatcagacttcaggctcagaacatacagcaacgacacatagtctttttaacagagaagaacatcaagatgctttccagttatacagataatggaatagtggttgcaactgctgaagacttcatgcaaaactttaaaaatcttgtgggctatcacaattcaatcacagaagaaaaccttccacagcttggtgctaatgagaatcttgagtcgcagtcagctcttttagaaaacgatgaaaaggatgaagaggatatgtctctggattcaggggatgaaatctcacatatagaagtatgcagcaattttcattcagaaatatgggagaaagagaccaaaggatcacgtggaacagatcaaaaaaagaatactcaaattgagttgcaatcgtctcctgatgtgcaaaacagtttattagaagataagacttaccttgattctgaagagagaacttctattgatatagtatgctctgaaggagagaacagcaattcaacagaacaagattcatatagtaactttcaggtttatcatagtcaattaaatatgtcccatcagtttagtcattttaatgttctcactcatcagacatttttggggacaccatatgccctttcatcaagtcagtctcaagaaaatgagaattacttcttatctgcttatactgaaagcttggatagagataaatctccacctcccttaagttgggggaaaagtgattcttccaggccatattcacaagagaaataactgtagtaactttttttttaagagattgttgtggactttgtttattaacaatttatatttcattctctaaacaaaaggttcttgttctttctcaaatgttttttcttttatttaaatcatgatggcctgtaacagttgaagcatctaaaaattgaaataaatatatatttttaacatatattgtacttgaattatctcatgttggcacttctaagttttactttttgtatgttacctgtacttaggcttcaaattgaagcctgttttatgtgtaaaatcagatgcttgcaggaggacggtaaacagcaaaggctttacttctttttctctaatgtcacctgatataaagtacttttgttgaagtgaattattttgatgtaggcttttgtatactgtgtttacacaggtataagtcagtaatagcagtgttaatatttacaggattttggctcgatacctcaagatttatctaacagtgcagtttcatttagataataaactatgtacataggacacattttttatctctaggcttagtcatgtaaaaactgcctattgctaaaattctggtaactttttgagagtattggataattttcagtacctgcgcaatccttgatttaatgaaattaaattttttatttcaaaagataggcttctgtttatcaaaggcgttgaacaatttgatttttaaattagttttagcaaaatggaagtataatgggaatatatttttgaggtggtcttagtagtaattaccatttgttgaacacattaatgctatactagacagatacagtggagatagctttcaaacccgtatctattcctaactactgcctctaatactaattactaacttgttactaatgctaacttttaaaaatgtttttgaaaattgcaatttctacaaataaatgtcatagtgcaaataaatgtcaggatttagagaaggagcctaaactgaatttgtgttatttcagtaaaagttatggagttatgggtctagacgtgttaataagttagacagaactttggcactttagaacaaatgcatgagtggtatttcagttcctaagttacataaaaagtgtgaaagaacactgtgaggtcccagcaacgccagactatattaaggtaagtagaaagtgtttttatagggcttcaatacccaggtggtgacagagcagaagaaccggtttttttttttttttttttactactaagcttttacaaaagaagtatctgttttattgtatagaacaagtacagcattttactacatagtatacaagtttttaatgagcatttaaaaaaataagtaaatctaggctatttgaaaaatacagttgagccagtgagcacattttataatttggaagacacaaatcaaatgtgaaggatttgattttctacatttaaaatgaagaaccaaaactctcttcttgattttcagctaaaggcaggagactactttccaactccttttgcttctggagaaggccctgaaatcacattgatatatgtttgttagtaaaatgtgcacacctgacttgcaatgttgtgttaaactagaattatattcacttggaaaacatatcgcttaggataaaattttgtcattcaaaaattttttcagaaatgcttgtactagaccacctcatttggatatatagctatcacatttgtaagattctgtttttagcataaaaatcaatagggatgaaaattttcttagaactcaagactccataactatgggggtaaatgaagtcatcccttctcccccagtccacccccaagtgctcttagatactgaaggagtctcccttaacatacagtgttttttttttgttgttgtttttttgtttttttttggagatggagtctcgctctgtcgcccaagctggagtacagtggtgcaatctcactgcaagctctgcctcccaggttcacaccattctcctgcctcaacctcccgaatggctgggactacaggcacccaccaccacgcctggctaactaactaactaactttttgtatttttagtagagacagggtttcactgtgttagccaggatggtcttgatctcctgacctcatgatctgcctgcctcagcctcccaaagtgctgggattacaggcttgagccactgctcctggccaacatccagtattttatcttgactgtcctaaccttaccttagatgctaacagaagggtcctgctgaaataacactgggtgctatattgatgggtaaatgtgtacatcctattccttcctctttatctcacaatttttgtctccactaagcaagaagtaaactaacacttcgtcactctaaagaaataacttatgtaaaactcttagtaaccctgtttgtcttcaaatgagtaaatagaccaaagtggggggacaattttctagttctgtagagggaaaaacatctgagtcaacattttgaaatgcagagggtattggtacatgacgacatggaaaagggcacttttaaacacagcttactcttcctcaagtacagagagtatatagtgaatcaaaactaactacagccattctttttaaagcccaagggatggagcaaaggtgtaaggatgttacctgtttgttttaatcagagagcaaaaagaagtcacaatagtttgggagaaaaagtagtatggtgagtaaggttatgcgtataatttcatactgaatttattactatttgggatgtacgtcaatgttctaacaaacactgccaacacgtcaattttttaaaaagcgtgggccacattgctaagaatttgttaaagcataactgtattttttgttttagggccttattgatgttttgccgttccaatgtatgcatttttttactcaataaacttgtcttaattttaaaaaagtc

SEQ ID NO: 277992 - DNA, 8028 bp, Homo sapiens
cggctccgaggaccgggcagcgcatttggggtgcccgctacagggccccccaagaggctgccaggtcgggagcgcagcctgaggccacggggggaagggggtgggtgggctgagagcagctcggcggcgagactggcccgccgccccttccccccacacccgtcgaccttgtgggcagaagcttcccagagctccttaggccggcgcgatggcgactgctgtggagacggaggcctgtcagccgacggatgcgagttgggaaagtggcggcggcggagacgacgagatgaagcaggcgcttccggagcttgagtcctcccaacaaaatggcggcggcggcggcctcaacatcgctgagcccagcggcggcgctgggcgtgaggagaacgcgggggccgaggccgcccagagcctcagccacgagcagcctcaggactcctctgaggcgggcgcggccgccctgcccagaggccccgaagagcccgaaaggcctgttaggaggagttttcagatccccaggaagagcagagaaaagaaagcacttttccagccattaactccaggctctcgagaatttgaagatgttgtaaatattctccattcttcttaccttgaaccaacctcagtaacaaattttaactacagacgtgcttgcttggtacacaatgagcttttggaaaaggagtttacagaaaagcgaagagaactgaagtttgatggtcgtttagataaggaactttcagaatcctatgcatttctgatggttgatcgataccaggttcaaaccatatgtgaaaaaggattacatgtgggtcagtccaaaataacaattcttggcagtccttccatgggtgtctatctttctaggtatgctgatttattacaagcgaatcctttggacacgggggcaatgggtgatgttgttatttttaaaataatgaagggtaaaataaagagtatatatgaccccatgggtgtaaaaagtttggaatctatgttaaataagagtgctttggaccccacaccaaagcatgaatgtcacgtgtcaaagaatgccaatcgaattacatcacttttggcttacagagcctatgagcttactcagtattatttttatgagtatggctttgatgagctaaggcgaagaccaagacacgtttgtccatatgcagttgtgtcttttacttacaaagatgatatacaaactccgaagtttgtaccttcatcaagatctaacagctttaatacagatagaaacatagacctgagaaattagatgttgaaacagttatgagtattgatcatctgaaacagaaaatccctccagcactgttttataaggaaacatacttaggtccaaatgaagttttgaagaatggaatgtattgcagcctttatgaagttgtggaaaagacaagaattggaagtaacatggagagtttactgcaaaaactagacagagaaaaacttgttcttgttaaacctttgggagaccgaggatacctttttcttctctccccttatcagatggttcctccatatgaatatcagactgccaagtctcgagtcctacatgctttgtttctatttcaagaacctagaagcatagttacttcacaaaaaggttcaaccaatgcagcaccacaggagaggcatgagagcatgccagatgtattaaaaatagctcagtttttacaattttctttgattcagtgtcgaaaggaattcaaaaatataagcgccataaattttcattctgttgttgaaaagtatgtaagtgaattttttaagcgaggttttggttcaggtaaacgagagtttattatgtttccatatgattcacgattagatgataaaaaattcttatactcagctcccagaaataaatcccatattgatacttgtttgcatgcctatatttttcggcctgaagtgtatcagttacctatttgtaaattaaaagaactatttgaagaaaatagaaaacttcagcagtttagtccactttcagattatgaaggtcaagaagaagaaatgaatggtacaaaaatgaaatttggaaaacgaaataactcaagaggtgaagccattatatctggaaagcaaagatcatctcattctttggattatgataaggatagagtcaaagaattgattaatttaattcagtgtaggaaaaagagtgtgggtggggactcagacacagaagatatgagaagcaaaactgtcttgaagaggaagcttgaggatctacctgaaaatatgagaaagctcgccaaaaccagtaatttatctgaaaattgccatctgtatgaagagtctccacagcctattggctcacttggacatgatgctgacttgaggcggcagcagcaggatacctgtaactccggcattgctgacatccataggctgtttaattggttatcagaaacactagcaaatgcgcgccattctgatgcatctctgacagacacagtcaacaaagccttaggattgagcactgatgatgcctatgaagagctgaggcaaaaacatgagtatgagttgaactctaccccagataagaaagactatgagcagcctacttgtgcaaaagttgaaaatgcacagtttaagggtactcagagcttattactagaagttgatgcaacatctaagtattctgttgctatttctaccagcgaagtgggcactgaccataagctacatttgaaagaagatccaaatttaattagcgtgaataattttgaagattgcagtttgtgtcccagtgttcccattgaacatggatttcgtagacaacagtctaagtcaaataatgttgaagagactgaaatacattggaaactgattccaattacaggagggaatgcaagaagcccagaagaccagctggggaaacatggtgagaaacaaacaccaggtatgaaatcaccagaagaacaactggtgtgtgtgccaccacaggaggcctttcctaacgacccccgggtaataaatagacagagaagttctgattaccagtttccatcctctccatttacagacacactaaagggcaccactgaggatgacgtgttgacaggtcaggtggaggagcagtgtgtgccagcagcagaggcagagccgcctgcagtgagcgaaaccacagagaggacagtgttaggagagtacaatctcttttctaggaagatagaagagattttgaagcaaaagaatgtttcatatgtcagtagagtttccacacctatcttttcaacacaagagaagatgaaacggctttccgagttcatatattctaagacttccaaagctggtgtgcaggagtttgtagatggtttgcatgagaagctaaatactattattattaaagcatcagccaagggtgggaatttgccaccagtcagtcctaacgattctggtgctaagatagcatcgaatcctctggaaaggcatgtcataccagtttcctcaagtgacttcaacaataaacatctccttgagccactgtgtagtgatcctttgaaagataccaactctgatgagcagcattccacttcggctttaactgaagtagaaatgaaccagcctcaacatgccacagagttaatggtgacttctgatcatattgtacctggtgatatggcccgggaaccagtagaagaaacaacaaaatcccccagtgatgtaaacatttctgctcaaccagctctttcaaattttataagccagttagaacctgaagtatttaatagtttggttaaaatcatgaaagacgtccagaaaaatactgtgaaattttatattcatgaagaagaagagagtgtgctctgtaaagaaataaaggaatatcttatcaaattaggcaatacagaatgtcatcctgaacagtttttggaaagaagatcaaaattagataaactattgattattattcaaaatgaagacattgcaggtttcattcacaagatacctggcttggtgactttaaagaagctcccctgtgttagttttgctggtgttgatagcctggatgatgttaaaaatcatacatacaatgaattatttgtatctggaggttttatcgtatctgatgaatcaattctaaacccagaggttgtcacagttgagaaccttaaaaattttttgacattccttgaggaacttagtactccagaaggaaaatggcaatggaaagtccactgtaaatttcagaagaaactaaaggaactaggcagattgaatgctaaagctctaagtctgttgacgcttctgaatgtctatcagaagaaacatctggttgaaattttgtcataccacaattgtgattcacaaactcgaaatgctccagaattggattgccttatcagacttcaggctcagaacatacagcaacgacacatagtctttttaacagagaagaacatcaagatgctttccagttatacagataatggaatagtggttgcaactgctgaagacttcatgcaaaactttaaaaatcttgtgggctatcacaattcaatcacagaagaaaaccttccacagcttggtgctaatgagaatcttgagtcgcagtcagctcttttagaaaacgatgaaaaggatgaagaggatatgtctctggattcaggggatgaaatctcacatatagaagtatgcagcaattttcattcagaaatatgggagaaagagaccaaaggatcacgtggaacagatcaaaaaaagaatactcaaattgagttgcaatcgtctcctgatgtgcaaaacagtttattagaagataagacttaccttgattctgaagagagaacttctattgatatagtatgctctgaaggagagaacagcaattcaacagaacaagattcatatagtaactttcaggtttatcatagtcaattaaatatgtcccatcagtttagtcattttaatgttctcactcatcagacatttttggggacaccatatgccctttcatcaagtcagtctcaagaaaatgagaattacttcttatctgcttatactgaaagcttggatagagataaatctccacctcccttaagttgggggaaaagtgattcttccaggccatattcacaagagaaataactgtagtaactttttttttaagagattgttgtggactttgtttattaacaatttatatttcattctctaaacaaaaggttcttgttctttctcaaatgttttttcttttatttaaatcatgatggcctgtaacagttgaagcatctaaaaattgaaataaatatatatttttaacatatattgtacttgaattatctcatgttggcacttctaagttttactttttgtatgttacctgtacttaggcttcaaattgaagcctgttttatgtgtaaaatcagatgcttgcaggaggacggtaaacagcaaaggctttacttctttttctctaatgtcacctgatataaagtacttttgttgaagtgaattattttgatgtaggcttttgtatactgtgtttacacaggtataagtcagtaatagcagtgttaatatttacaggattttggctcgatacctcaagatttatctaacagtgcagtttcatttagataataaactatgtacataggacacattttttatctctaggcttagtcatgtaaaaactgcctattgctaaaattctggtaactttttgagagtattggataattttcagtacctgcgcaatccttgatttaatgaaattaaattttttatttcaaaagataggcttctgtttatcaaaggcgttgaacaatttgatttttaaattagttttagcaaaatggaagtataatgggaatatatttttgaggtggtcttagtagtaattaccatttgttgaacacattaatgctatactagacagatacagtggagatagctttcaaacccgtatctattcctaactactgcctctaatactaattactaacttgttactaatgctaacttttaaaaatgtttttgaaaattgcaatttctacaaataaatgtcatagtgcaaataaatgtcaggatttagagaaggagcctaaactgaatttgtgttatttcagtaaaagttatggagttatgggtctagacgtgttaataagttagacagaactttggcactttagaacaaatgcatgagtggtatttcagttcctaagttacataaaaagtgtgaaagaacactgtgaggtcccagcaacgccagactatattaaggtaagtagaaagtgtttttatagggcttcaatacccaggtggtgacagagcagaagaaccggtttttttttttttttttttactactaagcttttacaaaagaagtatctgttttattgtatagaacaagtacagcattttactacatagtatacaagtttttaatgagcatttaaaaaaataagtaaatctaggctatttgaaaaatacagttgagccagtgagcacattttataatttggaagacacaaatcaaatgtgaaggatttgattttctacatttaaaatgaagaaccaaaactctcttcttgattttcagctaaaggcaggagactactttccaactccttttgcttctggagaaggccctgaaatcacattgatatatgtttgttagtaaaatgtgcacacctgacttgcaatgttgtgttaaactagaattatattcacttggaaaacatatcgcttaggataaaattttgtcattcaaaaattttttcagaaatgcttgtactagaccacctcatttggatatatagctatcacatttgtaagattctgtttttagcataaaaatcaatagggatgaaaattttcttagaactcaagactccataactatgggggtaaatgaagtcatcccttctcccccagtccacccccaagtgctcttagatactgaaggagtctcccttaacatacagtgttttttttttgttgttgtttttttgtttttttttggagatggagtctcgctctgtcgcccaagctggagtacagtggtgcaatctcactgcaagctctgcctcccaggttcacaccattctcctgcctcaacctcccgaatggctgggactacaggcacccaccaccacgcctggctaactaactaactaactttttgtatttttagtagagacagggtttcactgtgttagccaggatggtcttgatctcctgacctcatgatctgcctgcctcagcctcccaaagtgctgggattacaggcttgagccactgctcctggccaacatccagtattttatcttgactgtcctaaccttaccttagatgctaacagaagggtcctgctgaaataacactgggtgctatattgatgggtaaatgtgtacatcctattccttcctctttatctcacaatttttgtctccactaagcaagaagtaaactaacacttcgtcactctaaagaaataacttatgtaaaactcttagtaaccctgtttgtcttcaaatgagtaaatagaccaaagtggggggacaattttctagttctgtagagggaaaaacatctgagtcaacattttgaaatgcagagggtattggtacatgacgacatggaaaagggcacttttaaacacagcttactcttcctcaagtacagagagtatatagtgaatcaaaactaactacagccattctttttaaagcccaagggatggagcaaaggtgtaaggatgttacctgtttgttttaatcagagagcaaaaagaagtcacaatagtttgggagaaaaagtagtatggtgagtaaggttatgcgtataatttcatactgaatttattactatttgggatgtacgtcaatgttctaacaaacactgccaacacgtcaattttttaaaaagcgtgggccacattgctaagaatttgttaaagcataactgtattttttgttttagggccttattgatgttttgccgttccaatgtatgcatttttttactcaataaacttgtcttaattttaaaaaagtc

SEQ ID NO: 277993 - DNA, 7108 bp, Homo sapiens
agatccccaggaagagcagagaaaagaaagcacttttccagccattaactccaggctctcgagaatttgaagatgttgtaaatattctccattcttcttaccttgaaccaacctcagtaacaaattttaactacagacgtgcttgcttggtacacaatgagcttttggaaaaggagtttacagaaaagcgaagagaactgaagtttgatggtcgtttagataaggaactttcagaatcctatgcatttctgatggttgatcgataccaggttcaaaccatatgtgaaaaaggattacatgtgggtcagtccaaaataacaattcttggcagtccttccatggacctgagaaattagatgttgaaacagttatgagtattgatcatctgaaacagaaaatccctccagcactgttttataaggaaacatacttaggtccaaatgaagttttgaagaatggaatgtattgcagcctttatgaagttgtggaaaagacaagaattggaagtaacatggagagtttactgcaaaaactagacagagaaaaacttgttcttgttaaacctttgggagaccgaggatacctttttcttctctccccttatcagatggttcctccatatgaatatcagactgccaagtctcgagtcctacatgctttgtttctatttcaagaacctagaagcatagttacttcacaaaaaggttcaaccaatgcagcaccacaggagaggcatgagagcatgccagatgtattaaaaatagctcagtttttacaattttctttgattcagtgtcgaaaggaattcaaaaatataagcgccataaattttcattctgttgttgaaaagtatgtaagtgaattttttaagcgaggttttggttcaggtaaacgagagtttattatgtttccatatgattcacgattagatgataaaaaattcttatactcagctcccagaaataaatcccatattgatacttgtttgcatgcctatatttttcggcctgaagtgtatcagttacctatttgtaaattaaaagaactatttgaagaaaatagaaaacttcagcagtttagtccactttcagattatgaaggtcaagaagaagaaatgaatggtacaaaaatgaaatttggaaaacgaaataactcaagaggtgaagccattatatctggaaagcaaagatcatctcattctttggattatgataaggatagagtcaaagaattgattaatttaattcagtgtaggaaaaagagtgtgggtggggactcagacacagaagatatgagaagcaaaactgtcttgaagaggaagcttgaggatctacctgaaaatatgagaaagctcgccaaaaccagtaatttatctgaaaattgccatctgtatgaagagtctccacagcctattggctcacttggacatgatgctgacttgaggcggcagcagcaggatacctgtaactccggcattgctgacatccataggctgtttaattggttatcagaaacactagcaaatgcgcgccattctgatgcatctctgacagacacagtcaacaaagccttaggattgagcactgatgatgcctatgaagagctgaggcaaaaacatgagtatgagttgaactctaccccagataagaaagactatgagcagcctacttgtgcaaaagttgaaaatgcacagtttaagggtactcagagcttattactagaagttgatgcaacatctaagtattctgttgctatttctaccagcgaagtgggcactgaccataagctacatttgaaagaagatccaaatttaattagcgtgaataattttgaagattgcagtttgtgtcccagtgttcccattgaacatggatttcgtagacaacagtctaagtcaaataatgttgaagagactgaaatacattggaaactgattccaattacaggagggaatgcaagaagcccagaagaccagctggggaaacatggtgagaaacaaacaccaggtatgaaatcaccagaagaacaactggtgtgtgtgccaccacaggaggcctttcctaacgacccccgggtaataaatagacagagaagttctgattaccagtttccatcctctccatttacagacacactaaagggcaccactgaggatgacgtgttgacaggtcaggtggaggagcagtgtgtgccagcagcagaggcagagccgcctgcagtgagcgaaaccacagagaggacagtgttaggagagtacaatctcttttctaggaagatagaagagattttgaagcaaaagaatgtttcatatgtcagtagagtttccacacctatcttttcaacacaagagaagatgaaacggctttccgagttcatatattctaagacttccaaagctggtgtgcaggagtttgtagatggtttgcatgagaagctaaatactattattattaaagcatcagccaagggtgggaatttgccaccagtcagtcctaacgattctggtgctaagatagcatcgaatcctctggaaaggcatgtcataccagtttcctcaagtgacttcaacaataaacatctccttgagccactgtgtagtgatcctttgaaagataccaactctgatgagcagcattccacttcggctttaactgaagtagaaatgaaccagcctcaacatgccacagagttaatggtgacttctgatcatattgtacctggtgatatggcccgggaaccagtagaagaaacaacaaaatcccccagtgatgtaaacatttctgctcaaccagctctttcaaattttataagccagttagaacctgaagtatttaatagtttggttaaaatcatgaaagacgtccagaaaaatactgtgaaattttatattcatgaagaagaagagagtgtgctctgtaaagaaataaaggaatatcttatcaaattaggcaatacagaatgtcatcctgaacagtttttggaaagaagatcaaaattagataaactattgattattattcaaaatgaagacattgcaggtttcattcacaagatacctggcttggtgactttaaagaagctcccctgtgttagttttgctggtgttgatagcctggatgatgttaaaaatcatacatacaatgaattatttgtatctggaggttttatcgtatctgatgaatcaattctaaacccagaggttgtcacagttgagaaccttaaaaattttttgacattccttgaggaacttagtactccagaaggaaaatggcaatggaaagtccactgtaaatttcagaagaaactaaaggaactaggcagattgaatgctaaagctctaagtctgttgacgcttctgaatgtctatcagaagaaacatctggttgaaattttgtcataccacaattgtgattcacaaactcgaaatgctccagaattggattgccttatcagacttcaggctcagaacatacagcaacgacacatagtctttttaacagagaagaacatcaagatgctttccagttatacagataatggaatagtggttgcaactgctgaagacttcatgcaaaactttaaaaatcttgtgggctatcacaattcaatcacagaagaaaaccttccacagcttggtgctaatgagaatcttgagtcgcagtcagctcttttagaaaacgatgaaaaggatgaagaggatatgtctctggattcaggggatgaaatctcacatatagaagtatgcagcaattttcattcagaaatatgggagaaagagaccaaaggatcacgtggaacagatcaaaaaaagaatactcaaattgagttgcaatcgtctcctgatgtgcaaaacagtttattagaagataagacttaccttgattctgaagagagaacttctattgatatagtatgctctgaaggagagaacagcaattcaacagaacaagattcatatagtaactttcaggtttatcatagtcaattaaatatgtcccatcagtttagtcattttaatgttctcactcatcagacatttttggggacaccatatgccctttcatcaagtcagtctcaagaaaatgagaattacttcttatctgcttatactgaaagcttggatagagataaatctccacctcccttaagttgggggaaaagtgattcttccaggccatattcacaagagaaataactgtagtaactttttttttaagagattgttgtggactttgtttattaacaatttatatttcattctctaaacaaaaggttcttgttctttctcaaatgttttttcttttatttaaatcatgatggcctgtaacagttgaagcatctaaaaattgaaataaatatatatttttaacatatattgtacttgaattatctcatgttggcacttctaagttttactttttgtatgttacctgtacttaggcttcaaattgaagcctgttttatgtgtaaaatcagatgcttgcaggaggacggtaaacagcaaaggctttacttctttttctctaatgtcacctgatataaagtacttttgttgaagtgaattattttgatgtaggcttttgtatactgtgtttacacaggtataagtcagtaatagcagtgttaatatttacaggattttggctcgatacctcaagatttatctaacagtgcagtttcatttagataataaactatgtacataggacacattttttatctctaggcttagtcatgtaaaaactgcctattgctaaaattctggtaactttttgagagtattggataattttcagtacctgcgcaatccttgatttaatgaaattaaattttttatttcaaaagataggcttctgtttatcaaaggcgttgaacaatttgatttttaaattagttttagcaaaatggaagtataatgggaatatatttttgaggtggtcttagtagtaattaccatttgttgaacacattaatgctatactagacagatacagtggagatagctttcaaacccgtatctattcctaactactgcctctaatactaattactaacttgttactaatgctaacttttaaaaatgtttttgaaaattgcaatttctacaaataaatgtcatagtgcaaataaatgtcaggatttagagaaggagcctaaactgaatttgtgttatttcagtaaaagttatggagttatgggtctagacgtgttaataagttagacagaactttggcactttagaacaaatgcatgagtggtatttcagttcctaagttacataaaaagtgtgaaagaacactgtgaggtcccagcaacgccagactatattaaggtaagtagaaagtgtttttatagggcttcaatacccaggtggtgacagagcagaagaaccggtttttttttttttttttttactactaagcttttacaaaagaagtatctgttttattgtatagaacaagtacagcattttactacatagtatacaagtttttaatgagcatttaaaaaaataagtaaatctaggctatttgaaaaatacagttgagccagtgagcacattttataatttggaagacacaaatcaaatgtgaaggatttgattttctacatttaaaatgaagaaccaaaactctcttcttgattttcagctaaaggcaggagactactttccaactccttttgcttctggagaaggccctgaaatcacattgatatatgtttgttagtaaaatgtgcacacctgacttgcaatgttgtgttaaactagaattatattcacttggaaaacatatcgcttaggataaaattttgtcattcaaaaattttttcagaaatgcttgtactagaccacctcatttggatatatagctatcacatttgtaagattctgtttttagcataaaaatcaatagggatgaaaattttcttagaactcaagactccataactatgggggtaaatgaagtcatcccttctcccccagtccacccccaagtgctcttagatactgaaggagtctcccttaacatacagtgttttttttttgttgttgtttttttgtttttttttggagatggagtctcgctctgtcgcccaagctggagtacagtggtgcaatctcactgcaagctctgcctcccaggttcacaccattctcctgcctcaacctcccgaatggctgggactacaggcacccaccaccacgcctggctaactaactaactaactttttgtatttttagtagagacagggtttcactgtgttagccaggatggtcttgatctcctgacctcatgatctgcctgcctcagcctcccaaagtgctgggattacaggcttgagccactgctcctggccaacatccagtattttatcttgactgtcctaaccttaccttagatgctaacagaagggtcctgctgaaataacactgggtgctatattgatgggtaaatgtgtacatcctattccttcctctttatctcacaatttttgtctccactaagcaagaagtaaactaacacttcgtcactctaaagaaataacttatgtaaaactcttagtaaccctgtttgtcttcaaatgagtaaatagaccaaagtggggggacaattttctagttctgtagagggaaaaacatctgagtcaacattttgaaatgcagagggtattggtacatgacgacatggaaaagggcacttttaaacacagcttactcttcctcaagtacagagagtatatagtgaatcaaaactaactacagccattctttttaaagcccaagggatggagcaaaggtgtaaggatgttacctgtttgttttaatcagagagcaaaaagaagtcacaatagtttgggagaaaaagtagtatggtgagtaaggttatgcgtataatttcatactgaatttattactatttgggatgtacgtcaatgttctaacaaacactgccaacacgtcaattttttaaaaagcgtgggccacattgctaagaatttgttaaagcataactgtattttttgttttagggccttattgatgttttgccgttccaatgtatgcatttttttactcaataaacttgtcttaattttaaaaaagtc

SEQ ID NO: 277994 - DNA, 5216 bp, Homo sapiens
cggctccgaggaccgggcagcgcatttggggtgcccgctacagggccccccaagaggctgccaggtcgggagcgcagcctgaggccacggggggaagggggtgggtgggctgagagcagctcggcggcgagactggcccgccgccccttccccccacacccgtcgaccttgtgggcagaagcttcccagagctccttaggccggcgcgatggcgactgctgtggagacggaggcctgtcagccgacggatgcgagttgggaaagtggcggcggcggagacgacgagatgaagcaggcgcttccggagcttgagtcctcccaacaaaatggcggcggcggcggcctcaacatcgctgagcccagcggcggcgctgggcgtgaggagaacgcgggggccgaggccgcccagagcctcagccacgagcagcctcaggactcctctgaggcgggcgcggccgccctgcccagaggccccgaagagcccgaaaggcctgttaggaggagttttcagatccccaggaagagcagagaaaagaaagcacttttccagccattaactccaggctctcgagaatttgaagatgttgtaaatattctccattcttcttaccttgaaccaacctcagtaacaaattttaactacagacgtgcttgcttggtacacaatgagcttttggaaaaggagtttacagaaaagcgaagagaactgaagtttgatggtcgtttagataaggaactttcagaatcctatgcatttctgatggttgatcgataccaggttcaaaccatatgtgaaaaaggattacatgtgggtcagtccaaaataacaattcttggcagtccttccatgggtgtctatctttctaggtatgctgatttattacaagcgaatcctttggacacgggggcaatgggtgatgttgttatttttaaaataatgaagggtaaaataaagagtatatatgaccccatgggtgtaaaaagtttggaatctatgttaaataagagtgctttggaccccacaccaaagcatgaatgtcacgtgtcaaagaatgccaatcgaattacatcacttttggcttacagagcctatgagcttactcagtattatttttatgagtatggctttgatgagctaaggcgaagaccaagacacgtttgtccatatgcagttgtgtcttttacttacaaagatgatatacaaactccgaagtttgtaccttcatcaagatctaacagctttaatacagatagaaacatagataaatataactataccttgtggaaaggacagcttttaaataaaggaaaacttttgtgttatatttctctgaggtcagccactcgtgcttttttgcctatcaaactacctgagaaattagatgttgaaacagttatgagtattgatcatctgaaacagaaaatccctccagcactgttttataaggaaacatacttaggtccaaatgaagttttgaagaatggaatgtattgcagcctttatgaagttgtggaaaagacaagaattggaagtaacatggagagtttactgcaaaaactagacagagaaaaacttgttcttgttaaacctttgggagaccgaggatacctttttcttctctccccttatcagatggttcctccatatgaatatcagactgccaagtctcgagtcctacatgctttgtttctatttcaagaacctagaagcatagttacttcacaaaaaggttcaaccaatgcagcaccacaggagaggcatgagagcatgccagatgtattaaaaatagctcagtttttacaattttctttgattcagtgtcgaaaggaattcaaaaatataagcgccataaattttcattctgttgttgaaaagtatgtaagtgaattttttaagcgaggttttggttcaggtaaacgagagtttattatgtttccatatgattcacgattagatgataaaaaattcttatactcagctcccagaaataaatcccatattgatacttgtttgcatgcctatatttttcggcctgaagtgtatcagttacctatttgtaaattaaaagaactatttgaagaaaatagaaaacttcagcagtttagtccactttcagattatgaaggtcaagaagaagaaatgaatggtacaaaaatgaaatttggaaaacgaaataactcaagaggtgaagccattatatctggaaagcaaagatcatctcattctttggattatgataaggatagagtcaaagaattgattaatttaattcagtgtaggaaaaagagtgtgggtggggactcagacacagaagatatgagaagcaaaactgtcttgaagaggaagcttgaggatctacctgaaaatatgagaaagctcgccaaaaccagtaatttatctgaaaattgccatctgtatgaagagtctccacagcctattggctcacttggacatgatgctgacttgaggcggcagcagcaggatacctgtaactccggcattgctgacatccataggctgtttaattggttatcagaaacactagcaaatgcgcgccattctgatgcatctctgacagacacagtcaacaaagccttaggattgagcactgatgatgcctatgaagagctgaggcaaaaacatgagtatgagttgaactctaccccagataagaaagactatgagcagcctacttgtgcaaaagttgaaaatgcacagtttaagggtactcagagcttattactagaagttgatgcaacatctaagtattctgttgctatttctaccagcgaagtgggcactgaccataagctacatttgaaagaagatccaaatttaattagcgtgaataattttgaagattgcagtttgtgtcccagtgttcccattgaacatggatttcgtagacaacagtctaagtcaaataatgttgaagagactgaaatacattggaaactgattccaattacagacacactaaagggcaccactgaggatgacgtgttgacaggtcaggtggaggagcagtgtgtgccagcagcagaggcagagccgcctgcagtgagcgaaaccacagagaggacagtgttaggagagtacaatctcttttctaggaagatagaagagattttgaagcaaaagaatgtttcatatgtcagtagagtttccacacctatcttttcaacacaagagaagatgaaacggctttccgagttcatatattctaagacttccaaagctggtgtgcaggagtttgtagatggtttgcatgagaagctaaatactattattattaaagcatcagccaagggtgggaatttgccaccagtcagtcctaacgattctggtgctaagatagcatcgaatcctctggaaaggcatgtcataccagtttcctcaagtgacttcaacaataaacatctccttgagccactgtgtagtgatcctttgaaagataccaactctgatgagcagcattccacttcggctttaactgaagtagaaatgaaccagcctcaacatgccacagagttaatggtgacttctgatcatattgtacctggtgatatggcccgggaaccagtagaagaaacaacaaaatcccccagtgatgtaaacatttctgctcaaccagctctttcaaattttataagccagttagaacctgaagtatttaatagtttggttaaaatcatgaaagacgtccagaaaaatactgtgaaattttatattcatgaagaagaagagagtgtgctctgtaaagaaataaaggaatatcttatcaaattaggcaatacagaatgtcatcctgaacagtttttggaaagaagatcaaaattagataaactattgattattattcaaaatgaagacattgcaggtttcattcacaagatacctggcttggtgactttaaagaagctcccctgtgttagttttgctggtgttgatagcctggatgatgttaaaaatcatacatacaatgaattatttgtatctggaggttttatcgtatctgatgaatcaattctaaacccagaggttgtcacagttgagaaccttaaaaattttttgacattccttgaggaacttagtactccagaaggaaaatggcaatggaaagtccactgtaaatttcagaagaaactaaaggaactaggcagattgaatgctaaagctctaagtctgttgacgcttctgaatgtctatcagaagaaacatctggttgaaattttgtcataccacaattgtgattcacaaactcgaaatgctccagaattggattgccttatcagacttcaggctcagaacatacagcaacgacacatagtctttttaacagagaagaacatcaagatgctttccagttatacagataatggaatagtggttgcaactgctgaagacttcatgcaaaactttaaaaatcttgtgggctatcacaattcaatcacagaagaaaaccttccacagcttggtgctaatgagaatcttgagtcgcagtcagctcttttagaaaacgatgaaaaggatgaagaggatatgtctctggattcaggggatgaaatctcacatatagaagtatgcagcaattttcattcagaaatatgggagaaagagaccaaaggatcacgtggaacagatcaaaaaaagaatactcaaattgagttgcaatcgtctcctgatgtgcaaaacagtttattagaagataagacttaccttgattctgaagagagaacttctattgatatagtatgctctgaaggagagaacagcaattcaacagaacaagattcatatagtaactttcaggtttatcatagtcaattaaatatgtcccatcagtttagtcattttaatgttctcactcatcagacatttttggggacaccatatgccctttcatcaagtcagtctcaagaaaatgagaattacttcttatctgcttatactgaaagcttggatagagataaatctccacctcccttaagttgggggaaaagtgattcttccaggccatattcacaagagaaataactgtagtaactttttttttaagagattgttgtggactttgtttattaacaatttatatttcattctctaaacaaaaggttcttgttctttctcaaatgttttttcttttatttaaatcatgatggcctgtaacagttgaagcatctaaaaattgaaataaatatatatttttaacata

SEQ ID NO: 277995 - DNA, 3567 bp, Homo sapiens
taaaggatcccccgtgtcacggatgtgaccctgacgcgttatattgtgtgagtagtgtataattttaaaacttaaacaaactgtgtatttcaatagaggaggactttttgttttttaaatgtagctcttttagaaaacgatgaaaaggatgaagaggatatgtctctggattcaggggatgaaatctcacatatagaagtatgcagcaattttcattcagaaatatgggagaaagagaccaaaggatcacgtggaacagatcaaaaaaagaatactcaaattgagttgcaatcgtctcctgatgtgcaaaacagtttattagaagataagacttaccttgattctgaagagagaacttctattgatatagtatgctctgaaggagagaacagcaattcaacagaacaagattcatatagtaactttcaggtttatcatagtcaattaaatatgtcccatcagtttagtcattttaatgttctcactcatcagacatttttggggacaccatatgccctttcatcaagtcagtctcaagaaaatgagaattacttcttatctgcttatactgaaagcttggatagagataaatctccacctcccttaagttgggggaaaagtgattcttccaggccatattcacaagagaaataactgtagtaactttttttttaagagattgttgtggactttgtttattaacaatttatatttcattctctaaacaaaaggttcttgttctttctcaaatgttttttcttttatttaaatcatgatggcctgtaacagttgaagcatctaaaaattgaaataaatatatatttttaacatatattgtacttgaattatctcatgttggcacttctaagttttactttttgtatgttacctgtacttaggcttcaaattgaagcctgttttatgtgtaaaatcagatgcttgcaggaggacggtaaacagcaaaggctttacttctttttctctaatgtcacctgatataaagtacttttgttgaagtgaattattttgatgtaggcttttgtatactgtgtttacacaggtataagtcagtaatagcagtgttaatatttacaggattttggctcgatacctcaagatttatctaacagtgcagtttcatttagataataaactatgtacataggacacattttttatctctaggcttagtcatgtaaaaactgcctattgctaaaattctggtaactttttgagagtattggataattttcagtacctgcgcaatccttgatttaatgaaattaaattttttatttcaaaagataggcttctgtttatcaaaggcgttgaacaatttgatttttaaattagttttagcaaaatggaagtataatgggaatatatttttgaggtggtcttagtagtaattaccatttgttgaacacattaatgctatactagacagatacagtggagatagctttcaaacccgtatctattcctaactactgcctctaatactaattactaacttgttactaatgctaacttttaaaaatgtttttgaaaattgcaatttctacaaataaatgtcatagtgcaaataaatgtcaggatttagagaaggagcctaaactgaatttgtgttatttcagtaaaagttatggagttatgggtctagacgtgttaataagttagacagaactttggcactttagaacaaatgcatgagtggtatttcagttcctaagttacataaaaagtgtgaaagaacactgtgaggtcccagcaacgccagactatattaaggtaagtagaaagtgtttttatagggcttcaatacccaggtggtgacagagcagaagaaccggtttttttttttttttttttactactaagcttttacaaaagaagtatctgttttattgtatagaacaagtacagcattttactacatagtatacaagtttttaatgagcatttaaaaaaataagtaaatctaggctatttgaaaaatacagttgagccagtgagcacattttataatttggaagacacaaatcaaatgtgaaggatttgattttctacatttaaaatgaagaaccaaaactctcttcttgattttcagctaaaggcaggagactactttccaactccttttgcttctggagaaggccctgaaatcacattgatatatgtttgttagtaaaatgtgcacacctgacttgcaatgttgtgttaaactagaattatattcacttggaaaacatatcgcttaggataaaattttgtcattcaaaaattttttcagaaatgcttgtactagaccacctcatttggatatatagctatcacatttgtaagattctgtttttagcataaaaatcaatagggatgaaaattttcttagaactcaagactccataactatgggggtaaatgaagtcatcccttctcccccagtccacccccaagtgctcttagatactgaaggagtctcccttaacatacagtgttttttttttgttgttgtttttttgtttttttttggagatggagtctcgctctgtcgcccaagctggagtacagtggtgcaatctcactgcaagctctgcctcccaggttcacaccattctcctgcctcaacctcccgaatggctgggactacaggcacccaccaccacgcctggctaactaactaactaactttttgtatttttagtagagacagggtttcactgtgttagccaggatggtcttgatctcctgacctcatgatctgcctgcctcagcctcccaaagtgctgggattacaggcttgagccactgctcctggccaacatccagtattttatcttgactgtcctaaccttaccttagatgctaacagaagggtcctgctgaaataacactgggtgctatattgatgggtaaatgtgtacatcctattccttcctctttatctcacaatttttgtctccactaagcaagaagtaaactaacacttcgtcactctaaagaaataacttatgtaaaactcttagtaaccctgtttgtcttcaaatgagtaaatagaccaaagtggggggacaattttctagttctgtagagggaaaaacatctgagtcaacattttgaaatgcagagggtattggtacatgacgacatggaaaagggcacttttaaacacagcttactcttcctcaagtacagagagtatatagtgaatcaaaactaactacagccattctttttaaagcccaagggatggagcaaaggtgtaaggatgttacctgtttgttttaatcagagagcaaaaagaagtcacaatagtttgggagaaaaagtagtatggtgagtaaggttatgcgtataatttcatactgaatttattactatttgggatgtacgtcaatgttctaacaaacactgccaacacgtcaattttttaaaaagcgtgggccacattgctaagaatttgttaaagcataactgtattttttgttttagggccttattgatgttttgccgttccaatgtatgcatttttttactcaataaacttgtcttaattttaaaaaagtc

SEQ ID NO: 277996 - DNA, 3160 bp, Homo sapiens
gtttgtgtttgtttggttgtgtgggtggtgattgtgtttgtggttcttctgtgttgtgtggttgtgttgttgtgcagtgggctagacatttttggggacaccatatgccctttcatcaagtcagtctcaagaaaatgagaattacttcttatctgcttatactgaaagcttggatagagataaatctccacctcccttaagttgggggaaaagtgattcttccaggccatattcacaagagaaataactgtagtaactttttttttaagagattgttgtggactttgtttattaacaatttatatttcattctctaaacaaaaggttcttgttctttctcaaatgttttttcttttatttaaatcatgatggcctgtaacagttgaagcatctaaaaattgaaataaatatatatttttaacatatattgtacttgaattatctcatgttggcacttctaagttttactttttgtatgttacctgtacttaggcttcaaattgaagcctgttttatgtgtaaaatcagatgcttgcaggaggacggtaaacagcaaaggctttacttctttttctctaatgtcacctgatataaagtacttttgttgaagtgaattattttgatgtaggcttttgtatactgtgtttacacaggtataagtcagtaatagcagtgttaatatttacaggattttggctcgatacctcaagatttatctaacagtgcagtttcatttagataataaactatgtacataggacacattttttatctctaggcttagtcatgtaaaaactgcctattgctaaaattctggtaactttttgagagtattggataattttcagtacctgcgcaatccttgatttaatgaaattaaattttttatttcaaaagataggcttctgtttatcaaaggcgttgaacaatttgatttttaaattagttttagcaaaatggaagtataatgggaatatatttttgaggtggtcttagtagtaattaccatttgttgaacacattaatgctatactagacagatacagtggagatagctttcaaacccgtatctattcctaactactgcctctaatactaattactaacttgttactaatgctaacttttaaaaatgtttttgaaaattgcaatttctacaaataaatgtcatagtgcaaataaatgtcaggatttagagaaggagcctaaactgaatttgtgttatttcagtaaaagttatggagttatgggtctagacgtgttaataagttagacagaactttggcactttagaacaaatgcatgagtggtatttcagttcctaagttacataaaaagtgtgaaagaacactgtgaggtcccagcaacgccagactatattaaggtaagtagaaagtgtttttatagggcttcaatacccaggtggtgacagagcagaagaaccggtttttttttttttttttttactactaagcttttacaaaagaagtatctgttttattgtatagaacaagtacagcattttactacatagtatacaagtttttaatgagcatttaaaaaaataagtaaatctaggctatttgaaaaatacagttgagccagtgagcacattttataatttggaagacacaaatcaaatgtgaaggatttgattttctacatttaaaatgaagaaccaaaactctcttcttgattttcagctaaaggcaggagactactttccaactccttttgcttctggagaaggccctgaaatcacattgatatatgtttgttagtaaaatgtgcacacctgacttgcaatgttgtgttaaactagaattatattcacttggaaaacatatcgcttaggataaaattttgtcattcaaaaattttttcagaaatgcttgtactagaccacctcatttggatatatagctatcacatttgtaagattctgtttttagcataaaaatcaatagggatgaaaattttcttagaactcaagactccataactatgggggtaaatgaagtcatcccttctcccccagtccacccccaagtgctcttagatactgaaggagtctcccttaacatacagtgttttttttttgttgttgtttttttgtttttttttggagatggagtctcgctctgtcgcccaagctggagtacagtggtgcaatctcactgcaagctctgcctcccaggttcacaccattctcctgcctcaacctcccgaatggctgggactacaggcacccaccaccacgcctggctaactaactaactaactttttgtatttttagtagagacagggtttcactgtgttagccaggatggtcttgatctcctgacctcatgatctgcctgcctcagcctcccaaagtgctgggattacaggcttgagccactgctcctggccaacatccagtattttatcttgactgtcctaaccttaccttagatgctaacagaagggtcctgctgaaataacactgggtgctatattgatgggtaaatgtgtacatcctattccttcctctttatctcacaatttttgtctccactaagcaagaagtaaactaacacttcgtcactctaaagaaataacttatgtaaaactcttagtaaccctgtttgtcttcaaatgagtaaatagaccaaagtggggggacaattttctagttctgtagagggaaaaacatctgagtcaacattttgaaatgcagagggtattggtacatgacgacatggaaaagggcacttttaaacacagcttactcttcctcaagtacagagagtatatagtgaatcaaaactaactacagccattctttttaaagcccaagggatggagcaaaggtgtaaggatgttacctgtttgttttaatcagagagcaaaaagaagtcacaatagtttgggagaaaaagtagtatggtgagtaaggttatgcgtataatttcatactgaatttattactatttgggatgtacgtcaatgttctaacaaacactgccaacacgtcaattttttaaaaagcgtgggccacattgctaagaatttgttaaagcataactgtattttttgttttagggccttattgatgttttgccgttccaatgtatgcatttttttactcaataaacttgtcttaattttaaaaaagtc

SEQ ID NO: 277997 - DNA, 1284 bp, Homo sapiens
cggctccgaggaccgggcagcgcatttggggtgcccgctacagggccccccaagaggctgccaggtcgggagcgcagcctgaggccacggggggaagggggtgggtgggctgagagcagctcggcggcgagactggcccgccgccccttccccccacacccgtcgaccttgtgggcagaagcttcccagagctccttaggccggcgcgatggcgactgctgtggagacggaggcctgtcagccgacggatgcgagttgggaaagtggcggcggcggagacgacgagatgaagcaggcgcttccggagcttgagtcctcccaacaaaatggcggcggcggcggcctcaacatcgctgagcccagcggcggcgctgggcgtgaggagaacgcgggggccgaggccgcccagagcctcagccacgagcagcctcaggactcctctgaggcgggcgcggccgccctgcccagaggccccgaagagcccgaaaggcctgttaggaggagttttcagatccccaggaagagcagagaaaagaaagcacttttccagccattaactccaggctctcgagaatttgaagatgttgtaaatattctccattcttcttaccttgaaccaacctcagtaacaaattttaactacagacgtgcttgcttggtacacaatgagcttttggaaaaggagtttacagaaaagcgaagagaactgaagtttgatggtcgtttagataaggaactttcagaatcctatgcatttctgatggttgatcgataccaggttcaaaccatatgtgaaaaaggattacatgtgggtcagtccaaaataacaattcttggcagtccttccatgggtgtctatctttctaggtatgctgatttattacaagcgaatcctttggacacgggggcaatgggtgatgttgttatttttaaaataatgaagggtaaaataaagagtatatatgaccccatgggtgtaaaaagtttggaatctatgttaaataagagtgctttggaccccacaccaaagcatgaatgtcacgtgtcaaagaatgccaatcgaattacatcacttttggcttacagagcctatgagcttactcagtattatttttatgagtatggctttgatgagctaaggcgaagaccaagacacgtttgtccatatgcagttgtgtcttttacttacaaagatgatatacaaactccgaagtttgtaccttcatcaagaattaacagctttttttccgatagaaacattctttaattttacttttccctggg

SEQ ID NO: 277998 - DNA, 1154 bp, Homo sapiens
atcgagatcaaggtacgcaccatagaatccagtccacccccaagtgctcttagatactgaaggagtctcccttaacatacagtgttttttttttgttgttgtttttttgtttttttttggagatggagtctcgctctgtcgcccaagctggagtacagtggtgcaatctcactgcaagctctgcctcccaggttcacaccattctcctgcctcaacctcccgaatggctgggactacaggcacccaccaccacgcctggctaactaactaactaactttttgtatttttagtagagacagggtttcactgtgttagccaggatggtcttgatctcctgacctcatgatctgcctgcctcagcctcccaaagtgctgggattacaggcttgagccactgctcctggccaacatccagtattttatcttgactgtcctaaccttaccttagatgctaacagaagggtcctgctgaaataacactgggtgctatattgatgggtaaatgtgtacatcctattccttcctctttatctcacaatttttgtctccactaagcaagaagtaaactaacacttcgtcactctaaagaaataacttatgtaaaactcttagtaaccctgtttgtcttcaaatgagtaaatagaccaaagtggggggacaattttctagttctgtagagggaaaaacatctgagtcaacattttgaaatgcagagggtattggtacatgacgacatggaaaagggcacttttaaacacagcttactcttcctcaagtacagagagtatatagtgaatcaaaactaactacagccattctttttaaagcccaagggatggagcaaaggtgtaaggatgttacctgtttgttttaatcagagagcaaaaagaagtcacaatagtttgggagaaaaagtagtatggtgagtaaggttatgcgtataatttcatactgaatttattactatttgggatgtacgtcaatgttctaacaaacactgccaacacgtcaattttttaaaaagcgtgggccacattgctaagaatttgttaaagcataactgtattttttgttttagggccttattgatgttttgccgttccaatgtatgcatttttttactcaataaacttgtcttaattttaaaaaagtc

SEQ ID NO: 277999 - DNA, 1026 bp, Homo sapiens
cggctccgaggaccgggcagcgcatttggggtgcccgctacagggccccccaagaggctgccaggtcgggagcgcagcctgaggccacggggggaagggggtgggtgggctgagagcagctcggcggcgagactggcccgccgccccttccccccacacccgtcgaccttgtgggcagaagcttcccagagctccttaggccggcgcgatggcgactgctgtggagacggaggcctgtcagccgacggatgcgagttgggaaagtggcggcggcggagacgacgagatgaagcaggcgcttccggagcttgagtcctcccaacaaaatggcggcggcggcggcctcaacatcgctgagcccagcggcggcgctgggcgtgaggagaacgcgggggccgaggccgcccagagcctcagccacgagcagcctcaggactcctctgaggcgggcgcggccgccctgcccagaggccccgaagagcccgaaaggcctgttaggaggagttttcagatccccaggaagagcagagaaaagaaagcacttttccagccattaactccaggctctcgagaatttgaagatgttgtaaatattctccattcttcttaccttgaaccaacctcagtaacaaattttaactacagacgtgcttgcttggtacacaatgagcttttggaaaaggagtttacagaaaagcgaagagaactgaagtttgatggtcgtttagataaggaactttcagaatcctatgcatttctgatggttgatcgataccaggtgagttaacgcattttataaaaaacaatttggggatgtttccattgtaagttactaattttgtgattattcaacagtattctttacaattacagacttttttgatatataagtggaatacatgatttaatggggcaaaatgtttattgtttgtaatttgtttttcaaatgtactcagttttttctctgaccagtcctattttcttcccctagaatgtgcttgataataatacttttctgtttattta

SEQ ID NO: 278000 - DNA, 7539 bp, Homo sapiens
aatgactgttaatttctttgcctcctctttgattccatctcttgacctctatatcatttcaaaggagcattgagtgaacatccatccttgtaccttgaatattccatgaatgctcctgcttcagggcctctgcatttgctgttctctcactttccccagtaagctgcataattcattctacatttcttcacgtatttccttatgattgaggtttctctgtttttttttttacctctatactcttatgtctctttttatagcactgaaaaccatcatgatctgttatatatcattgttttctgtcttcctcattagatttatgtaggttggaactttgttctgtttatctctataatcctattacctagaactgtgcctggtaaataagagcttagtatgtatttactgaatgatgaattaatatatttatatattgaggctgtgtcttctaatgtcagcaaaataattgacaagagactttggtggacactgttctctcttggttaatatttttggaaaaaacaactcccttaaatttgggtaaatgtggtaatttgagcgaagtaagtacttctgttttctctaagtagacttggatttactagactttgtaatgagtaatttctttgttcttcctacctggaggaaggacttaactgtagtatgccattaaaaattgcacttatatcatcttacatgttaatttttatgattatactaatgagtaatgtttttcttttcttttaaaaaatttgtagatctaacagctttaatacagatagaaacatagataaatataactataccttgtggaaaggacagcttttaaataaaggaaaacttttgtgttatatttctctgaggtcagccactcgtgcttttttgcctatcaaactacctgagaaattagatgttgaaacagttatgagtattgatcatctgaaacagaaaatccctccagcactgttttataaggaaacatacttaggtccaaatgaagttttgaagaatggaatgtattgcagcctttatgaagttgtggaaaagacaagaattggaagtaacatggagagtttactgcaaaaactagacagagaaaaacttgttcttgttaaacctttgggagaccgaggatacctttttcttctctccccttatcagatggttcctccatatgaatatcagactgccaagtctcgagtcctacatgctttgtttctatttcaagaacctagaagcatagttacttcacaaaaaggttcaaccaatgcagcaccacaggagaggcatgagagcatgccagatgtattaaaaatagctcagtttttacaattttctttgattcagtgtcgaaaggaattcaaaaatataagcgccataaattttcattctgttgttgaaaagtatgtaagtgaattttttaagcgaggttttggttcaggtaaacgagagtttattatgtttccatatgattcacgattagatgataaaaaattcttatactcagctcccagaaataaatcccatattgatacttgtttgcatgcctatatttttcggcctgaagtgtatcagttacctatttgtaaattaaaagaactatttgaagaaaatagaaaacttcagcagtttagtccactttcagattatgaaggtcaagaagaagaaatgaatggtacaaaaatgaaatttggaaaacgaaataactcaagaggtgaagccattatatctggaaagcaaagatcatctcattctttggattatgataaggatagagtcaaagaattgattaatttaattcagtgtaggaaaaagagtgtgggtggggactcagacacagaagatatgagaagcaaaactgtcttgaagaggaagcttgaggatctacctgaaaatatgagaaagctcgccaaaaccagtaatttatctgaaaattgccatctgtatgaagagtctccacagcctattggctcacttggacatgatgctgacttgaggcggcagcagcaggatacctgtaactccggcattgctgacatccataggctgtttaattggttatcagaaacactagcaaatgcgcgccattctgatgcatctctgacagacacagtcaacaaagccttaggattgagcactgatgatgcctatgaagagctgaggcaaaaacatgagtatgagttgaactctaccccagataagaaagactatgagcagcctacttgtgcaaaagttgaaaatgcacagtttaagggtactcagagcttattactagaagttgatgcaacatctaagtattctgttgctatttctaccagcgaagtgggcactgaccataagctacatttgaaagaagatccaaatttaattagcgtgaataattttgaagattgcagtttgtgtcccagtgttcccattgaacatggatttcgtagacaacagtctaagtcaaataatgttgaagagactgaaatacattggaaactgattccaattacaggagggaatgcaagaagcccagaagaccagctggggaaacatggtgagaaacaaacaccagacacactaaagggcaccactgaggatgacgtgttgacaggtcaggtggaggagcagtgtgtgccagcagcagaggcagagccgcctgcagtgagcgaaaccacagagaggacagtgttaggagagtacaatctcttttctaggaagatagaagagattttgaagcaaaagaatgtttcatatgtcagtagagtttccacacctatcttttcaacacaagagaagatgaaacggctttccgagttcatatattctaagacttccaaagctggtgtgcaggagtttgtagatggtttgcatgagaagctaaatactattattattaaagcatcagccaagggtgggaatttgccaccagtcagtcctaacgattctggtgctaagatagcatcgaatcctctggaaaggcatgtcataccagtttcctcaagtgacttcaacaataaacatctccttgagccactgtgtagtgatcctttgaaagataccaactctgatgagcagcattccacttcggctttaactgaagtagaaatgaaccagcctcaacatgccacagagttaatggtgacttctgatcatattgtacctggtgatatggcccgggaaccagtagaagaaacaacaaaatcccccagtgatgtaaacatttctgctcaaccagctctttcaaattttataagccagttagaacctgaagtatttaatagtttggttaaaatcatgaaagacgtccagaaaaatactgtgaaattttatattcatgaagaagaagagagtgtgctctgtaaagaaataaaggaatatcttatcaaattaggcaatacagaatgtcatcctgaacagtttttggaaagaagatcaaaattagataaactattgattattattcaaaatgaagacattgcaggtttcattcacaagatacctggcttggtgactttaaagaagctcccctgtgttagttttgctggtgttgatagcctggatgatgttaaaaatcatacatacaatgaattatttgtatctggaggttttatcgtatctgatgaatcaattctaaacccagaggttgtcacagttgagaaccttaaaaattttttgacattccttgaggaacttagtactccagaaggaaaatggcaatggaaagtccactgtaaatttcagaagaaactaaaggaactaggcagattgaatgctaaagctctaagtctgttgacgcttctgaatgtctatcagaagaaacatctggttgaaattttgtcataccacaattgtgattcacaaactcgaaatgctccagaattggattgccttatcagacttcaggctcagaacatacagcaacgacacatagtctttttaacagagaagaacatcaagatgctttccagttatacagataatggaatagtggttgcaactgctgaagacttcatgcaaaactttaaaaatcttgtgggctatcacaattcaatcacagaagaaaaccttccacagcttggtgctaatgagaatcttgagtcgcagtcagctcttttagaaaacgatgaaaaggatgaagaggatatgtctctggattcaggggatgaaatctcacatatagaagtatgcagcaattttcattcagaaatatgggagaaagagaccaaaggatcacgtggaacagatcaaaaaaagaatactcaaattgagttgcaatcgtctcctgatgtgcaaaacagtttattagaagataagacttaccttgattctgaagagagaacttctattgatatagtatgctctgaaggagagaacagcaattcaacagaacaagattcatatagtaactttcaggtttatcatagtcaattaaatatgtcccatcagtttagtcattttaatgttctcactcatcagacatttttggggacaccatatgccctttcatcaagtcagtctcaagaaaatgagaattacttcttatctgcttatactgaaagcttggatagagataaatctccacctcccttaagttgggggaaaagtgattcttccaggccatattcacaagagaaataactgtagtaactttttttttaagagattgttgtggactttgtttattaacaatttatatttcattctctaaacaaaaggttcttgttctttctcaaatgttttttcttttatttaaatcatgatggcctgtaacagttgaagcatctaaaaattgaaataaatatatatttttaacatatattgtacttgaattatctcatgttggcacttctaagttttactttttgtatgttacctgtacttaggcttcaaattgaagcctgttttatgtgtaaaatcagatgcttgcaggaggacggtaaacagcaaaggctttacttctttttctctaatgtcacctgatataaagtacttttgttgaagtgaattattttgatgtaggcttttgtatactgtgtttacacaggtataagtcagtaatagcagtgttaatatttacaggattttggctcgatacctcaagatttatctaacagtgcagtttcatttagataataaactatgtacataggacacattttttatctctaggcttagtcatgtaaaaactgcctattgctaaaattctggtaactttttgagagtattggataattttcagtacctgcgcaatccttgatttaatgaaattaaattttttatttcaaaagataggcttctgtttatcaaaggcgttgaacaatttgatttttaaattagttttagcaaaatggaagtataatgggaatatatttttgaggtggtcttagtagtaattaccatttgttgaacacattaatgctatactagacagatacagtggagatagctttcaaacccgtatctattcctaactactgcctctaatactaattactaacttgttactaatgctaacttttaaaaatgtttttgaaaattgcaatttctacaaataaatgtcatagtgcaaataaatgtcaggatttagagaaggagcctaaactgaatttgtgttatttcagtaaaagttatggagttatgggtctagacgtgttaataagttagacagaactttggcactttagaacaaatgcatgagtggtatttcagttcctaagttacataaaaagtgtgaaagaacactgtgaggtcccagcaacgccagactatattaaggtaagtagaaagtgtttttatagggcttcaatacccaggtggtgacagagcagaagaaccggtttttttttttttttttttactactaagcttttacaaaagaagtatctgttttattgtatagaacaagtacagcattttactacatagtatacaagtttttaatgagcatttaaaaaaataagtaaatctaggctatttgaaaaatacagttgagccagtgagcacattttataatttggaagacacaaatcaaatgtgaaggatttgattttctacatttaaaatgaagaaccaaaactctcttcttgattttcagctaaaggcaggagactactttccaactccttttgcttctggagaaggccctgaaatcacattgatatatgtttgttagtaaaatgtgcacacctgacttgcaatgttgtgttaaactagaattatattcacttggaaaacatatcgcttaggataaaattttgtcattcaaaaattttttcagaaatgcttgtactagaccacctcatttggatatatagctatcacatttgtaagattctgtttttagcataaaaatcaatagggatgaaaattttcttagaactcaagactccataactatgggggtaaatgaagtcatcccttctcccccagtccacccccaagtgctcttagatactgaaggagtctcccttaacatacagtgttttttttttgttgttgtttttttgtttttttttggagatggagtctcgctctgtcgcccaagctggagtacagtggtgcaatctcactgcaagctctgcctcccaggttcacaccattctcctgcctcaacctcccgaatggctgggactacaggcacccaccaccacgcctggctaactaactaactaactttttgtatttttagtagagacagggtttcactgtgttagccaggatggtcttgatctcctgacctcatgatctgcctgcctcagcctcccaaagtgctgggattacaggcttgagccactgctcctggccaacatccagtattttatcttgactgtcctaaccttaccttagatgctaacagaagggtcctgctgaaataacactgggtgctatattgatgggtaaatgtgtacatcctattccttcctctttatctcacaatttttgtctccactaagcaagaagtaaactaacacttcgtcactctaaagaaataacttatgtaaaactcttagtaaccctgtttgtcttcaaatgagtaaatagaccaaagtggggggacaattttctagttctgtagagggaaaaacatctgagtcaacattttgaaatgcagagggtattggtacatgacgacatggaaaagggcacttttaaacacagcttactcttcctcaagtacagagagtatatagtgaatcaaaactaactacagccattctttttaaagcccaagggatggagcaaaggtgtaaggatgttacctgtttgttttaatcagagagcaaaaagaagtcacaatagtttgggagaaaaagtagtatggtgagtaaggttatgcgtataatttcatactgaatttattactatttgggatgtacgtcaatgttctaacaaacactgccaacacgtcaattttttaaaaagcgtgggccacattgctaagaatttgttaaagcataactgtattttttgttttagggccttattgatgttttgccgttccaatgtatgcatttttttactcaataaacttgtcttaattttaaaaaagtc

SEQ ID NO: 278001 - DNA, 7304 bp, Homo sapiens
aatgactgttaatttctttgcctcctctttgattccatctcttgacctctatatcatttcaaaggagcattgagtgaacatccatccttgtaccttgaatattccatgaatgctcctgcttcagggcctctgcatttgctgttctctcactttccccagtaagctgcataattcattctacatttcttcacgtatttccttatgattgaggtttctctgtttttttttttacctctatactcttatgtctctttttatagcactgaaaaccatcatgatctgttatatatcattgttttctgtcttcctcattagatttatgtaggttggaactttgttctgtttatctctataatcctattacctagaactgtgcctggtaaataagagcttagtatgtatttactgaatgatgaattaatatatttatatattgaggctgtgtcttctaatgtcagcaaaataattgacaagagactttggtggacactgttctctcttggttaatatttttggaaaaaacaactcccttaaatttgggtaaatgtggtaatttgagcgaagtaagtacttctgttttctctaagtagacttggatttactagactttgtaatgagtaatttctttgttcttcctacctggaggaaggacttaactgtagtatgccattaaaaattgcacttatatcatcttacatgttaatttttatgattatactaatgagtaatgtttttcttttcttttaaaaaatttgtagatctaacagctttaatacagatagaaacatagataaatataactataccttgtggaaaggacagcttttaaataaaggaaaacttttgtgttatatttctctgaggtcagccactcgtgcttttttgcctatcaaactacctgagaaattagatgttgaaacagttatgagtattgatcatctgaaacagaaaatccctccagcactgttttataaggaaacatacttaggtccaaatgaagttttgaagaatggaatgtattgcagcctttatgaagttgtggaaaagacaagaattggaagtaacatggagagtttactgcaaaaactagacagagaaaaacttgttcttgttaaacctttgggagaccgaggatacctttttcttctctccccttatcagatggttcctccatatgaatatcagactgccaagtctcgagtcctacatgctttgtttctatttcaagaacctagaagcatagttacttcacaaaaaggttcaaccaatgcagcaccacaggagaggcatgagagcatgccagatgtattaaaaatagctcagtttttacaattttctttgattcagtgtcgaaaggaattcaaaaatataagcgccataaattttcattctgttgttgaaaagtatgtaagtgaattttttaagcgaggttttggttcaggtaaacgagagtttattatgtttccatatgattcacgattagatgataaaaaattcttatactcagctcccagaaataaatcccatattgatacttgtttgcatgcctatatttttcggcctgaagtgtatcagttacctatttgtaaattaaaagaactatttgaagaaaatagaaaacttcagcagtttagtccactttcagattatgaaggtcaagaagaagaaatgaatggtacaaaaatgaaatttggaaaacgaaataactcaagaggtgaagccattatatctggaaagcaaagatcatctcattctttggattatgataaggatagagtcaaagaattgattaatttaattcagtgtaggaaaaagagtgtgggtggggactcagacacagaagatatgagaagcaaaactgtcttgaagaggaagcttgaggatctacctgaaaatatgagaaagctcgccaaaaccagtaatttatctgaaaattgccatctgtatgaagagtctccacagcctattggctcacttggacatgatgctgacttgaggcggcagcagcaggatacctgtaactccggcattgctgacatccataggctgtttaattggttatcagaaacactagcaaatgcgcgccattctgatgcatctctgacagacacagtcaacaaagccttaggattgagcactgatgatgcctatgaagagctgaggcaaaaacatgagtatgagttgaactctaccccagataagaaagactatgagcagcctacttgtgcaaaagttgaaaatgcacagtttaagggtactcagagcttattactagaagttgatgcaacatctaagtattctgttgctatttctaccagcgaagtgggcactgaccataagctacatttgaaagaagatccaaatttaattagcgtgaataattttgaagattgcagtttgtgtcccagtgttcccattgaacatggatttcgtagacaacagtctaagtcaaataatgttgaagagactgaaatacattggaaactgattccaattacaggagggaatgcaagaagcccagaagaccagctggggaaacatggtgagaaacaaacaccagacacactaaagggcaccactgaggatgacgtgttgacaggtcaggtggaggagcagtgtgtgccagcagcagaggcagagccgcctgcagtgagcgaaaccacagagaggacagtgttaggagagtacaatctcttttctaggaagatagaagagattttgaagcaaaagaatgtttcatatgtcagtagagtttccacacctatcttttcaacacaagagaagatgaaacggctttccgagttcatatattctaagacttccaaagctggtgtgcaggagtttgtagatggtttgcatgagaagctaaatactattattattaaagcatcagccaagggtgggaatttgccaccagtcagtcctaacgattctggtgctaagatagcatcgaatcctctggaaaggcatgtcataccagtttcctcaagtgacttcaacaataaacatctccttgagccactgtgtagtgatcctttgaaagataccaactctgatgagcagcattccacttcggctttaactgaagtagaaatgaaccagcctcaacatgccacagagttaatggtgacttctgatcatattgtacctggtgatatggcccgggaaccagtagaagaaacaacaaaatcccccagtgatgtaaacatttctgctcaaccagctctttcaaattttataagccagttagaacctgaagtatttaatagtttggttaaaatcatgaaagacgtccagaaaaatactgtgaaattttatattcatgaagaagaagagagtgtgctctgtaaagaaataaaggaatatcttatcaaattaggcaatacagaatgtcatcctgaacagtttttggaaagaagatcaaaattagataaactattgattattattcaaaatgaagacattgcaggtttcattcacaagatacctggcttggtgactttaaagaagctcccctgtgttagttttgctggtgttgatagcctggatgatgttaaaaatcatacatacaatgaattatttgtatctggaggttttatcgtatctgatgaatcaattctaaacccagaggttgtcacagttgagaaccttaaaaattttttgacattccttgaggaacttagtactccagaaggaaaatggcaatggaaagtccactgtaaatttcagaagaaactaaaggaactaggcagattgaatgctaaagctctaagtctgttgacgcttctgaatgtctatcagaagaaacatctggttgaaattttgtcataccacaattgtgattcacaaactcgaaatgctccagaattggattgccttatcagacttcaggctcagaacatacagcaacgacacatagtctttttaacagagaagaacatcaagatgctttccagttatacagataatggaatagtggttgcaactgctgaagacttcatgcaaaactttaaaaatcttgtgggctatcacaattcaatcacagaagaaaaccttccacagcttggtgctaatgagaatcttgagtcgcagtcagctcttttagaaaacgatgaaaaggatgaagaggatatgtctctggattcaggggatgaaatctcacatatagaagtatgcagcaattttcattcagaaatatgggagaaagagaccaaaggatcacgtggaacagatcaaaaaaagaatactcaaattgagttgcaatcgtctcctgatgtgcaaaacagtttattagaagataagacttaccttgattctgaagagagaacttctattgatatagtatgctctgaaggagagaacagcaattcaacagaacaagattcatatagtaactttcaggtttatcatagtcaattaaatatgtcccatcagtttagtcattttaatgttctcactcatcagacatttttggggacaccatatgccctttcatcaagtcagtctcaagaaaatgagaattacttcttatctgcttatactgaaagcttggatagagataaatctccacctcccttaagttgggggaaaagtgattcttccaggccatattcacaagagaaataactgtagtaactttttttttaagagattgttgtggactttgtttattaacaatttatatttcattctctaaacaaaaggttcttgttctttctcaaatgttttttcttttatttaaatcatgatggcctgtaacagttgaagcatctaaaaattgaaataaatatatatttttaacatatattgtacttgaattatctcatgttggcacttctaagttttactttttgtatgttacctgtacttaggcttcaaattgaagcctgttttatgtgtaaaatcagatgcttgcaggaggacggtaaacagcaaaggctttacttctttttctctaatgtcacctgatataaagtacttttgttgaagtgaattattttgatgtaggcttttgtatactgtgtttacacaggtataagtcagtaatagcagtgttaatatttacaggattttggctcgatacctcaagatttatctaacagtgcagtttcatttagataataaactatgtacataggacacattttttatctctaggcttagtcatgtaaaaactgcctattgctaaaattctggtaactttttgagagtattggataattttcagtacctgcgcaatccttgatttaatgaaattaaattttttatttcaaaagataggcttctgtttatcaaaggcgttgaacaatttgatttttaaattagttttagcaaaatggaagtataatgggaatatatttttgaggtggtcttagtagtaattaccatttgttgaacacattaatgctatactagacagatacagtggagatagctttcaaacccgtatctattcctaactactgcctctaatactaattactaacttgttactaatgctaacttttaaaaatgtttttgaaaattgcaatttctacaaataaatgtcatagtgcaaataaatgtcaggatttagagaaggagcctaaactgaatttgtgttatttcagtaaaagttatggagttatgggtctagacgtgttaataagttagacagaactttggcactttagaacaaatgcatgagtggtatttcagttcctaagttacataaaaagtgtgaaagaacactgtgaggtcccagcaacgccagactatattaaggtaagtagaaagtgtttttatagggcttcaatacccaggtggtgacagagcagaagaaccggtttttttttttttttttttactactaagcttttacaaaagaagtatctgttttattgtatagaacaagtacagcattttactacatagtatacaagtttttaatgagcatttaaaaaaataagtaaatctaggctatttgaaaaatacagttgagccagtgagcacattttataatttggaagacacaaatcaaatgtgaaggatttgattttctacatttaaaatgaagaaccaaaactctcttcttgattttcagctaaaggcaggagactactttccaactccttttgcttctggagaaggccctgaaatcacattgatatatgtttgttagtaaaatgtgcacacctgacttgcaatgttgtgttaaactagaattatattcacttggaaaacatatcgcttaggataaaattttgtcattcaaaaattttttcagaaatgcttgtactagaccacctcatttggatatatagctatcacatttgtaagattctgtttttagcataaaaatcaatagggatgaaaattttcttagaactcaagactccataactatgggggtaaatgaagtcatcccttctcccccagtccacccccaagtgctcttagatactgaaggagtctcccttaacatacagtgttttttttttgttgttgtttttttgtttttttttggagatggagtctcgctctgtcgcccaagctggagtacagtggtgcaatctcactgcaagctctgcctcccaggttcacaccattctcctgcctcaacctcccgaatggctgggactacaggcacccaccaccacgcctggctaactaactaactaactttttgtatttttagtagagacagggtttcactgtgttagccaggatggtcttgatctcctgacctcatgatctgcctgcctcagcctcccaaagtgctgggattacaggcttgagccactgctcctggccaacatccagtattttatcttgactgtcctaaccttaccttagatgctaacagaagggtcctgctgaaataacactgggtgctatattgatgggtaaatgtgtacatcctattccttcctctttatctcacaatttttgtctccactaagcaagaagtaaactaacacttcgtcactctaaagaaataacttatgtaaaactcttagtaaccctgtttgtcttcaaatgagtaaatagaccaaagtggggggacaattttctagttctgtagagggaaaaacatctgagtcaacattttgaaatgcagagggtattggtacatgacgacatggaaaagggcacttttaaacacagcttactcttcctcaagtacagagagtatatagtgaatcaaaactaactacagccattctttttaaagcccaagggatggagcaaaggtgtaaggatgttacctgtttgttttaatcagagagcaaagacagcaaccaaaagagcaaagaccccaaaag

SEQ ID NO: 278002 - DNA, 8411 bp, Homo sapiens
cggctccgaggaccgggcagcgcatttggggtgcccgctacagggccccccaagaggctgccaggtcgggagcgcagcctgaggccacggggggaagggggtgggtgggctgagagcagctcggcggcgagactggcccgccgccccttccccccacacccgtcgaccttgtgggcagaagcttcccagagctccttaggccggcgcgatggcgactgctgtggagacggaggcctgtcagccgacggatgcgagttgggaaagtggcggcggcggagacgacgagatgaagcaggcgcttccggagcttgagtcctcccaacaaaatggcggcggcggcggcctcaacatcgctgagcccagcggcggcgctgggcgtgaggagaacgcgggggccgaggccgcccagagcctcagccacgagcagcctcaggactcctctgaggcgggcgcggccgccctgcccagaggccccgaagagcccgaaaggcctgttaggaggagttttcagatccccaggaagagcagagaaaagaaagcacttttccagccattaactccaggctctcgagaatttgaagatgttgtaaatattctccattcttcttaccttgaaccaacctcagtaacaaattttaactacagacgtgcttgcttggtacacaatgagcttttggaaaaggagtttacagaaaagcgaagagaactgaagtttgatggtcgtttagataaggaactttcagaatcctatgcatttctgatggttgatcgataccaggttcaaaccatatgtgaaaaaggattacatgtgggtcagtccaaaataacaattcttggcagtccttccatgggtgtctatctttctaggtatgctgatttattacaagcgaatcctttggacacgggggcaatgggtgatgttgttatttttaaaataatgaagggtaaaataaagagtatatatgaccccatgggtgtaaaaagtttggaatctatgttaaataagagtgctttggaccccacaccaaagcatgaatgtcacgtgtcaaagaatgccaatcgaattacatcacttttggcttacagagcctatgagcttactcagtattatttttatgagtatggctttgatgagctaaggcgaagaccaagacacgtttgtccatatgcagttgtgtcttttacttacaaagatgatatacaaactccgaagtttgtaccttcatcaagatctaacagctttaatacagatagaaacatagataaatataactataccttgtggaaaggacagcttttaaataaaggaaaacttttgtgttatatttctctgaggtcagccactcgtgcttttttgcctatcaaactacctgagaaattagatgttgaaacagttatgagtattgatcatctgaaacagaaaatccctccagcactgttttataaggaaacatacttaggtccaaatgaagttttgaagaatggaatgtattgcagcctttatgaagttgtggaaaagacaagaattggaagtaacatggagagtttactgcaaaaactagacagagaaaaacttgttcttgttaaacctttgggagaccgaggatacctttttcttctctccccttatcagatggttcctccatatgaatatcagactgccaagtctcgagtcctacatgctttgtttctatttcaagaacctagaagcatagttacttcacaaaaaggttcaaccaatgcagcaccacaggagaggcatgagagcatgccagatgtattaaaaatagctcagtttttacaattttctttgattcagtgtcgaaaggaattcaaaaatataagcgccataaattttcattctgttgttgaaaagtatgtaagtgaattttttaagcgaggttttggttcaggtaaacgagagtttattatgtttccatatgattcacgattagatgataaaaaattcttatactcagctcccagaaataaatcccatattgatacttgtttgcatgcctatatttttcggcctgaagtgtatcagttacctatttgtaaattaaaagaactatttgaagaaaatagaaaacttcagcagtttagtccactttcagattatgaaggtcaagaagaagaaatgaatggtacaaaaatgaaatttggaaaacgaaataactcaagaggtgaagccattatatctggaaagcaaagatcatctcattctttggattatgataaggatagagtcaaagaattgattaatttaattcagtgtaggaaaaagagtgtgggtggggactcagacacagaagatatgagaagcaaaactgtcttgaagaggaagcttgaggatctacctgaaaatatgagaaagctcgccaaaaccagtaatttatctgaaaattgccatctgtatgaagagtctccacagcctattggctcacttggacatgatgctgacttgaggcggcagcagcaggatacctgtaactccggcattgctgacatccataggctgtttaattggttatcagaaacactagcaaatgcgcgccattctgatgcatctctgacagacacagtcaacaaagccttaggattgagcactgatgatgcctatgaagagctgaggcaaaaacatgagtatgagttgaactctaccccagataagaaagactatgagcagcctacttgtgcaaaagttgaaaatgcacagtttaagggtactcagagcttattactagaagttgatgcaacatctaagtattctgttgctatttctaccagcgaagtgggcactgaccataagctacatttgaaagaagatccaaatttaattagcgtgaataattttgaagattgcagtttgtgtcccagtgttcccattgaacatggatttcgtagacaacagtctaagtcaaataatgttgaagagactgaaatacattggaaactgattccaattacaggagggaatgcaagaagcccagaagaccagctggggaaacatggtgagaaacaaacaccaggtatgaaatcaccagaagaacaactggtgtgtgtgccaccacaggaggcctttcctaacgacccccgggtaataaatagacagagaagttctgattaccagtttccatcctctccatttacagacacactaaagggcaccactgaggatgacgtgttgacaggtcaggtggaggagcagtgtgtgccagcagcagaggcagagccgcctgcagtgagcgaaaccacagagaggacagtgttaggagagtacaatctcttttctaggaagatagaagagattttgaagcaaaagaatgtttcatatgtcagtagagtttccacacctatcttttcaacacaagagaagatgaaacggctttccgagttcatatattctaagacttccaaagctggtgtgcaggagtttgtagatggtttgcatgagaagctaaatactattattattaaagcatcagccaagggtgggaatttgccaccagtcagtcctaacgattctggtgctaagatagcatcgaatcctctggaaaggcatgtcataccagtttcctcaagtgacttcaacaataaacatctccttgagccactgtgtagtgatcctttgaaagataccaactctgatgagcagcattccacttcggctttaactgaagtagaaatgaaccagcctcaacatgccacagagttaatggtgacttctgatcatattgtacctggtgatatggcccgggaaccagtagaagaaacaacaaaatcccccagtgatgtaaacatttctgctcaaccagctctttcaaattttataagccagttagaacctgaagtatttaatagtttggttaaaatcatgaaagacgtccagaaaaatactgtgaaattttatattcatgaagaagaagagagtgtgctctgtaaagaaataaaggaatatcttatcaaattaggcaatacagaatgtcatcctgaacagtttttggaaagaagatcaaaattagataaactattgattattattcaaaatgaagacattgcaggtttcattcacaagatacctggcttggtgactttaaagaagctcccctgtgttagttttgctggtgttgatagcctggatgatgttaaaaatcatacatacaatgaattatttgtatctggaggttttatcgtatctgatgaatcaattctaaacccagaggttgtcacagttgagaaccttaaaaattttttgacattccttgaggaacttagtactccagaaggaaaatggcaatggaaagtccactgtaaatttcagaagaaactaaaggaactaggcagattgaatgctaaagctctaagtctgttgacgcttctgaatgtctatcagaagaaacatctggttgaaattttgtcataccacaattgtgattcacaaactcgaaatgctccagaattggattgccttatcagacttcaggctcagaacatacagcaacgacacatagtctttttaacagagaagaacatcaagatgctttccagttatacagataatggaatagtggttgcaactgctgaagacttcatgcaaaactttaaaaatcttgtgggctatcacaattcaatcacagaagaaaaccttccacagcttggtgctaatgagaatcttgagtcgcagtcagatgctgttttgacattaacccctttggagctgggagttgggatttcccaacattaaacgtgaacacatttcgcagaagcttttagcatcggattatctggacattcacatctagtgtgagtgttgtgactaagtgaacttgtggcagaagaccaagctttaagggattgtggacttgcagaccctgacgcgttatattgtgtgagtagtgtataattttaaaacttaaacaaactgtgtatttcaatagaggaggactttttgttttttaaatgtagctcttttagaaaacgatgaaaaggatgaagaggatatgtctctggattcaggggatgaaatctcacatatagaagtatgcagcaattttcattcagaaatatgggagaaagagaccaaaggatcacgtggaacagatcaaaaaaagaatactcaaattgagttgcaatcgtctcctgatgtgcaaaacagtttattagaagataagacttaccttgattctgaagagagaacttctattgatatagtatgctctgaaggagagaacagcaattcaacagaacaagattcatatagtaactttcaggtttatcatagtcaattaaatatgtcccatcagtttagtcattttaatgttctcactcatcagacatttttggggacaccatatgccctttcatcaagtcagtctcaagaaaatgagaattacttcttatctgcttatactgaaagcttggatagagataaatctccacctcccttaagttgggggaaaagtgattcttccaggccatattcacaagagaaataactgtagtaactttttttttaagagattgttgtggactttgtttattaacaatttatatttcattctctaaacaaaaggttcttgttctttctcaaatgttttttcttttatttaaatcatgatggcctgtaacagttgaagcatctaaaaattgaaataaatatatatttttaacatatattgtacttgaattatctcatgttggcacttctaagttttactttttgtatgttacctgtacttaggcttcaaattgaagcctgttttatgtgtaaaatcagatgcttgcaggaggacggtaaacagcaaaggctttacttctttttctctaatgtcacctgatataaagtacttttgttgaagtgaattattttgatgtaggcttttgtatactgtgtttacacaggtataagtcagtaatagcagtgttaatatttacaggattttggctcgatacctcaagatttatctaacagtgcagtttcatttagataataaactatgtacataggacacattttttatctctaggcttagtcatgtaaaaactgcctattgctaaaattctggtaactttttgagagtattggataattttcagtacctgcgcaatccttgatttaatgaaattaaattttttatttcaaaagataggcttctgtttatcaaaggcgttgaacaatttgatttttaaattagttttagcaaaatggaagtataatgggaatatatttttgaggtggtcttagtagtaattaccatttgttgaacacattaatgctatactagacagatacagtggagatagctttcaaacccgtatctattcctaactactgcctctaatactaattactaacttgttactaatgctaacttttaaaaatgtttttgaaaattgcaatttctacaaataaatgtcatagtgcaaataaatgtcaggatttagagaaggagcctaaactgaatttgtgttatttcagtaaaagttatggagttatgggtctagacgtgttaataagttagacagaactttggcactttagaacaaatgcatgagtggtatttcagttcctaagttacataaaaagtgtgaaagaacactgtgaggtcccagcaacgccagactatattaaggtaagtagaaagtgtttttatagggcttcaatacccaggtggtgacagagcagaagaaccggtttttttttttttttttttactactaagcttttacaaaagaagtatctgttttattgtatagaacaagtacagcattttactacatagtatacaagtttttaatgagcatttaaaaaaataagtaaatctaggctatttgaaaaatacagttgagccagtgagcacattttataatttggaagacacaaatcaaatgtgaaggatttgattttctacatttaaaatgaagaaccaaaactctcttcttgattttcagctaaaggcaggagactactttccaactccttttgcttctggagaaggccctgaaatcacattgatatatgtttgttagtaaaatgtgcacacctgacttgcaatgttgtgttaaactagaattatattcacttggaaaacatatcgcttaggataaaattttgtcattcaaaaattttttcagaaatgcttgtactagaccacctcatttggatatatagctatcacatttgtaagattctgtttttagcataaaaatcaatagggatgaaaattttcttagaactcaagactccataactatgggggtaaatgaagtcatcccttctcccccagtccacccccaagtgctcttagatactgaaggagtctcccttaacatacagtgttttttttttgttgttgtttttttgtttttttttggagatggagtctcgctctgtcgcccaagctggagtacagtggtgcaatctcactgcaagctctgcctcccaggttcacaccattctcctgcctcaacctcccgaatggctgggactacaggcacccaccaccacgcctggctaactaactaactaactttttgtatttttagtagagacagggtttcactgtgttagccaggatggtcttgatctcctgacctcatgatctgcctgcctcagcctcccaaagtgctgggattacaggcttgagccactgctcctggccaacatccagtattttatcttgactgtcctaaccttaccttagatgctaacagaagggtcctgctgaaataacactgggtgctatattgatgggtaaatgtgtacatcctattccttcctctttatctcacaatttttgtctccactaagcaagaagtaaactaacacttcgtcactctaaagaaataacttatgtaaaactcttagtaaccctgtttgtcttcaaatgagtaaatagaccaaagtggggggacaattttctagttctgtagagggaaaaacatctgagtcaacattttgaaatgcagagggtattggtacatgacgacatggaaaagggcacttttaaacacagcttactcttcctcaagtacagagagtatatagtgaatcaaaactaactacagccattctttttaaagcccaagggatggagcaaaggtgtaaggatgttacctgtttgttttaatcagagagcaaaaagaagtcacaatagtttgggagaaaaagtagtatggtgagtaaggttatgcgtataatttcatactgaatttattactatttgggatgtacgtcaatgttctaacaaacactgccaacacgtcaattttttaaaaagcgtgggccacattgctaagaatttgttaaagcataactgtattttttgttttagggccttattgatgttttgccgttccaatgtatgcatttttttactcaataaacttgtcttaattttaaaaaagtc

SEQ ID NO: 278003 - DNA, 5083 bp, Homo sapiens
cggctccgaggaccgggcagcgcatttggggtgcccgctacagggccccccaagaggctgccaggtcgggagcgcagcctgaggccacggggggaagggggtgggtgggctgagagcagctcggcggcgagactggcccgccgccccttccccccacacccgtcgaccttgtgggcagaagcttcccagagctccttaggccggcgcgatggcgactgctgtggagacggaggcctgtcagccgacggatgcgagttgggaaagtggcggcggcggagacgacgagatgaagcaggcgcttccggagcttgagtcctcccaacaaaatggcggcggcggcggcctcaacatcgctgagcccagcggcggcgctgggcgtgaggagaacgcgggggccgaggccgcccagagcctcagccacgagcagcctcaggactcctctgaggcgggcgcggccgccctgcccagaggccccgaagagcccgaaaggcctgttaggaggagttttcagatccccaggaagagcagagaaaagaaagcacttttccagccattaactccaggctctcgagaatttgaagatgttgtaaatattctccattcttcttaccttgaaccaacctcagtaacaaattttaactacagacgtgcttgcttggtacacaatgagcttttggaaaaggagtttacagaaaagcgaagagaactgaagtttgatggtcgtttagataaggaactttcagaatcctatgcatttctgatggttgatcgataccaggttcaaaccatatgtgaaaaaggattacatgtgggtcagtccaaaataacaattcttggcagtccttccatgggtgtctatctttctaggtatgctgatttattacaagcgaatcctttggacacgggggcaatgggtgatgttgttatttttaaaataatgaagggtaaaataaagagtatatatgaccccatgggtgtaaaaagtttggaatctatgttaaataagagtgctttggaccccacaccaaagcatgaatgtcacgtgtcaaagaatgccaatcgaattacatcacttttggcttacagagcctatgagcttactcagtattatttttatgagtatggctttgatgagctaaggcgaagaccaagacacgtttgtccatatgcagttgtgtcttttacttacaaagatgatatacaaactccgaagtttgtaccttcatcaagatctaacagctttaatacagatagaaacatagataaatataactataccttgtggaaaggacagcttttaaataaaggaaaacttttgtgttatatttctctgaggtcagccactcgtgcttttttgcctatcaaactacctgagaaattagatgttgaaacagttatgagtattgatcatctgaaacagaaaatccctccagcactgttttataaggaaacatacttaggtccaaatgaagttttgaagaatggaatgtattgcagcctttatgaagttgtggaaaagacaagaattggaagtaacatggagagtttactgcaaaaactagacagagaaaaacttgttcttgttaaacctttgggagaccgaggatacctttttcttctctccccttatcagatggttcctccatatgaatatcagactgccaagtctcgagtcctacatgctttgtttctatttcaagaacctagaagcatagttacttcacaaaaaggttcaaccaatgcagcaccacaggagaggcatgagagcatgccagatgtattaaaaatagctcagtttttacaattttctttgattcagtgtcgaaaggaattcaaaaatataagcgccataaattttcattctgttgttgaaaagtatgtaagtgaattttttaagcgaggttttggttcaggtaaacgagagtttattatgtttccatatgattcacgattagatgataaaaaattcttatactcagctcccagaaataaatcccatattgatacttgtttgcatgcctatatttttcggcctgaagtgtatcagttacctatttgtaaattaaaagaactatttgaagaaaatagaaaacttcagcagtttagtccactttcagattatgaaggtcaagaagaagaaatgaatggtacaaaaatgaaatttggaaaacgaaataactcaagaggtgaagccattatatctggaaagcaaagatcatctcattctttggattatgataaggatagagtcaaagaattgattaatttaattcagtgtaggaaaaagagtgtgggtggggactcagacacagaagatatgagaagcaaaactgtcttgaagaggaagcttgaggatctacctgaaaatatgagaaagctcgccaaaaccagtaatttatctgaaaattgccatctgtatgaagagtctccacagcctattggctcacttggacatgatgctgacttgaggcggcagcagcaggatacctgtaactccggcattgctgacatccataggctgtttaattggttatcagaaacactagcaaatgcgcgccattctgatgcatctctgacagacacagtcaacaaagccttaggattgagcactgatgatgcctatgaagagctgaggcaaaaacatgagtatgagttgaactctaccccagataagaaagactatgagcagcctacttgtgcaaaagttgaaaatgcacagtttaagggtactcagagcttattactagaagttgatgcaacatctaagtattctgttgctatttctaccagcgaagtgggcactgaccataagctacatttgaaagaagatccaaatttaattagcgtgaataattttgaagattgcagtttgtgtcccagtgttcccattgaacatggatttcgtagacaacagtctaagtcaaataatgttgaagagactgaaatacattggaaactgattccaattacaggagggaatgcaagaagcccagaagaccagctggggaaacatggtgagaaacaaacaccaggtatgaaatcaccagaagaacaactggtgtgtgtgccaccacaggaggcctttcctaacgacccccgggtaataaatagacagagaagttctgattaccagtttccatcctctccatttacagacacactaaagggcaccactgaggatgacgtgttgacaggtcaggtggaggagcagtgtgtgccagcagcagaggcagagccgcctgcagtgagcgaaaccacagagaggacagtgttaggagagtacaatctcttttctaggaagatagaagagattttgaagcaaaagaatgtttcatatgtcagtagagtttccacacctatcttttcaacacaagagaagatgaaacggctttccgagttcatatattctaagacttccaaagctggtgtgcaggagtttgtagatggtttgcatgagaagctaaatactattattattaaagcatcagccaagggtgggaatttgccaccagtcagtcctaacgattctggtgctaagatagcatcgaatcctctggaaaggcatgtcataccagtttcctcaagtgacttcaacaataaacatctccttgagccactgtgtagtgatcctttgaaagataccaactctgatgagcagcattccacttcggctttaactgaagtagaaatgaaccagcctcaacatgccacagagttaatggtgacttctgatcatattgtacctggtgatatggcccgggaaccagtagaagaaacaacaaaatcccccagtgatgtaaacatttctgctcaaccagctctttcaaattttataagccagttagaacctgaagtatttaatagtttggttaaaatcatgaaagacgtccagaaaaatactgtgaaattttatattcatgaagaagaagagagtgtgctctgtaaagaaataaaggaatatcttatcaaattaggcaatacagaatgtcatcctgaacagtttttggaaagaagatcaaaattagataaactattgattattattcaaaatgaagacattgcaggtttcattcacaagatacctggcttggtgactttaaagaagctcccctgtgttagttttgctggtgttgatagcctggatgatgttaaaaatcatacatacaatgaattatttgtatctggaggttttatcgtatctgatgaatcaattctaaacccagaggttgtcacagttgagaaccttaaaaattttttgacattccttgaggaacttagtactccagaaggaaaatggcaatggaaagtccactgtaaatttcagaagaaactaaaggaactaggcagattgaatgctaaagctctaagtctgttgacgcttctgaatgtctatcagaagaaacatctggttgaaattttgtcataccacaattgtgattcacaaactcgaaatgctccagaattggattgccttatcagacttcaggctcagaacatacagcaacgacacatagtctttttaacagagaagaacatcaagatgctttccagttatacagataatggaatagtggttgcaactgctgaagacttcatgcaaaactttaaaaatcttgtgggctatcacaattcaatcacagaagaaaaccttccacagcttggtgctaatgagaatcttgagtcgcagtcagatgctgttttgacattaacccctttggagctgggagttgggatttcccaacattaaacgtgaacacatttcgcagaagcttttagcatcggattatctggacattcacatctagtgtgagtgttgtgactaagtgaacttgtggcagaagaccaagctttaagggattgtggacttgcagaccctgacgcgttatattgtgtgagtagtgtataattttaaaacttaaacaaactgtgtatttcaatagaggaggactttttgttttttaaatgtagctcttttagaaaacgatgaaaaggatgaagaggatatgtctctggattcaggggatgaaatctcacatatagaagtatgcagcattcctcatcttgggagggatcctctgacccg

SEQ ID NO: 278004 - DNA, 1871 bp, Homo sapiens
cggctccgaggaccgggcagcgcatttggggtgcccgctacagggccccccaagaggctgccaggtcgggagcgcagcctgaggccacggggggaagggggtgggtgggctgagagcagctcggcggcgagactggcccgccgccccttccccccacacccgtcgaccttgtgggcagaagcttcccagagctccttaggccggcgcgatggcgactgctgtggagacggaggcctgtcagccgacggatgcgagttgggaaagtggcggcggcggagacgacgagatgaagcaggcgcttccggagcttgagtcctcccaacaaaatggcggcggcggcggcctcaacatcgctgagcccagcggcggcgctgggcgtgaggagaacgcgggggccgaggccgcccagagcctcagccacgagcagcctcaggactcctctgaggcgggcgcggccgccctgcccagaggccccgaagagcccgaaaggcctgttaggaggagttttcagatccccaggaagagcagagaaaagaaagcacttttccagccattaactccaggctctcgagaatttgaagatgttgtaaatattctccattcttcttaccttgaaccaacctcagtaacaaattttaactacagacgtgcttgcttggtacacaatgagcttttggaaaaggagtttacagaaaagcgaagagaactgaagtttgatggtcgtttagataaggaactttcagaatcctatgcatttctgatggttgatcgataccaggttcaaaccatatgtgaaaaaggattacatgtgggtcagtccaaaataacaattcttggcagtccttccatgggtgtctatctttctaggtatgctgatttattacaagcgaatcctttggacacgggggcaatgggtgatgttgttatttttaaaataatgaagggtaaaataaagagtatatatgaccccatgggtgtaaaaagtttggaatctatgttaaataagagtgctttggaccccacaccaaagcatgaatgtcacgtgtcaaagaatgccaatcgaattacatcacttttggcttacagagcctatgagcttactcagtattatttttatgagtatggctttgatgagctaaggcgaagaccaagacacgtttgtccatatgcagttgtgtcttttacttacaaagatgatatacaaactccgaagtttgtaccttcatcaagatctaacagctttaatacagatagaaacatagataaatataactataccttgtggaaaggacagcttttaaataaaggaaaacttttgtgttatatttctctgaggtcagccactcgtgcttttttgcctatcaaactacctgagaaattagatgttgaaacagttatgagtattgatcatctgaaacagaaaatccctccagcactgttttataaggaaacatacttaggtccaaatgaagttttgaagaatggaatgtattgcagcctttatgaagttgtggaaaagacaagaattggaagtaacatggagagtttactgcaaaaactagacagagaaaaacttgttcttgttaaacctttgggagaccgaggatacctttttcttctctccccttatcagatggttcctccatatgaatatcagactgccaagtctcgagtcctacatgctttgtttctatttcaagaacctagaagcatagttacttcacaaaaaggttcaaccaatgcagcaccacaggagaggcatgagagcatgccagatgtattaaaaatagctcagtttttacaattttctttgattcagtgtcgaaaggaattcaaaaatataagcgccataaattttcattctgttgttg

SEQ ID NO: 278005 - DNA, 2009 bp, Homo sapiens
  misc_feature (1989)..(1989): n is a, c, g, or t
cggctccgaggaccgggcagcgcatttggggtgcccgctacagggccccccaagaggctgccaggtcgggagcgcagcctgaggccacggggggaagggggtgggtgggctgagagcagctcggcggcgagactggcccgccgccccttccccccacacccgtcgaccttgtgggcagaagcttcccagagctccttaggccggcgcgatggcgactgctgtggagacggaggcctgtcagccgacggatgcgagttgggaaagtggcggcggcggagacgacgagatgaagcaggcgcttccggagcttgagtcctcccaacaaaatggcggcggcggcggcctcaacatcgctgagcccagcggcggcgctgggcgtgaggagaacgcgggggccgaggccgcccagagcctcagccacgagcagcctcaggactcctctgaggcgggcgcggccgccctgcccagaggccccgaagagcccgaaaggcctgttaggaggagttttcagatccccaggaagagcagagaaaagaaagcacttttccagccattaactccaggctctcgagaatttgaagatgttgtaaatattctccattcttcttaccttgaaccaacctcagtaacaaattttaactacagacgtgcttgcttggtacacaatgagcttttggaaaaggagtttacagaaaagcgaagagaactgaagtttgatggtcgtttagataaggaactttcagaatcctatgcatttctgatggttgatcgataccaggttcaaaccatatgtgaaaaaggattacatgtgggtcagtccaaaataacaattcttggcagtccttccatgggtgtctatctttctaggtatgctgatttattacaagcgaatcctttggacacgggggcaatgggtgatgttgttatttttaaaataatgaagggtaaaataaagagtatatatgaccccatgggtgtaaaaagtttggaatctatgttaaataagagtgctttggaccccacaccaaagcatgaatgtcacgtgtcaaagaatgccaatcgaattacatcacttttggcttacagagcctatgagcttactcagtattatttttatgagtatggctttgatgagctaaggcgaagaccaagacacgtttgtccatatgcagttgtgtcttttacttacaaagatgatatacaaactccgaagtttgtaccttcatcaagatctaacagctttaatacagatagaaacatagataaatataactataccttgtggaaaggacagcttttaaataaaggaaaacttttgtgttatatttctctgaggtcagccactcgtgcttttttgcctatcaaactacctgagaaattagatgttgaaacagttatgagtattgatcatctgaaacagaaaatccctccagcactgttttataaggaaacatacttaggtccaaatgaagttttgaagaatggaatgtattgcagcctttatgaagttgtggaaaagacaagaattggaagtaacatggagagtttactgcaaaaactagacagagaaaaacttgttcttgttaaacctttgggagaccgaggatacctttttcttctctccccttatcagatggttcctccatatgaatatcagactgccaagtctcgagtcctacatgctttgtttctatttcaagaacctagaagcatagttacttcacaaaaaggttcaaccaatgcagcaccacaggagaggcatgagagcatgccagatgtattaaaaatagctcagtttttacaattttctttgattcagtgtcgaaaggaattcaaaaatataagcgccataaattttcattctgttgttgaaaagtatgtaagtgaattttttaagcgaggttttggttcaggtaaacgagagtttattatgtttccatatgattcacgattagatgataaaaaattcttatactcagctcccacttnatattggtaacacctcgtcc

SEQ ID NO: 278006 - DNA, 1382 bp, Homo sapiens
cggctccgaggaccgggcagcgcatttggggtgcccgctacagggccccccaagaggctgccaggtcgggagcgcagcctgaggccacggggggaagggggtgggtgggctgagagcagctcggcggcgagactggcccgccgccccttccccccacacccgtcgaccttgtgggcagaagcttcccagagctccttaggccggcgcgatggcgactgctgtggagacggaggcctgtcagccgacggatgcgagttgggaaagtggcggcggcggagacgacgagatgaagcaggcgcttccggagcttgagtcctcccaacaaaatggcggcggcggcggcctcaacatcgctgagcccagcggcggcgctgggcgtgaggagaacgcgggggccgaggccgcccagagcctcagccacgagcagcctcaggactcctctgaggcgggcgcggccgccctgcccagaggccccgaagagcccgaaaggcctgttaggaggagttttcagatccccaggaagagcagagaaaagaaaggtggtgcctccccttcttctcaaccccctctctctctcccctccatcttttcattagaatctttctatctcctcttcccacacccatccgagatacgtaaacacgcatgcagcgccggccgcctctcccctcaccgccacggccgcccagctgccgcgtttggtgcgagagaaagcggtggaaccacgctcccctgctgcccctccccgcggaagttggaagtagctcaggtttgaagcttgtccgtaaggctgcagctcccagagaggaaagatggtgctcggcgcccctccctcccagcccctgaaagcagagaagccgttgtgtcctcctaaggatgcttctgagaagtctcgctatggaaatagcccgtggccatggattctggggctttctccaaggccattgccaatgttctgaggaccatgagtgcttctccccgtggaaattcttcagttctgtgtgtctacttgaaatgtgcttgatgtcagcgtcctcccttatttagaaatctctattagtagatgtgatccatgcacactgctgttttccatcacacttcatttccatgtagatttttcccccttgtttttgaagcgttagattaaataggtttttctctctttaaattcgaacttagtattgtttttcttatatttgaaaagaatggaaaggtaggttcttggagcagtaatttcccaatggaaaaaaactaatgagaagttaccttattctcaagagtcaccaacttggtcttctagatggtagaacttcaggttggtgactaatgagaagttaccttattctcagagtcaccacttggtcttctaccatctagaagac

SEQ ID NO: 278007 - DNA, 1248 bp, Homo sapiens
tttgacagatgaacttttccatacataatcttacatggaaccataatatatcatacagcacataaaacaaaaaggctgtggcagagaggatcccagagctccattagaacccctaaatggttgtgcaaaacatgagctgcacaactctgggaggtaccatgacctccatcataattttactttattttttaaagcttttcagtgaagattggaaaacctgctagacaaattctaaaagagctgtaacactcatagatttgtacagttattaacagggcagttgtccaatagagggtggtagtatcttgaaggaaaagggatgccttttggaaatttgctttaagcctctgtatgttgactggctacagggctgagccccattcactcaacatccccctgtcctgaagtcattgcttcccaacctattccctgtcacggtacctagaaaatgatgccttttttttttctcttttctttttcagatagagtcttcctctgtcgcctaggctggagtgcagtggcgcgatctcggcgcaccgcaacctctgcctcccgggttcaagcgaattctcctgcctcagcctccggagtagctgggattacagatgtgctccaccatgcccggctaatttttgtatttttagtagagatgggggggtttcaccatgttggccaggctggtctcgaactcctgaccttgtgatccactagcttcggcctcccgaagttctgggattacaggcatgagccaccacacccggatgaattatgccatttttaaggcaaagcagcggtgatggtgggtgatggagtgacatcaggagcgccagaaggaggaagtcagaaagcccttggggacaggaatgtccttgtgttgcaaacatttctggtcagggaaagatgaagaaaacagaatgagtttctgataacagtgttcccaacacttaatggttaaaagaagctttgaggaacaccatatttcagccctatggaacagtgaacaaaaaggaaaaagccagtaagactgatggttctgtataagatgtccacttctgcatgatctgctccagacaacaaatgaaatgctcttattattcctgtcccactcttgtctccctacaggctaacctcatctttcacaatccactattttcacaatcgagctttgagaagctgaacagtcagcaggctatcttgggaaaccaactataggtgttctaaattctttgtcaaaattaaccttttaca

SEQ ID NO: 278008 - DNA, 655 bp, Homo sapiens
attttatcacgtggatctcttaaggaactaccaaatctactaagggacctccaagaattttgtgacccatgaaaatctcctctcctagtcacaaggcataaatacataaaaatacatgatggcaaatttctgaatctgacatgacttctcccaaatacagctgtcttcagttcctttattattgcctctttgcagcagcggtgatggtgggtgatggagtgacatcaggagcgccagaaggaggaagtcagaaagcccttggggacaggaatgtccttgtgttgcaaacatttctggtcagggaaagatgaagaaaacagaatgagtttctgataacagtgttcccaacacttaatggttaaaagaagctttgaggaacaccatatttcagccctatggaacagtgaacaaaaaggaaaaagccagtaagactgatggttctgtataagatgtccacttctgcatgatctgctccagacaacaaatgaaatgctcttattattcctgtcccactcttgtctccctacaggctaacctcatctttcacaatccactattttcacaatcgagctttgagaagctgaacagtcagcaggctatcttgggaaaccaactataggtgttctaaattctttgtcaaaattaaccttttaca

SEQ ID NO: 278009 - DNA, 863 bp, Homo sapiens
cccccacccttaaccctaaccctcaagggatccaaaaatcttccggggctcccaaaagccctcccctgttctcagccccgttagcccctcccctcagagcagaacgcgtttgcgctctatgtccctccgcagcccctccacggtcctctctgcccccaaaggtacctccccacctccactttagtctcacccctaagtaccccgaagaaagccaatatttccttctctccgcagcgtcccagatattaaccgttctatctcaatggttttcagattttatcttgcctcttgggtaccctttgggacccttatgtcatccccaccatcagggcacccagacttaaccctaactgcaagtcccagactcactctggtccttattgatgagccaggtgtccctggagtcaagtggctcactgtcaccgatttcattccgagccaccactctgaagtagtacttcctgcctgggagcagccccgtcactgtgtacttgttgctgaagacacgctcggctgccgtgtaccaggtggctgtgcttgcatcccgcttcatgatgacgtagtgagcctcaccgtcctcctgcacatctgggctgtggttccagccatctgccaagtccgatggaagataagatggggcaagtctcaggcagctggtgtcttggagtcggaaaactatttctgaagtctgctctgccatttactagcctcgtgacctgggatgaggaaactgaagctcagagggaaagcagcttgcccaagatggtgggagagctgataataaagtgatactaatctactgcagatgctgagttccaggcaccacgctccaccacctgggcaggtggatgattgacatgggt

SEQ ID NO: 278010 - DNA, 1562 bp, Homo sapiens
actgaggtgccagggtctggtcacccctctctcctcctggggctggggcccagatcctggggacctgcaggagctggatcaggatggctgcagtgccagcctggggcagcaggtactgcctgaggaatttgcaagttcgtgtggggaggctggaaaaggatctccctagcagaactcgtggttcaggacaatgctgagagctaaaagagccagcctaatatcagactggagccagaagtagacatctccccacctctaccctatcaggactttcaaaacccccctggaaggtgatggtgctcagcttcttgacacccccccacccacttcccctaccaggtggaagagtctgactccatgtgttatgcctaggaccaatggcagtgctgggttcacccactcctcccctttttcatctgcacaaagttgagggaaacgggagaatctgtgctgagaagactcagacccaggagcccctttcacaggcccctagttgggaagactggatgagagtggagcctccgtttcttttccctcttctatccttgttacttgaacaatctcagtctctaagtggtgggtggggacatgaagaggtgtgggtccaggttaggcaggagagagaacttctttggtctcggagtttggggtctcaagaattcaagtagccccatctctctctcgggcaagcccaaagctcaggtcccatacgctacccttagatcctatccccagggctagggtgaaccatgccaaaggaaggggccagcttctctgtgtgtgtgtgtagcctgtctcctagtctgcctatgtctttctctgctatatgtttctgtcctgctgtctgtcaaaagtctcacagagagagggcctcagggagctgctgaggggtgctgagcctggctcagggagctgggacccctcccctccaacacacatactcacagtgctttcctccttgtccctcctacactaggagcaagaggagggggctccaatgacactccggggttttaagacccaaggcacattcaatgcaaggggagcaaggatgggacaactccatcttctgctgcccatgtgaaaaataataaaaatcaagagccattggcaaaaaaaaaaaacaaaaaaaaaaaaaaacaagaaacaacaacagaaaacacagaaaaaaaaaagaaccaaacgaacaagaaaaagacacaagaagagacaggaacagagcaaaaataaagaaggagggggagacgccagatgacaacaccaacaagagggcgcacgagcactggcgcaacaaccaaagaaaagaaggagagcgcacaacgaaagagaagcacagaaaagaagaaaggaagaaagagcaaatacaaacagcgcggagagagaaaaaatcgaagagaggagtaaataggagggaagacagaacaattgggggagggagataataataggaaaaaaaacagcgaaaaaaataaatgctgtggggtatttatataaagtgaggtatatgagagaaaaaacagatatagtaggagaaaaaatagggaagggattaagaaaaaatg

SEQ ID NO: 278011 - DNA, 894 bp, Homo sapiens
actgaggtgccagggtctggtcacccctctctcctcctggggctggggcccagatcctggggacctgcaggagctggatcaggatggctgcagtgccagcctggggcagcaggtactgcctgaggaatttgcaagttcgtgtggggaggctggaaaaggatctccctagcagaactcgtggttcaggacaatgctgagagctaaaagagccagcctaatatcagactggagccagaagtagacatctccccacctctaccctatcaggactttcaaaacccccctggaaggtgtccctggagtcaagtggctcactgtcaccgatttcattccgagccaccactctgaagtagtacttcctgcctgggagcagccccgtcactgtgtacttgttgctgaagacacgctcggctgccgtgtaccaggtggctgtgcttgcatcccgcttcatgatgacgtagtgagcctcaccgtcctcctgcacatctgggctgtggttccagccatctgccaagtccgatggaagataagatggggcaagtctcaggcagctggtgtcttggagtcggaaaactatttctgaagtctgctctgccatttactagcctcgtgacctggggccatacagacatctagctgccctgcaaccctgtgaagcatttatttgttttctcatctgtctccttctactagtacgcaagaccctggaaggttgaggcaatgctgacgactgatggctccacctggacctgctctccctccaccccacaagtcctgaggccccagtcagaagcaggctccctggactttgaattttcggggaattgatttgggtaataactctgtctcccatacagcatggctggccttgtgtccattaaactctttgttgca

SEQ ID NO: 278012 - DNA, 789 bp, Homo sapiens
aggagatggcacaactggtcacacagatgatatttgggggcaggccttcctccattgtcgaggagtttcctgccaggctgtcgcactaggggtctggtgaggggcagagtcagagtcagagtcagagactgtgatggctacaatagccatcttggttatgtggacagtgtatggaggtcagggtcagggacaactcacagagaaggctgcatggatgcagagggctgtcccagcgcgaaccaccatgtgactcttcagccgggcactgaggtcaaacttgggtgcagctgagatggaggagacagaggtggaggcatggatctgtctttcaagaagactctgctttaagcctcctcatcaaagccttcccaacctctcctcctttatgcccccactacaggccatacagacatctagctgccctgcaaccctgtgaagcatttatttgttttctcatctgtctccttctactagtacgcaagaccctggaaggcaagtccttgtgtcttgtttctataaccctaacacctccttttgaaattgccattgcaacaattataacagcgagaaaattatgacagtgaacgagatctgatctaaccaacccccatcttgcctttaccctccaaactgcccttaatcattcctggtttcagaccaagctaatgttgggagagacatttagtttatagcttagatgataacagtcttcccccaaactaaatcacctttgcgaagctaatgaaaggccaccaggttaggaggatgtgaggagcctgaattctgcta

SEQ ID NO: 278013 - DNA, 575 bp, Homo sapiens
agtcaagtggctcactgtcaccgatttcattccgagccaccactctgaagtagtacttcctgcctgggagcagccccgtcactgtgtacttgttgctgaagacacgctcggctgccgtgtaccaggtggctgtgcttgcatcccgcttcatgatgacgtagtgagcctcaccgtcctcctgcacatctgggctgtggttccaggtcagagtcactgtgttggggacttcctcaaacaaccgtaggtttgtggggggccgagggaaatctggaagagttggaagatctgtcagcgaccttggggcacctgaagtattatgtccccaccccagccatctgccaagtccgatggaagataagatggggcaagtctcaggcagctggtgtcttggagtcggaaaactatttctgaagtctgctctgccatttactagcctcgtgacctggggtaagttacttatctgagacttctttcctcaattgcaaaatagagctgacaatgactatttcgtagaaatagtgggtaaagagactggcatgtagttactgttcagtaaaaatgaatccattccttcc

SEQ ID NO: 278014 - DNA, 1749 bp, Homo sapiens
ccacagtggcgccggcagagcaggagtggctggaggagctgtggttggagcaggaggtggcacggcagggctggagggctccctatgagtggcggagacggcccaggaggcgctggagcaacagctcccacaccgcaccaagcggtggctgcaggagctcgcccatcgcccctgcgctgctcggaccgcggccacagccggactggcgggtacggcggcgacagacggattggccgagagtcccagtccgcagagtagccccggcctcgaggcggtggcgtcccggtcctctccgtccaggagccaggacaggtgtcgcgcggcggggctccagggaccgcgcctgaggccggctgcccgcccgtcccgccccgccccgccgcccgccgcccgccgagcccagcctccttgccgtcggggcgtccccaggccctgggtcggccgcggagccgatgcgcgcccgctgagcgccccagctgagcgcccccggcctgccatgaccgcgctccccggcccgctctggctcctgggcctggcgctatgcgcgctgggcgggggcggccccggcctgcgacccccgcccggctgtccccagcgacgtctgggcgcgcgcgagcgccgggacgtgcagcgcgagatcctggcggtgctcgggctgcctgggcggccccggccccgcgcgccacccgccgcctcccggctgcccgcgtccgcgccgctcttcatgctggacctgtaccacgccatggccggcgacgacgacgaggacggcgcgcccgcggagcggcgcctgggccgcgccgacctggtcatgagcttcgttaacatggtggagcgagaccgtgccctgggccaccaggagccccattggaaggagttccgctttgacctgacccagatcccggctggggaggcggtcacagctgcggagttccggatttacaaggtgcccagcatccacctgctcaacaggaccctccacgtcagcatgttccaggtggtccaggagcagtccaacagggagtctgacttgttctttttggatcttcagacgctccgagctggagacgagggctggctggtgctggatgtcacagcagccagtgactgctggttgctgaagcgtcacaaggacctgggactccgcctctatgtggagactgaggacgggcacagcgtggatcctggcctggccggcctgctgggtcaacgggccccacgctcccaacagcctttcgtggtcactttcttcagggccagtccgagtcccatccgcacccctcgggcagtgaggccactgaggaggaggcagccgaagaaaagcaacgagctgccgcaggccaaccgactcccagggatctttgatgacgtccacggctcccacggccggcaggtctgccgtcggcacgagctctacgtcagcttccaggacctcggctggctggactgggtcatcgctccccaaggctactcggcctattactgtgagggggagtgctccttcccactggactcctgcatgaatgccaccaaccacgccatcctgcagtccctggaggttcaacggtgatgccttgatcaggtgcggtggctcaccctgtaatcgcagcacacgagcccagaagttcaagacaagcctgggcaacacagcaaaaccctgtctctaaaataaaaattaaaacacacacacacacacgtgcgcacactatgccttggtgtgagaggaaataaattaccaaaagctgctct

SEQ ID NO: 278015 - DNA, 1844 bp, Homo sapiens
ccacagtggcgccggcagagcaggagtggctggaggagctgtggttggagcaggaggtggcacggcagggctggagggctccctatgagtggcggagacggcccaggaggcgctggagcaacagctcccacaccgcaccaagcggtggctgcaggagctcgcccatcgcccctgcgctgctcggaccgcggccacagccggactggcgggtacggcggcgacagacggattggccgagagtcccagtccgcagagtagccccggcctcgaggcggtggcgtcccggtcctctccgtccaggagccaggacaggtgtcgcgcggcggggctccagggaccgcgcctgaggccggctgcccgcccgtcccgccccgccccgccgcccgccgcccgccgagcccagcctccttgccgtcggggcgtccccaggccctgggtcggccgcggagccgatgcgcgcccgctgagcgccccagctgagcgcccccggcctgccatgaccgcgctccccggcccgctctggctcctgggcctggcgctatgcgcgctgggcgggggcggccccggcctgcgacccccgcccggctgtccccagcgacgtctgggcgcgcgcgagcgccgggacgtgcagcgcgagatcctggcggtgctcgggctgcctgggcggccccggccccgcgcgccacccgccgcctcccggctgcccgcgtccgcgccgctcttcatgctggacctgtaccacgccatggccggcgacgacgacgaggacggcgcgcccgcggagcggcgcctgggccgcgccgacctggtcatgagcttcgttaacatggtggagcgagaccgtgccctgggccaccaggagccccattggaaggagttccgctttgacctgacccagatcccggctggggaggcggtcacagctgcggagttccggatttacaaggtgcccagcatccacctgctcaacaggaccctccacgtcagcatgttccaggtggtccaggagcagtccaacagggagtctgacttgttctttttggatcttcagacgctccgagctggagacgagggctggctggtgctggatgtcacagcagccagtgactgctggttgctgaagcgtcacaaggacctgggactccgcctctatgtggagactgaggacgggcacagcgtggatcctggcctggccggcctgctgggtcaacgggccccacgctcccaacagcctttcgtggtcactttcttcagggccagtccgagtcccatccgcacccctcgggcagtgaggccactgaggaggaggcagccgaagaaaagcaacgagctgccgcaggccaaccgactcccagggatctttgatgacgtccacggctcccacggccggcaggtctgccgtcggcacgagctctacgtcagcttccaggacctcggctggctggactgggtcatcgctccccaaggctactcggcctattactgtgagggggagtgctccttcccactggactcctgcatgaatgccaccaaccacgccatcctgcagtccctggtgcacctgatgaagccaaacgcagtccccaaggcgtgctgtgcacccaccaagctgagcgccacctctgtgctctactatgacagcagcaacaacgtcatcctgcgcaagcaccgcaacatggtggtcaaggcctgcggctgccactgagtccagcccgcccagccctagctgcagccacccttctcatctggatcgggccctgcagaggcagaaaacccttaaatgctgtcacagctcaagcaggagtgtcaggggccctcactctctgtgcctacttcctgtcagg

SEQ ID NO: 278016 - DNA, 1970 bp, Homo sapiens
ccacagtggcgccggcagagcaggagtggctggaggagctgtggttggagcaggaggtggcacggcagggctggagggctccctatgagtggcggagacggcccaggaggcgctggagcaacagctcccacaccgcaccaagcggtggctgcaggagctcgcccatcgcccctgcgctgctcggaccgcggccacagccggactggcgggtacggcggcgacagacggattggccgagagtcccagtccgcagagtagccccggcctcgaggcggtggcgtcccggtcctctccgtccaggagccaggacaggtgtcgcgcggcggggctccagggaccgcgcctgaggccggctgcccgcccgtcccgccccgccccgccgcccgccgcccgccgagcccagcctccttgccgtcggggcgtccccaggccctgggtcggccgcggagccgatgcgcgcccgctgagcgccccagctgagcgcccccggcctgccatgaccgcgctccccggcccgctctggctcctgggcctggcgctatgcgcgctgggcgggggcggccccggcctgcgacccccgcccggctgtccccagcgacgtctgggcgcgcgcgagcgccgggacgtgcagcgcgagatcctggcggtgctcgggctgcctgggcggccccggccccgcgcgccacccgccgcctcccggctgcccgcgtccgcgccgctcttcatgctggacctgtaccacgccatggccggcgacgacgacgaggacggcgcgcccgcggagcggcgcctgggccgcgccgacctggtcatgagcttcgttaacatggtggagcgagaccgtgccctgggccaccaggagccccattggaaggagttccgctttgacctgacccagatcccggctggggaggcggtcacagctgcggagttccggatttacaaggtgcccagcatccacctgctcaacaggaccctccacgtcagcatgttccaggtggtccaggagcagtccaacagggagtctgacttgttctttttggatcttcagacgctccgagctggagacgagggctggctggtgctggatgtcacagcagccagtgactgctggttgctgaagcgtcacaaggacctgggactccgcctctatgtggagactgaggacgggcacagcgtggatcctggcctggccggcctgctgggtcaacgggccccacgctcccaacagcctttcgtggtcactttcttcagggccagtccgagtcccatccgcacccctcgggcagtgaggccactgaggaggaggcagccgaagaaaagcaacgagctgccgcaggccaaccgactcccagggatctttgatgacgtccacggctcccacggccggcaggtctgccgtcggcacgagctctacgtcagcttccaggacctcggctggctggactgggtcatcgctccccaaggctactcggcctattactgtgagggggagtgctccttcccactggactcctgcatgaatgccaccaaccacgccatcctgcagtccctggtgcacctgatgaagccaaacgcagtccccaaggcgtgctgtgcacccaccaagctgagcgccacctctgtgctctactatgacagcagcaacaacgtcatcctgcgcaagcaccgcaacatggtggtcaaggcctgcggctgccactgagtccagcccgcccagccctagctgcagccacccttctcatctggatcgggccctgcagaggcagaaaacccttaaacccagccagaccccaggccggggcattgccagggaggaccctcacaaccacgtacatgaccctttctccttcatgccaggctcctatgctccccttgccctgccaggcatttgtgtgactgtcctgtttccagcccaggtggtctcaatcatcaggcagtgttctacccaaatgcaaacgcctctcccg

SEQ ID NO: 278017 - DNA, 1317 bp, Homo sapiens
gggcaggagaggaagggacgggccgagcgggtcggggcttgccgtttgactggaattgccagaatggcggaccgagccccacgacaacctacctccctgggctcctcgccgcagcgctgcggctcgcctccctctgctcctcctcctccgccggatcgcggcgagcggatcgaggactgcctagcgcccctctgcccaccggtggttggaggccgcggcggctgcgcgttgagtcgtttcctgccggttgacctgagcctacttcgcagtagcaggaccgctgctgtggagctggtcgcaggcggtgtgtgccggtcgcctagtcaggagaactagtcctcgactcacggtgagggaatggaccgacacgggtattgtaccgctgagggaaaggagcgggactccggacctccaggaggtagggagtgaggccagtaggaccggcgcgcctccggggggattcctcccgggcgttgagttgccaacctgggacccgaggaagatcggcgtggtggtgtgctttttgttgttgttaaccctcctcggatttctcgaatttcacaccactgtccatatgcgatgatgtttgtttgcccttgacgcacttactcatggatggtacttcttcagcctcgttagacagcctggtgatggaggatgaagaaaccatgtgcttttcattcagttctggacttagtctcccttttcttccttcagcaagttatttttgttagttccttatcaaaaagtgtacataaaaattaggcaactccaaacatgcctccagggttaatgtgtgaaataataagataatatatgtaaagtggaattagctcctaggcatagggaaagtgcagaatattgccgtgttgtcatttacagttctgttgatgtcgataacgtttgtgggtgtaattggtagtgttctgtccctccaaggagttaataaaacaaagcaaacataggcctgttaggtttctgtggctactgaatatttgtttctcaaaacacttgactgatatttgataattgaatgcagcagaaatacggacgattaaagtccacaaataattccaaagtttacttgatctagtagtttttacctttacctaaagggtaaagcagaataaattaccggaaggatctacttgggtttccctttccttcacatttgtggactcctggggatccaggaagtaattcagaaatgactgttcaaaagcccatgcaaggccgggcgcggtggctaacgcttgtaatcccagcgctttgggaggccaaggtgggcggatgacctgaggtcaggagttcgagacc

SEQ ID NO: 278018 - DNA, 203 bp, Homo sapiens
caccatgttagccaggatggtctcgttctcctgaccttgtgatccgcccacctcggcctcccaaagtgctgggattacaggcgtggtggtgtgctttttgttgttgttaaccctcctcggatttctcgaatttcacaccactgtccatatgcgatgatttgttttttttggtttttttgtttttttaggttttttttacgaaa

SEQ ID NO: 278019 - DNA, 1264 bp, Homo sapiens
gacagtggctcccagaaagcccaggattcaatcgctgagagagtgcttaggcccgaatgccggcccaaatcgttctactcaccgtgtcggaggccgaggccgaggccgagagcgatgagagtgcagggaagtggggaagagggggtggccgccaggctcctccgcttccctgggtccacggcggatccctcccgcttgtcaggaggcggccagcggtagcaggaccgctgctgtggagctggtcgcaggcggtgtgtgccggtcgcctagtcaggagaactagtcctcgactcacggtgagggaatggaccgacacgggtattgtaccgctgagggaaaggagcgggactccggacctccaggaggtagggagtgaggccagtaggaccggcgcgcctccggggggattcctcccgggcgttgagttgccaacctgggacccgaggaagatcggcgtggtggtgtgctttttgttgttgttaaccctcctcggatttctcgaatttcacaccactgtccatatgcgatgatgtttgtttgcccttgacgcacttactcatggatggtacttcttcagcctcgttagacagcctggtgatggaggatgaagaaaccatgtgcttttcattcagttctggacttagtctcccttttcttccttcagcaagttatttttgttagttccttatcaaaaagtgtacataaaaattaggcaactccaaacatgcctccagggttaatgtgtgaaataataagataatatatgtaaagtggaattagctcctaggcatagggaaagtgcagaatattgccgtgttgtcatttacagttctgttgatgtcgataacgtttgtgggtgtaattggtagtgttctgtccctccaaggagttaataaaacaaagcaaacataggcctgttaggtttctgtggctactgaatatttgtttctcaaaacacttgactgatatttgataattgaatgcagcagaaatacggacgattaaagtccacaaataattccaaagtttacttgatctagtagtttttacctttacctaaagggtaaagcagaataaattaccggaaggatctacttgggtttccctttccttcacatttgtggactcctggggatccaggaagtaattcagaaatgactgttcaaaagcccatgcaaggccgggcgcggtggctaacgcttgtaatcccagcgctttgggaggccaaggtgggcggatgacctgaggtcaggagttcgagacc

SEQ ID NO: 278020 - DNA, 440 bp, Homo sapiens
aggctcccagactctgtagtgaagaggcatgtaaagagacaaatgagagcatgccatgcaaactgctaaagttagcctttgcctttttcccagagactctctaggaatttttcccatctgctgactaggagcattcaaattctcagcacagaaggttcttgctgttttgctgcaccaagttcttggaaatcacatacagatccccctaaaggagattggaacagtgcaatatttggggactgcattctccacccaaggatttagcatcaaatgaaaaacaggttcatgttctgacaaggtagtcacaacatttggccattttcttgggtacaagctaagacctcagaagacattactgatcaacacatcctgtttagcagtagtgacagaacattgtgcattaaaaattcaatgatatttaactttgaaattataaatta

SEQ ID NO: 278021 - DNA, 770 bp, Homo sapiens
aggctcccagactctgtagtgaagaggcatgtaaagagacaaatgagagcatgccatgcaaactgctaaagttagcctttgcctttttcccagagactctctaggaatttttcccatctgctgactaggaggtaagccccgacctaaatttttgtcttgttgtaggttaattaagactggtgttagattcagctcctaaggcctaagagaatttaaggttgtcttctgggaaggacacccaacagcagcattggaattggaaaaaaagtgtaggattttgctgagtgagcagggggaaagcaatgtaaagcccaagagaatatcttttgaacaaacgtccttttcattttggtttagaaatagaaacgtggtaaaaggaggcgactgttttctgaaggcttgtagcacgaaaacaggccaactggccagcaactagttgtctatcagtttctctactcacatacatctgccttttccagactgccagcgcggagcactagtttgactttgggtgctcttcaaatagctggcattgataaggcattcccagaagactgtgttacttagtaatcttgtcggtacattttttcactgggcagagattttccaaacagagagctgccagctttcaagacgtcagagtgctttttcatcccaggggaggagctgcggtggctgagccgacgctgcgcgcacagccgcctgtggttttccgcgcattgtgaggaatgaggggtggaggtggtattagacgcagccgaatcctccct

SEQ ID NO: 278022 - DNA, 1301 bp, Homo sapiens
tttttttttttcctaaggaatgtttgaattttattgtacttttttttttaaagaaaagagaatatcataatcttacacaatttctttcaaatggataaacttagacaatttatcaatgcttccttacatttttacaccacgctgaactccaacaggtttttgttttaaggtaaaccaggtttttggtccttccctgtggagaagttactttcaagtcagtgaaagttcttggcccatgattaaaagtctttgccaattagtactcaacaacttcaattcatttttttctggttcaagatgagtaggagcctaataaggctgtgataaaagggcaaaaggcactgagagccaaaagcggattaatgagctcctccatttatttgtcttcctaacagctgaactgttacaactattgacactcttcaaaaggttccgctctgaaccctgtccaggcactgcaggctccaatggacatcttcaaatccagagaatggaggggcaagagcttcccctgtgtgatgccaaaaccaacaaagccccatggatcaggtaatgaaacttcagcttttccccctttgagatttatttactggcagctgacaaggggcaaattcagctcgaattgtgcagtcaaggccctgtcaagcttttagaggcacccttgtcttgaagcaccttcatgactggcatttcactcaaaagccctcggcactggtccttaacagcttatgacatcacaaaggacactccagacagatgcctacatggcatcctgcagcattttaaaagagaattagtggttttaattatggtcgtagtatgaaagggaaccatgcaagctccacaggagacctttgatcagacccttttgctagtacaatgccacggaactgtgactattcctggtaaggggccttttcttgctgaatgactcaccagtgatctttgaatgcagacaagcttctagccctccctcttcattagtgagcatttctatacaggggcctatatagtgcttggagtctaggagctatacaattggggggaaaagaagccctacagattctggcctctacttaggaagtgctgaaggactctgagtgactttattcattaaaacaggttgctattaattaactgtcataataaaataaagaactattatttgcatttcttactatgttctctttagtaatatgtataaaagatgcttgtaacagaaatgaatttattgggccacttccccatcccccccaatccctgcctttttttcccctttgcattttgcagcagcaggagcc

SEQ ID NO: 278023 - DNA, 1067 bp, Homo sapiens
  misc_feature (1065)..(1065): n is a, c, g, or t
  misc_feature (1067)..(1067): n is a, c, g, or t
tttttttttttcctaaggaatgtttgaattttattgtacttttttttttaaagaaaagagaatatcataatcttacacaatttctttcaaatggataaacttagacaatttatcaatgcttccttacatttttacaccacgctgaactccaacaggtttttgttttaaggtaaaccaggtttttggtccttccctgtggagaagttactttcaagtcagtgaaagttcttggcccatgattaaaagtctttgccaattagtactcaacaacttcaattcatttttttctggttcaagatgagtaggagcctaataaggctgtgataaaagggcaaaaggcactgagagccaaaagcggattaatgagctcctccatttatttgtcttcctaacagctgaactgttacaactattgacactcttcaaaaggttccgctctgaaccctgtccaggcactgcaggctccaatggacatcttcaaatccagagaatggaggggcaagagcttcccctgtgtgatgccaaaaccaacaaagccccatggatcaggtaatgaaacttcagcttttccccctttgagatttatttactggcagctgacaaggggcaaattcagctcgaattgtgcagtcaaggccctgtcaagcttttagaggcacccttgtcttgaagcaccttcatgactggcatttcactcaaaagccctcggcactggtccttaacagcttatgacatcacaaaggacactccagacagatgcctacatggcatcctgcagcattttaaaagagaattagtggttttaattatggtcgtagtatgaaagggaaccatgcaagctccacaggagacctttgatcagacccttttgctagtacaatgccacggaactgtgactattcctggtaaggggccttttcttgctgaatgactcaccagtgatctttgaatgcagacaagcttctagccctccctcttcattagtgagcatttctatacaggggcctatatagtgcttggagtctaggagctatacaattgggtctagatctctgagtccaaaancn

SEQ ID NO: 278024 - DNA, 421 bp, Homo sapiens
cagtcatctggtgaaagactggaagtcagaagacttttcaaaagcttctcactgaaatgaaaaaaaatcaaggcctggaaaggttctttgatgcacagttgacaactaatggcagagtgggcctagaagctgggcctccttactgccagacagaactccagcatgctgccttctataatcagggtaatgagctataggatggtagatgatgcagcattcaaagacttggaagtagaaggtgccatgcatctaaccatcatggtatccacacaaccagcaccctcttccctcctctctccccattgttctgtaagtaggagaacgagaaggacatgttctctttctgttgttttatggtattttgtgggtagcaagtaacaatattaacaattaataaaaaaaaaaattagaaggcatctca

SEQ ID NO: 278025 - DNA, 223 bp, Homo sapiens
tttttttttttcctaaggaatgtttgaattttattgtacttttttttttaaagaaaagagaatatcataatcttacacaatttctttcaaatggataaacttagacaatttatcaatgcttccttacatttttacaccacgctgaactccaacaggtttttgttttaaggtaaaccaggtttttggtccttccctgtggactgaccggcaggcacgagggggg

SEQ ID NO: 278026 - DNA, 1267 bp, Homo sapiens
tttttttttttcctaaggaatgtttgaattttattgtacttttttttttaaagaaaagagaatatcataatcttacacaatttctttcaaatggataaacttagacaatttatcaatgcttccttacatttttacaccacgctgaactccaacaggtttttgttttaaggtaaaccaggtttttggtccttccctgtggagaagttactttcaagtcagtgaaagttcttggcccatgattaaaagtctttgccaattagtactcaacaacttcaattcatttttttctggttcaagatgagtaggagcctaataaggctgtgataaaagggcaaaaggcactgagagccaaaagcggattaatgagctcctccatttatttgtcttcctaacagctgaactgttacaactattgacactcttcaaaaggttccgctctgaaccctgtccaggcactgcaggctccaatggacatcttcaaatccagagaatggaggggcaagagcttcccctgtgtgatgccaaaaccaacaaagccccatggatcaggtaatgaaacttcagcttttccccctttgagatttatttactggcagctgacaaggggcaaattcagctcgaattgtgcagtcaaggccctgtcaagcttttagaggcacccttgtcttgaagcaccttcatgactggcatttcactcaaaagccctcggcactggtccttaacagcttatgacatcacaaaggacactccagacagatgcctacatggcatcctgcagcattttaaaagagaattagtggttttaattatggtcgtagtatgaaagggaaccatgcaagctccacaggagacctttgatcagacccttttgctagtacaatgccacggaactgtgactattcctgaaaaaaaatcaaggcctggaaaggttctttgatgcacagttgacaactaatggcagagtgggcctagaagctgggcctccttactgccagacagaactccagcatgctgccttctataatcagggtaatgagctataggatggtagatgatgcagcattcaaagacttggaagtagaaggtgccatgcatctaaccatcatggtatccacacaaccagcaccctcttccctcctctctccccattgttctgtaagtaggagaacgagaaggacatgttctctttctgttgttttatggtattttgtgggtagcaagtaacaatattaacaattaataaaaaaaaaaattagaaggcatctca

SEQ ID NO: 278027 - DNA, 946 bp, Homo sapiens
tttttttttttcctaaggaatgtttgaattttattgtacttttttttttaaagaaaagagaatatcataatcttacacaatttctttcaaatggataaacttagacaatttatcaatgcttccttacatttttacaccacgctgaactccaacaggtttttgttttaaggtaaaccaggtttttggtccttccctgtggagaagttactttcaagtcagtgaaagttcttggcccatgattaaaagtctttgccaattagtactcaacaacttcaattcatttttttctggttcaagatgagtaggagcctaataaggctgtgataaaagggcaaaaggcactgagagccaaaagcggattaatgagctcctccatttatttgtcttcctaacagctgaactgttacaactattgacactcttcaaaaggttccgctctgaaccctgtccaggcactgcaggctccaatggacatcttcaaatccagagaatggaggggcaagagcttcccctgtgtgatgccaaaaccaacaaagccccatggatcaggtaatgaaacttcagcttttccccctttgagatttatttactggcagctgacaaggggcaaattcagctcgaattgtgcagtcaaggccctgtcaagcttttagaggcacccttgtcttgaagcaccttcatgactggcatttcactcaaaagccctcggcactggtccttaacagcttatgacatcacaaaggacactccagacagatgcctacatggcatcctgcagcattttaaaagagaattagtggttttaattatggtcgtagtatgaaagggaaccatgcaagctccacaggagacctttgatcagacccttttgctagtacaatgccacgcaaagatcactggtgagtcattcagcaaaaaaggccccttaccaggaatagtcacatca

SEQ ID NO: 278028 - DNA, 364 bp, Homo sapiens
aaaaaaaatcaaggcctggaaaggttctttgatgcacagttgacaactaatggcagagtgggcctagaagctgggcctccttactgccagacagaactccagcatgctgccttctataatcaggtattttgctatcctcaagtggggtgtctcggagggatctgcctttgcccccatggcttgcttcttatggactgctctcccctccctctcttgctgccttgccctaccatctgtttggttagctccttctgatctttcaagatgacactccaatgacatcctctctggaagccttcccttcctccctccctcaccagcctacttcccagcttgctctggtccagggctctgggtttctgta

SEQ ID NO: 278029 - DNA, 2748 bp, Homo sapiens
agcagctagcagggagatgctgggggatagacagggctgctggggactgttgtacaggctgtgcactgctcaagggtatccagagcccagctttgtatctaccaggaagaaggggctcccctcccctcccttcctcttccctcccctctcctttcctctcctctcctttcctttcctttttttttttttttttgagatggagtcttgctttgtcgccctggctggagtgcaatggcatgatctcggctcactgcaacctctgcctcctcggttcaagcaattctcctgcctcagcctcctgagtagctggaattacaggtgcacaccaccacgcctggctaatttttttgtatttttagtagagacggggtttcaccatgttggtcaggctggtcttgaactcctgacctcgtgatccgcccacctcggcctcccaaagtgttgggattacaggcgtgagccaccatgcctagcctttttttttccccccctggaaaaggtgtagccataggcgctgactgaggtcctgggaacaagtctccagagggcagtggcactcaaacccacgtacctggctggcctcccagaatgtgagctgagcccaagcatgctgtgaagccaagatgcagaggttgatgaaggcacagcccatggagatgtggaagtagaaggggaagagtttgctctgcactagtccgaagggatccagttctgacagccaagaccactcctctcataaaataataccggatattaggtgaagatcccgaaagccccgaggaaaccctaaatctcatcctgaggacaccgatcccaccaaagccccgaggaaacgccaaatctcatcccgaggacaccgatcccaccgttaggaaccgggacctcaatccgcagcacccggattccgagaacagaggcgtcggggccaaatgggctgaatctggtacctcactcccacgcccccgggtggacagcgaccctcctcggccgcgtcccctcgtgggtttcccccaaccaataattcgtcccgcctcccagctgagcccgaagccaatcgggtcgtagatctgcacctttctatcccgccctcctgggtattgactaatcgtagaaacccccctgggatcccgccccctccacgggcttttatccaattacgccgcggctactaagcgcagctgaagcgtgaaggcgccaatgaggccttcggctactccggcaggggcggaactaaaatgccggccacacccctctctgtgactcagtctctgagcgttttaatacgatggtgtccccgcgggatcaaacttcagcgtcacagctgaggactggcttcgtggtccctgatgggagagcatgaacaggtggtatgtgaagcccttggagaccagctcttccaaagtcaaagccaagaccattgtgatgattcccgactcccagaagctcctgcgatgtgaacttgagtcactcaagagccagttacaggcccagaccaaggctttcgagttcctgaaccactcagtgaccatgttggagaaggagagctgcttgcagcaaatcaagattcagcagcttgaagaggtgctgagccccacaggccgccagggagagaaggaggagcacaagtggggcatggagcagggccggcaggagctgtatggggccctgacccaaggccttcaggggctggagaagaccctgcgtgacagtgaggagatgcagcgggcccgcaccactcgctgcctgcagctgctggcccaggagatccgggacagcaagaagttcctgtgggaggagctggaactggtgcgggaggaggtgaccttcatctatcagaagctccaagcgcaggaggatgagatctcagagaacttggtgaacattcagaaaatgcagaaaacgcaggtgaaatgccgcaaaatcctgaccaagatgaagcagcagggtcatgagacagccgcctgtccggagactgaagagataccgcagggagccagtggctgctggaaggatgacctccagaaggaactgagtgatatatggtctgctgtgcacgtgctgcagaactccatagacagcctcactttgtgctcgggggcctgtcccaaggcctcgagcctaagaggccacaaggggcaccagtgcctgagccctccactcccctcctgggactctgactccgactctgaccaggacctctcccagccacctttcagcaagagcggccgctccttcccacccgcttgagcagccgggactgctctccctgaagacccctccagagagaaaataaactagcccagaccctcctctagccccgactgttagtcttgctgcttcctgtgcctaggaatccccctgccctcctagtttacccctcattgttgggggggaggggtgtagagaccccaggggtcattcgggatgtgtgggcttggaatcaggggacatctgaagccagatttaatatatgacaaggcaaggagtcattctgtccagacacgagcagccagacagacttccacactggccacagagccttcctttctggggggccctggcgaatggggaaactgaggcccagagagggagaggcgcggcccagggacatactctgaagcccctccctcctattaccctcggagccccgcccaccccagggtcctccctctctacttccattcttggttccttcctacaatcgatgctaacacgccccgcctccaagatcacggaggccccgcccca

SEQ ID NO: 278030 - DNA, 3613 bp, Homo sapiens
agcagctagcagggagatgctgggggatagacagggctgctggggactgttgtacaggctgtgcactgctcaagggtatccagagcccagctttgtatctaccaggaagaaggggctcccctcccctcccttcctcttccctcccctctcctttcctctcctctcctttcctttcctttttttttttttttttgagatggagtcttgctttgtcgccctggctggagtgcaatggcatgatctcggctcactgcaacctctgcctcctcggttcaagcaattctcctgcctcagcctcctgagtagctggaattacaggtgcacaccaccacgcctggctaatttttttgtatttttagtagagacggggtttcaccatgttggtcaggctggtcttgaactcctgacctcgtgatccgcccacctcggcctcccaaagtgttgggattacaggcgtgagccaccatgcctagcctttttttttccccccctggaaaaggtgtagccataggcgctgactgaggtcctgggaacaagtctccagagggcagtggcactcaaacccacgtacctggctggcctcccagaatgtgagctgagcccaagcatgctgtgaagccaagatgcagaggttgatgaaggcacagcccatggagatgtggaagtagaaggggaagagtttgctctgcactagtccgaagggatccagttctgacagccaagaccactcctctcataaaataataccggatattaggtgaagatcccgaaagccccgaggaaaccctaaatctcatcctgaggacaccgatcccaccaaagccccgaggaaacgccaaatctcatcccgaggacaccgatcccaccgttaggaaccgggacctcaatccgcagcacccggattccgagaacagaggcgtcggggccaaatgggctgaatctggtacctcactcccacgcccccgggtggacagcgaccctcctcggccgcgtcccctcgtgggtttcccccaaccaataattcgtcccgcctcccagctgagcccgaagccaatcgggtcgtagatctgcacctttctatcccgccctcctgggtattgactaatcgtagaaacccccctgggatcccgccccctccacgggcttttatccaattacgccgcggctactaagcgcagctgaagcgtgaaggcgccaatgaggccttcggctactccggcaggggcggaactaaaatgccggccacacccctctctgtgactcagtctctgagcgttttaatacgatggtgtccccgcgggatcaaacttcagcgtcacagctgaggactggcttcgtggtccctgatgggagagcatgaacaggtggtatgtggctcttcctcggacaaggctctggaagcgtacagctcactggtccaggactccagagccagagaccttgggatgccctgcttctggggacacagtgaggactgcagactgcaggccagggtggggctcagggccttcgccacatgaggctgccccctcccccagtccagacctgcagaagcagtgctgtaatgaccaggacattttgaagaggcatcacaacgtagctaaggtcacccccacccgggaaaccccttcaatgcagaaaaccactgcaatctactgctgtggggcttagggaaggggctgtaaggcagagagactcccatgaatgcacccactgtgtttcttcagcacctagaacagcacctggcactcagcaggccctggctaagcaagtcttaaatgaatggatgaaggaatgaatggaaggaaagagtgtggttgtgtgtcttccatggggatttggctgtgatcgtctctcagccacataagtgcacttctgagcatatgtagcccaagggggaggtgcatgaatatgcctggagtgcagctttgcctgcacttacggtttgggacacctagaactgaggagatccaactcttgtccagccctcaaaactgggttgaggtgagcaaggaggcagctcagggacaaatttctactcccatctcatctctcttccttagaagcccttggagaccagctcttccaaagtcaaagccaagaccattgtgatgattcccgactcccagaagctcctgcgatgtgaacttgagtcactcaagagccagttacaggcccagaccaaggctttcgagttcctgaaccactcagtgaccatgttggagaaggagagctgcttgcagcaaatcaagattcagcagcttgaagaggtgctgagccccacaggccgccagggagagaaggaggagcacaagtggggcatggagcagggccggcaggagctgtatggggccctgacccaaggccttcaggggctggagaagaccctgcgtgacagtgaggagatgcagcgggcccgcaccactcgctgcctgcagctgctggcccaggagatccgggacagcaagaagttcctgtgggaggagctggaactggtgcgggaggaggtgaccttcatctatcagaagctccaagcgcaggaggatgagatctcagagaacttggtgaacattcagaaaatgcagaaaacgcaggtgaaatgccgcaaaatcctgaccaagatgaagcagcagggtcatgagacagccgcctgtccggagactgaagagataccgcagggagccagtggctgctggaaggatgacctccagaaggaactgagtgatatatggtctgctgtgcacgtgctgcagaactccatagacagcctcactttgtgctcgggggcctgtcccaaggcctcgagcctaagaggccacaaggggcaccagtgcctgagccctccactcccctcctgggactctgactccgactctgaccaggacctctcccagccacctttcagcaagagcggccgctccttcccacccggtgcagatcctccccagtccccccctccacccatttccctcctgacctgcccttgactcccacagtctagaccctcagaacaggcccagatcctgatctgggcatgcggtccctgacctgcagccccggagtcccctggacctggccaggccctgacccaccctctctctccacagcttgagcagccgggactgctctccctgaagacccctccagagagaaaataaactagcccagaccctcctctagccccgactgttagtcttgctgcttcctgtgcctaggaatccccctgccctcctagtttacccctcattgttgggggggaggggtgtagagaccccaggggtcattcgggatgtgtgggcttggaatcaggggacatctgaagccagatttaatatatgacaaggcaaggagtcattctgtccagacacgagcagccagacagacttccacactggccacagagccttcctttctggggggccctggcgaatggggaaactgaggcccagagagggagaggcgcggcccagggacatactctgaagcccctccctcctattaccctcggagccccgcccaccccagggtcctccctctctacttccattcttggttccttcctacaatcgatgctaacacgccccgcctccaagatcacggaggccccgcccca

SEQ ID NO: 278031 - DNA, 2874 bp, Homo sapiens
cgggtgtagatttcacaacccagggggcggagccaggatgatgaccccgccccctccctaaataattctcccgggagggacacggaagcagcaaccgggatgggacggggagagaggaggcactactggggacctaagctggttctcaaatgcctctccttttcccctccaagcctcccaggcttcctatggtccctaagtcccgggttctcagcgtgacattccagagcaaacacagctccccattactctataccaggcactggcatggattaatttatctaatcacaacatcccagtaagatatgccctgcctctcctgctcacactctatggctggcattcacctgtggggccaggtcgaaactcctggcttggccgtcaatgccttactggagctgctctgctaacctcctgctgcttcctctcggacctcgattcagccatcatgaatttaccagcatagagcatgtgattccacacctccaagcttttgcacatgctgctccctgccagcgaccctcttttggccggcctaccccgggaccctgactactctgtgtcctgcctctactcacctccctcaccctccagcatgtgtttgcctgctaacatgaagtgtgacaagtactggggctcttcctcggacaaggctctggaagcgtacagctcactggtccaggactccagagccagagaccttgggatgccctgcttctggggacacagtgaggactgcagactgcaggccagggtggggctcagggccttcgccacatgaggctgccccctcccccagtccagacctgcagaagcagtgctgtaatgaccaggacattttgaagaggcatcacaacgtagctaaggtcacccccacccgggaaaccccttcaatgcagaaaaccactgcaatctactgctgtggggcttagggaaggggctgtaaggcagagagactcccatgaatgcacccactgtgtttcttcagcacctagaacagcacctggcactcagcaggccctggctaagcaagtcttaaatgaatggatgaaggaatgaatggaaggaaagagtgtggttgtgtgtcttccatggggatttggctgtgatcgtctctcagccacataagtgcacttctgagcatatgtagcccaagggggaggtgcatgaatatgcctggagtgcagctttgcctgcacttacggtttgggacacctagaactgaggagatccaactcttgtccagccctcaaaactgggttgaggtgagcaaggaggcagctcagggacaaatttctactcccatctcatctctcttccttagaagcccttggagaccagctcttccaaagtcaaagccaagaccattgtgatgattcccgactcccagaagctcctgcgatgtgaacttgagtcactcaagagccagttacaggcccagaccaaggctttcgagttcctgaaccactcagtgaccatgttggagaaggagagctgcttgcagcaaatcaagattcagcagcttgaagaggtgctgagccccacaggccgccagggagagaaggaggagcacaagtggggcatggagcagggccggcaggagctgtatggggccctgacccaaggccttcaggggctggagaagaccctgcgtgacagtgaggagatgcagcgggcccgcaccactcgctgcctgcagctgctggcccaggagatccgggacagcaagaagttcctgtgggaggagctggaactggtgcgggaggaggtgaccttcatctatcagaagctccaagcgcaggaggatgagatctcagagaacttggtgaacattcagaaaatgcagaaaacgcaggtgaaatgccgcaaaatcctgaccaagatgaagcagcagggtcatgagacagccgcctgtccggagactgaagagataccgcagggagccagtggctgctggaaggatgacctccagaaggaactgagtgatatatggtctgctgtgcacgtgctgcagaactccatagacagcctcactttgtgctcgggggcctgtcccaaggcctcgagcctaagaggccacaaggggcaccagtgcctgagccctccactcccctcctgggactctgactccgactctgaccaggacctctcccagccacctttcagcaagagcggccgctccttcccacccggtgcagatcctccccagtccccccctccacccatttccctcctgacctgcccttgactcccacagtctagaccctcagaacaggcccagatcctgatctgggcatgcggtccctgacctgcagccccggagtcccctggacctggccaggccctgacccaccctctctctccacagcttgagcagccgggactgctctccctgaagacccctccagagagaaaataaactagcccagaccctcctctagccccgactgttagtcttgctgcttcctgtgcctaggaatccccctgccctcctagtttacccctcattgttgggggggaggggtgtagagaccccaggggtcattcgggatgtgtgggcttggaatcaggggacatctgaagccagatttaatatatgacaaggcaaggagtcattctgtccagacacgagcagccagacagacttccacactggccacagagccttcctttctggggggccctggcgaatggggaaactgaggcccagagagggagaggcgcggcccagggacatactctgaagcccctccctcctattaccctcggagccccgcccaccccagggtcctccctctctacttccattcttggttccttcctacaatcgatgctaacacgccccgcctccaagatcacggaggccccgcccca

SEQ ID NO: 278032 - DNA, 3143 bp, Homo sapiens
agcagctagcagggagatgctgggggatagacagggctgctggggactgttgtacaggctgtgcactgctcaagggtatccagagcccagctttgtatctaccaggaagaaggggctcccctcccctcccttcctcttccctcccctctcctttcctctcctctcctttcctttcctttttttttttttttttgagatggagtcttgctttgtcgccctggctggagtgcaatggcatgatctcggctcactgcaacctctgcctcctcggttcaagcaattctcctgcctcagcctcctgagtagctggaattacaggtgcacaccaccacgcctggctaatttttttgtatttttagtagagacggggtttcaccatgttggtcaggctggtcttgaactcctgacctcgtgatccgcccacctcggcctcccaaagtgttgggattacaggcgtgagccaccatgcctagcctttttttttccccccctggaaaaggtgtagccataggcgctgactgaggtcctgggaacaagtctccagagggcagtggcactcaaacccacgtacctggctggcctcccagaatgtgagctgagcccaagcatgctgtgaagccaagatgcagaggttgatgaaggcacagcccatggagatgtggaagtagaaggggaagagtttgctctgcactagtccgaagggatccagttctgacagccaagaccactcctctcataaaataataccggatattaggtgaagatcccgaaagccccgaggaaaccctaaatctcatcctgaggacaccgatcccaccaaagccccgaggaaacgccaaatctcatcccgaggacaccgatcccaccgttaggaaccgggacctcaatccgcagcacccggattccgagaacagaggcgtcggggccaaatgggctgaatctggtacctcactcccacgcccccgggtggacagcgaccctcctcggccgcgtcccctcgtgggtttcccccaaccaataattcgtcccgcctcccagctgagcccgaagccaatcgggtcgtagatctgcacctttctatcccgccctcctgggtattgactaatcgtagaaacccccctgggatcccgccccctccacgggcttttatccaattacgccgcggctactaagcgcagctgaagcgtgaaggcgccaatgaggccttcggctactccggcaggggcggaactaaaatgccggccacacccctctctgtgactcagtctctgagcgttttaatacgatggtgtccccgcgggatcaaacttcagcgtcacagctgaggactggcttcgtggtccctgatgggagagcatgaacaggtggtatgtgaagcccttggagaccagctcttccaaagtcaaagccaagaccattgtgatgattcccgactcccagaagctcctgcgatgtgaacttgagtcactcaagagccagttacaggcccagaccaaggctttcgagttcctgaaccactcagtgaccatgttggagaaggagagctgcttgcagcaaatcaagattcagcagcttgaagaggtgctgagccccacaggccgccagggagagaaggaggagcacaagtggggcatggagcagggccggcaggagctgtatggggccctgacccaaggccttcaggggctggagaagaccctgcgtgacagtgaggagatgcagcgggcccgcaccactcgctgcctgcagctgctggcccaggagatccgggacagcaagaagttcctgtgggaggagctggaactggtgcgggaggaggtgaccttcatctatcagaagctccaagcgcaggaggatgagatctcagagaacttggtgaacattcagaaaatgcagaaaacgcaggtgaaatgccgcaaaatcctgaccaagatgaagcagcagggtcatgagacagccgcctgtccggagactgaagagataccgcagggagccagtggctgctggaaggatgacctccagaaggaactgagtgatatatggtgatgcccagcctgcagtctgacccctgaccctcctctgaacccgttcccccaacgggatctggcagtgaccaccagaacctggagcccacctgagtccagacttccctcaccccctaggactcaccccaccacggcccccaaccttagctgtactgctgtctacaccctgagcagtgtggagtctcccagcgcccccagctccttgtcttcttgcaggtctgctgtgcacgtgctgcagaactccatagacagcctcactttgtgctcgggggcctgtcccaaggcctcgagcctaagaggccacaaggggcaccagtgcctgagccctccactcccctcctgggactctgactccgactctgaccaggacctctcccagccacctttcagcaagagcggccgctccttcccacccggtgcagatcctccccagtccccccctccacccatttccctcctgacctgcccttgactcccacagtctagaccctcagaacaggcccagatcctgatctgggcatgcggtccctgacctgcagccccggagtcccctggacctggccaggccctgacccaccctctctctccacagcttgagcagccgggactgctctccctgaagacccctccagagagaaaataaactagcccagaccctcctctagccccgactgttagtcttgctgcttcctgtgcctaggaatccccctgccctcctagtttacccctcattgttgggggggaggggtgtagagaccccaggggtcattcgggatgtgtgggcttggaatcaggggacatctgaagccagatttaatatatgacaaggcaaggagtcattctgtccagacacgagcagccagacagacttccacactggccacagagccttcctttctggggggccctggcgaatggggaaactgaggcccagagagggagaggcgcggcccagggacatactctgaagcccctccctcctattaccctcggagccccgcccaccccagggtcctccctctctacttccattcttggttccttcctacaatcgatgctaacacgccccgcctccaagatcacggaggccccgcccca

SEQ ID NO: 278033 - DNA, 3359 bp, Homo sapiens
agcagctagcagggagatgctgggggatagacagggctgctggggactgttgtacaggctgtgcactgctcaagggtatccagagcccagctttgtatctaccaggaagaaggggctcccctcccctcccttcctcttccctcccctctcctttcctctcctctcctttcctttcctttttttttttttttttgagatggagtcttgctttgtcgccctggctggagtgcaatggcatgatctcggctcactgcaacctctgcctcctcggttcaagcaattctcctgcctcagcctcctgagtagctggaattacaggtgcacaccaccacgcctggctaatttttttgtatttttagtagagacggggtttcaccatgttggtcaggctggtcttgaactcctgacctcgtgatccgcccacctcggcctcccaaagtgttgggattacaggcgtgagccaccatgcctagcctttttttttccccccctggaaaaggtgtagccataggcgctgactgaggtcctgggaacaagtctccagagggcagtggcactcaaacccacgtacctggctggcctcccagaatgtgagctgagcccaagcatgctgtgaagccaagatgcagaggttgatgaaggcacagcccatggagatgtggaagtagaaggggaagagtttgctctgcactagtccgaagggatccagttctgacagccaagaccactcctctcataaaataataccggatattaggtgaagatcccgaaagccccgaggaaaccctaaatctcatcctgaggacaccgatcccaccaaagccccgaggaaacgccaaatctcatcccgaggacaccgatcccaccgttaggaaccgggacctcaatccgcagcacccggattccgagaacagaggcgtcggggccaaatgggctgaatctggtacctcactcccacgcccccgggtggacagcgaccctcctcggccgcgtcccctcgtgggtttcccccaaccaataattcgtcccgcctcccagctgagcccgaagccaatcgggtcgtagatctgcacctttctatcccgccctcctgggtattgactaatcgtagaaacccccctgggatcccgccccctccacgggcttttatccaattacgccgcggctactaagcgcagctgaagcgtgaaggcgccaatgaggccttcggctactccggcaggggcggaactaaaatgccggccacacccctctctgtgactcagtctctgagcgttttaatacgatggtgtccccgcgggatcaaacttcagcgtcacagctgaggactggcttcgtggtccctgatgggagagcatgaacaggtggtatgtggctcttcctcggacaaggctctggaagcgtacagctcactggtccaggactccagagccagagaccttgggatgccctgcttctggggacacagtgaggactgcagactgcaggccagggtggggctcagggccttcgccacatgaggctgccccctcccccagtccagacctgcagaagcagtgctgtaatgaccaggacattttgaagaggcatcacaacgtagctaaggtcacccccacccgggaaaccccttcaatgcagaaaaccactgcaatctactgctgtggggcttagggaaggggctgtaaggcagagagactcccatgaatgcacccactgtgtttcttcagcacctagaacagcacctggcactcagcaggccctggctaagcaagtcttaaatgaatggatgaaggaatgaatggaaggaaagagtgtggttgtgtgtcttccatggggatttggctgtgatcgtctctcagccacataagtgcacttctgagcatatgtagcccaagggggaggtgcatgaatatgcctggagtgcagctttgcctgcacttacggtttgggacacctagaactgaggagatccaactcttgtccagccctcaaaactgggttgaggtgagcaaggaggcagctcagggacaaatttctactcccatctcatctctcttccttagaagcccttggagaccagctcttccaaagtcaaagccaagaccattgtgatgattcccgactcccagaagctcctgcgatgtgaacttgagtcactcaagagccagttacaggcccagaccaaggctttcgagttcctgaaccactcagtgaccatgttggagaaggagactggaactggtgcgggaggaggtgaccttcatctatcagaagctccaagcgcaggaggatgagatctcagagaacttggtgaacattcagaaaatgcagaaaacgcaggtgaaatgccgcaaaatcctgaccaagatgaagcagcagggtcatgagacagccgcctgtccggagactgaagagataccgcagggagccagtggctgctggaaggatgacctccagaaggaactgagtgatatatggtctgctgtgcacgtgctgcagaactccatagacagcctcactttgtgctcgggggcctgtcccaaggcctcgagcctaagaggccacaaggggcaccagtgcctgagccctccactcccctcctgggactctgactccgactctgaccaggacctctcccagccacctttcagcaagagcggccgctccttcccacccggtgcagatcctccccagtccccccctccacccatttccctcctgacctgcccttgactcccacagtctagaccctcagaacaggcccagatcctgatctgggcatgcggtccctgacctgcagccccggagtcccctggacctggccaggccctgacccaccctctctctccacagcttgagcagccgggactgctctccctgaagacccctccagagagaaaataaactagcccagaccctcctctagccccgactgttagtcttgctgcttcctgtgcctaggaatccccctgccctcctagtttacccctcattgttgggggggaggggtgtagagaccccaggggtcattcgggatgtgtgggcttggaatcaggggacatctgaagccagatttaatatatgacaaggcaaggagtcattctgtccagacacgagcagccagacagacttccacactggccacagagccttcctttctggggggccctggcgaatggggaaactgaggcccagagagggagaggcgcggcccagggacatactctgaagcccctccctcctattaccctcggagccccgcccaccccagggtcctccctctctacttccattcttggttccttcctacaatcgatgctaacacgccccgcctccaagatcacggaggccccgcccca

SEQ ID NO: 278034 - DNA, 2748 bp, Homo sapiens
agcagctagcagggagatgctgggggatagacagggctgctggggactgttgtacaggctgtgcactgctcaagggtatccagagcccagctttgtatctaccaggaagaaggggctcccctcccctcccttcctcttccctcccctctcctttcctctcctctcctttcctttcctttttttttttttttttgagatggagtcttgctttgtcgccctggctggagtgcaatggcatgatctcggctcactgcaacctctgcctcctcggttcaagcaattctcctgcctcagcctcctgagtagctggaattacaggtgcacaccaccacgcctggctaatttttttgtatttttagtagagacggggtttcaccatgttggtcaggctggtcttgaactcctgacctcgtgatccgcccacctcggcctcccaaagtgttgggattacaggcgtgagccaccatgcctagcctttttttttccccccctggaaaaggtgtagccataggcgctgactgaggtcctgggaacaagtctccagagggcagtggcactcaaacccacgtacctggctggcctcccagaatgtgagctgagcccaagcatgctgtgaagccaagatgcagaggttgatgaaggcacagcccatggagatgtggaagtagaaggggaagagtttgctctgcactagtccgaagggatccagttctgacagccaagaccactcctctcataaaataataccggatattaggtgaagatcccgaaagccccgaggaaaccctaaatctcatcctgaggacaccgatcccaccaaagccccgaggaaacgccaaatctcatcccgaggacaccgatcccaccgttaggaaccgggacctcaatccgcagcacccggattccgagaacagaggcgtcggggccaaatgggctgaatctggtacctcactcccacgcccccgggtggacagcgaccctcctcggccgcgtcccctcgtgggtttcccccaaccaataattcgtcccgcctcccagctgagcccgaagccaatcgggtcgtagatctgcacctttctatcccgccctcctgggtattgactaatcgtagaaacccccctgggatcccgccccctccacgggcttttatccaattacgccgcggctactaagcgcagctgaagcgtgaaggcgccaatgaggccttcggctactccggcaggggcggaactaaaatgccggccacacccctctctgtgactcagtctctgagcgttttaatacgatggtgtccccgcgggatcaaacttcagcgtcacagctgaggactggcttcgtggtccctgatgggagagcatgaacaggtggtatgtgaagcccttggagaccagctcttccaaagtcaaagccaagaccattgtgatgattcccgactcccagaagctcctgcgatgtgaacttgagtcactcaagagccagttacaggcccagaccaaggctttcgagttcctgaaccactcagtgaccatgttggagaaggagagctgcttgcagcaaatcaagattcagcagcttgaagaggtgctgagccccacaggccgccagggagagaaggaggagcacaagtggggcatggagcagggccggcaggagctgtatggggccctgacccaaggccttcaggggctggagaagaccctgcgtgacagtgaggagatgcagcgggcccgcaccactcgctgcctgcagctgctggcccaggagatccgggacagcaagaagttcctgtgggaggagctggaactggtgcgggaggaggtgaccttcatctatcagaagctccaagcgcaggaggatgagatctcagagaacttggtgaacattcagaaaatgcagaaaacgcaggtgaaatgccgcaaaggcctgtcccaaggcctcgagcctaagaggccacaaggggcaccagtgcctgagccctccactcccctcctgggactctgactccgactctgaccaggacctctcccagccacctttcagcaagagcggccgctccttcccacccggtgcagatcctccccagtccccccctccacccatttccctcctgacctgcccttgactcccacagtctagaccctcagaacaggcccagatcctgatctgggcatgcggtccctgacctgcagccccggagtcccctggacctggccaggccctgacccaccctctctctccacagcttgagcagccgggactgctctccctgaagacccctccagagagaaaataaactagcccagaccctcctctagccccgactgttagtcttgctgcttcctgtgcctaggaatccccctgccctcctagtttacccctcattgttgggggggaggggtgtagagaccccaggggtcattcgggatgtgtgggcttggaatcaggggacatctgaagccagatttaatatatgacaaggcaaggagtcattctgtccagacacgagcagccagacagacttccacactggccacagagccttcctttctggggggccctggcgaatggggaaactgaggcccagagagggagaggcgcggcccagggacatactctgaagcccctccctcctattaccctcggagccccgcccaccccagggtcctccctctctacttccattcttggttccttcctacaatcgatgctaacacgccccgcctccaagatcacggaggccccgcccca

SEQ ID NO: 278035 - DNA, 2308 bp, Homo sapiens
agcagctagcagggagatgctgggggatagacagggctgctggggactgttgtacaggctgtgcactgctcaagggtatccagagcccagctttgtatctaccaggaagaaggggctcccctcccctcccttcctcttccctcccctctcctttcctctcctctcctttcctttcctttttttttttttttttgagatggagtcttgctttgtcgccctggctggagtgcaatggcatgatctcggctcactgcaacctctgcctcctcggttcaagcaattctcctgcctcagcctcctgagtagctggaattacaggtgcacaccaccacgcctggctaatttttttgtatttttagtagagacggggtttcaccatgttggtcaggctggtcttgaactcctgacctcgtgatccgcccacctcggcctcccaaagtgttgggattacaggcgtgagccaccatgcctagcctttttttttccccccctggaaaaggtgtagccataggcgctgactgaggtcctgggaacaagtctccagagggcagtggcactcaaacccacgtacctggctggcctcccagaatgtgagctgagcccaagcatgctgtgaagccaagatgcagaggttgatgaaggcacagcccatggagatgtggaagtagaaggggaagagtttgctctgcactagtccgaagggatccagttctgacagccaagaccactcctctcataaaataataccggatattaggtgaagatcccgaaagccccgaggaaaccctaaatctcatcctgaggacaccgatcccaccaaagccccgaggaaacgccaaatctcatcccgaggacaccgatcccaccgttaggaaccgggacctcaatccgcagcacccggattccgagaacagaggcgtcggggccaaatgggctgaatctggtacctcactcccacgcccccgggtggacagcgaccctcctcggccgcgtcccctcgtgggtttcccccaaccaataattcgtcccgcctcccagctgagcccgaagccaatcgggtcgtagatctgcacctttctatcccgccctcctgggtattgactaatcgtagaaacccccctgggatcccgccccctccacgggcttttatccaattacgccgcggctactaagcgcagctgaagcgtgaaggcgccaatgaggccttcggctactccggcaggggcggaactaaaatgccggccacacccctctctgtgactcagtctctgagcgttttaatacgatggtgtccccgcgggatcaaacttcagcgtcacagctgaggactggcttcgtggtccctgatgggagagcatgaacaggtggtatgtgaagcccttggagaccagctcttccaaagtcaaagccaagaccattgtgatgattcccgactcccagaagctcctgcgatgtgaacttgagtcactcaagagccagttacaggcccagaccaaggctttcgagttcctgaaccactcagtgaccatgttggagaaggagagctgcttgcagcaaatcaagattcagcagcttgaagaggtgctgagccccacaggccgccagggagagaaggaggagcacaagtggggcatggagcagggccggcaggagctgtatggggccctgacccaaggccttcaggggctggagaagaccctgcgtgacagtgaggagatgcagcgggcccgcaccactcgctgcctgcagctgctggcccaggagatccgggacagatcctgaccaagatgaagcagcagggtcatgagacagccgcctgtccggagactgaagagataccgcagggagccagtggctgctggaaggatgacctccagaaggaactgagtgatatatggtgatgcccagcctgcagtctgacccctgaccctcctctgaacccgttcccccaacgggatctggcagtgaccaccagaacctggagcccacctgagtccagacttccctcaccccctaggactcaccccaccacggcccccaaccttagctgtactgctgtctacaccctgagcagtgtggagtctcccagcgcccccagctccttgtcttcttgcaggtctgctgtgcacgtgctgcagaactccatagacagcctcactttgtgctcgggggcctgtcccaaggcctcgagcctaagagccacaggggcaccatgcctgacccttcactccctccggggctttgattccaatgtgaccagaaccttcccagccccttttagcagagcgggcgttcttcccacccgttg

SEQ ID NO: 278036 - DNA, 2440 bp, Homo sapiens
agcagctagcagggagatgctgggggatagacagggctgctggggactgttgtacaggctgtgcactgctcaagggtatccagagcccagctttgtatctaccaggaagaaggggctcccctcccctcccttcctcttccctcccctctcctttcctctcctctcctttcctttcctttttttttttttttttgagatggagtcttgctttgtcgccctggctggagtgcaatggcatgatctcggctcactgcaacctctgcctcctcggttcaagcaattctcctgcctcagcctcctgagtagctggaattacaggtgcacaccaccacgcctggctaatttttttgtatttttagtagagacggggtttcaccatgttggtcaggctggtcttgaactcctgacctcgtgatccgcccacctcggcctcccaaagtgttgggattacaggcgtgagccaccatgcctagcctttttttttccccccctggaaaaggtgtagccataggcgctgactgaggtcctgggaacaagtctccagagggcagtggcactcaaacccacgtacctggctggcctcccagaatgtgagctgagcccaagcatgctgtgaagccaagatgcagaggttgatgaaggcacagcccatggagatgtggaagtagaaggggaagagtttgctctgcactagtccgaagggatccagttctgacagccaagaccactcctctcataaaataataccggatattaggtgaagatcccgaaagccccgaggaaaccctaaatctcatcctgaggacaccgatcccaccaaagccccgaggaaacgccaaatctcatcccgaggacaccgatcccaccgttaggaaccgggacctcaatccgcagcacccggattccgagaacagaggcgtcggggccaaatgggctgaatctggtacctcactcccacgcccccgggtggacagcgaccctcctcggccgcgtcccctcgtgggtttcccccaaccaataattcgtcccgcctcccagctgagcccgaagccaatcgggtcgtagatctgcacctttctatcccgccctcctgggtattgactaatcgtagaaacccccctgggatcccgccccctccacgggcttttatccaattacgccgcggctactaagcgcagctgaagcgtgaaggcgccaatgaggccttcggctactccggcaggggcggaactaaaatgccggccacacccctctctgtgactcagtctctgagcgttttaatacgatggtgtccccgcgggatcaaacttcagcgtcacagctgaggactggcttcgtggtccctgatgggagagcatgaacaggtggtatgtgaagcccttggagaccagctcttccaaagtcaaagccaagaccattgtgatgattcccgactcccagaagctcctgcgatgtgaacttgagtcactcaagagccagttacaggcccagaccaaggctttcgagttcctgaaccactcaggaaggatgacctccagaaggaactgagtgatatatggtctgctgtgcacgtgctgcagaactccatagacagcctcactttgtgctcgggggcctgtcccaaggcctcgagcctaagaggccacaaggggcaccagtgcctgagccctccactcccctcctgggactctgactccgactctgaccaggacctctcccagccacctttcagcaagagcggccgctccttcccacccggtgcagatcctccccagtccccccctccacccatttccctcctgacctgcccttgactcccacagtctagaccctcagaacaggcccagatcctgatctgggcatgcggtccctgacctgcagccccggagtcccctggacctggccaggccctgacccaccctctctctccacagcttgagcagccgggactgctctccctgaagacccctccagagagaaaataaactagcccagaccctcctctagccccgactgttagtcttgctgcttcctgtgcctaggaatccccctgccctcctagtttacccctcattgttgggggggaggggtgtagagaccccaggggtcattcgggatgtgtgggcttggaatcaggggacatctgaagccagatttaatatatgacaaggcaaggagtcattctgtccagacacgagcagccagacagacttccacactggccacagagccttcctttctggggggccctggcgaatggggaaactgaggcccagagagggagaggcgcggcccagggacatactctgaagcccctccctcctattaccctcggagccccgcccaccccagggtcctccctctctacttccattcttggttccttcctacaatcgatgctaacacgccccgcctccaagatcacggaggccccgcccca

SEQ ID NO: 278037 - DNA, 2397 bp, Homo sapiens
agcagctagcagggagatgctgggggatagacagggctgctggggactgttgtacaggctgtgcactgctcaagggtatccagagcccagctttgtatctaccaggaagaaggggctcccctcccctcccttcctcttccctcccctctcctttcctctcctctcctttcctttcctttttttttttttttttgagatggagtcttgctttgtcgccctggctggagtgcaatggcatgatctcggctcactgcaacctctgcctcctcggttcaagcaattctcctgcctcagcctcctgagtagctggaattacaggtgcacaccaccacgcctggctaatttttttgtatttttagtagagacggggtttcaccatgttggtcaggctggtcttgaactcctgacctcgtgatccgcccacctcggcctcccaaagtgttgggattacaggcgtgagccaccatgcctagcctttttttttccccccctggaaaaggtgtagccataggcgctgactgaggtcctgggaacaagtctccagagggcagtggcactcaaacccacgtacctggctggcctcccagaatgtgagctgagcccaagcatgctgtgaagccaagatgcagaggttgatgaaggcacagcccatggagatgtggaagtagaaggggaagagtttgctctgcactagtccgaagggatccagttctgacagccaagaccactcctctcataaaataataccggatattaggtgaagatcccgaaagccccgaggaaaccctaaatctcatcctgaggacaccgatcccaccaaagccccgaggaaacgccaaatctcatcccgaggacaccgatcccaccgttaggaaccgggacctcaatccgcagcacccggattccgagaacagaggcgtcggggccaaatgggctgaatctggtacctcactcccacgcccccgggtggacagcgaccctcctcggccgcgtcccctcgtgggtttcccccaaccaataattcgtcccgcctcccagctgagcccgaagccaatcgggtcgtagatctgcacctttctatcccgccctcctgggtattgactaatcgtagaaacccccctgggatcccgccccctccacgggcttttatccaattacgccgcggctactaagcgcagctgaagcgtgaaggcgccaatgaggccttcggctactccggcaggggcggaactaaaatgccggccacacccctctctgtgactcagtctctgagcgttttaatacgatggtgtccccgcgggatcaaacttcagcgtcacagctgaggactggcttcgtggtccctgatgggagagcatgaacaggtggtatgtgaagcccttggagaccagctcttccaaagtcaaagccaagaccattgtgatgattcccgactcccagaagctcctgcgatgtgaacttgagtcactcaagagccaggaaggatgacctccagaaggaactgagtgatatatggtctgctgtgcacgtgctgcagaactccatagacagcctcactttgtgctcgggggcctgtcccaaggcctcgagcctaagaggccacaaggggcaccagtgcctgagccctccactcccctcctgggactctgactccgactctgaccaggacctctcccagccacctttcagcaagagcggccgctccttcccacccggtgcagatcctccccagtccccccctccacccatttccctcctgacctgcccttgactcccacagtctagaccctcagaacaggcccagatcctgatctgggcatgcggtccctgacctgcagccccggagtcccctggacctggccaggccctgacccaccctctctctccacagcttgagcagccgggactgctctccctgaagacccctccagagagaaaataaactagcccagaccctcctctagccccgactgttagtcttgctgcttcctgtgcctaggaatccccctgccctcctagtttacccctcattgttgggggggaggggtgtagagaccccaggggtcattcgggatgtgtgggcttggaatcaggggacatctgaagccagatttaatatatgacaaggcaaggagtcattctgtccagacacgagcagccagacagacttccacactggccacagagccttcctttctggggggccctggcgaatggggaaactgaggcccagagagggagaggcgcggcccagggacatactctgaagcccctccctcctattaccctcggagccccgcccaccccagggtcctccctctctacttccattcttggttccttcctacaatcgatgctaacacgccccgcctccaagatcacggaggccccgcccca

SEQ ID NO: 278038 - DNA, 2924 bp, Homo sapiens
agcagctagcagggagatgctgggggatagacagggctgctggggactgttgtacaggctgtgcactgctcaagggtatccagagcccagctttgtatctaccaggaagaaggggctcccctcccctcccttcctcttccctcccctctcctttcctctcctctcctttcctttcctttttttttttttttttgagatggagtcttgctttgtcgccctggctggagtgcaatggcatgatctcggctcactgcaacctctgcctcctcggttcaagcaattctcctgcctcagcctcctgagtagctggaattacaggtgcacaccaccacgcctggctaatttttttgtatttttagtagagacggggtttcaccatgttggtcaggctggtcttgaactcctgacctcgtgatccgcccacctcggcctcccaaagtgttgggattacaggcgtgagccaccatgcctagcctttttttttccccccctggaaaaggtgtagccataggcgctgactgaggtcctgggaacaagtctccagagggcagtggcactcaaacccacgtacctggctggcctcccagaatgtgagctgagcccaagcatgctgtgaagccaagatgcagaggttgatgaaggcacagcccatggagatgtggaagtagaaggggaagagtttgctctgcactagtccgaagggatccagttctgacagccaagaccactcctctcataaaataataccggatattaggtgaagatcccgaaagccccgaggaaaccctaaatctcatcctgaggacaccgatcccaccaaagccccgaggaaacgccaaatctcatcccgaggacaccgatcccaccgttaggaaccgggacctcaatccgcagcacccggattccgagaacagaggcgtcggggccaaatgggctgaatctggtacctcactcccacgcccccgggtggacagcgaccctcctcggccgcgtcccctcgtgggtttcccccaaccaataattcgtcccgcctcccagctgagcccgaagccaatcgggtcgtagatctgcacctttctatcccgccctcctgggtattgactaatcgtagaaacccccctgggatcccgccccctccacgggcttttatccaattacgccgcggctactaagcgcagctgaagcgtgaaggcgccaatgaggccttcggctactccggcaggggcggaactaaaatgccggccacacccctctctgtgactcagtctctgagcgttttaatacgatggtgtccccgcgggatcaaacttcagcgtcacagctgaggactggcttcgtggtccctgatgggagagcatgaacaggtggtatgtgaagcccttggagaccagctcttccaaagtcaaagccaagaccattgtgatgattcccgactcccagaagctcctgcgatgtgaacttgagtcactcaagagccagttacaggcccagaccaaggctttcgagttcctgaaccactcagtgaccatgttggagaaggagagctgcttgcagcaaatcaagattcagcagcttgaagaggtgctgagccccacaggccgccagggagagaaggaggagcacaagtggggcatggagcagggccggcaggagctgtatggggccctgacccaaggccttcaggggctggagaagaccctgcgtgacagtgaggagatgcagcgggcccgcaccactcgctgcctgcagctgctggcccaggagatccgggacagcaagaagttcctgtgggaggagctggaactggtgcgggaggaggtgaccttcatctatcagaagctccaagcgcaggaggatgagatctcagagaacttggtgaacattcagaaaatgcagaaaacgcaggtgaaatgccgcaaaatcctgaccaagatgaagcagcagggtcatgagacagccgcctgtccggagactgaagagataccgcagggagccagtggctgctggaaggatgacctccagaaggaactgagtgatatatggtctgctgtgcacgtgctgcagaactccatagacagcctcactttgtgctcgggggcctgtcccaaggcctcgagcctaagaggccacaaggggcaccagtgcctgagccctccactcccctcctgggactctgactccgactctgaccaggacctctcccagccacctttcagcaagagcggccgctccttcccacccggtgcagatcctccccagtccccccctccacccatttccctcctgacctgcccttgactcccacagtctagaccctcagaacaggcccagatcctgatctgggcatgcggtccctgacctgcagccccggagtcccctggacctggccaggccctgacccaccctctctctccacagcttgagcagccgggactgctctccctgaagacccctccagagagaaaataaactagcccagaccctcctctagccccgactgttagtcttgctgcttcctgtgcctaggaatccccctgccctcctagtttacccctcattgttgggggggaggggtgtagagaccccaggggtcattcgggatgtgtgggcttggaatcaggggacatctgaagccagatttaatatatgacaaggcaaggagtcattctgtccagacacgagcagccagacagacttccacactggccacagagccttcctttctggggggccctggcgaatggggaaactgaggcccagagagggagaggcgcggcccagggacatactctgaagcccctccctcctattaccctcggagccccgcccaccccagggtcctccctctctacttccattcttggttccttcctacaatcgatgctaacacgccccgcctccaagatcacggaggccccgcccca

SEQ ID NO: 278039 - DNA, 2998 bp, Homo sapiens
agcagctagcagggagatgctgggggatagacagggctgctggggactgttgtacaggctgtgcactgctcaagggtatccagagcccagctttgtatctaccaggaagaaggggctcccctcccctcccttcctcttccctcccctctcctttcctctcctctcctttcctttcctttttttttttttttttgagatggagtcttgctttgtcgccctggctggagtgcaatggcatgatctcggctcactgcaacctctgcctcctcggttcaagcaattctcctgcctcagcctcctgagtagctggaattacaggtgcacaccaccacgcctggctaatttttttgtatttttagtagagacggggtttcaccatgttggtcaggctggtcttgaactcctgacctcgtgatccgcccacctcggcctcccaaagtgttgggattacaggcgtgagccaccatgcctagcctttttttttccccccctggaaaaggtgtagccataggcgctgactgaggtcctgggaacaagtctccagagggcagtggcactcaaacccacgtacctggctggcctcccagaatgtgagctgagcccaagcatgctgtgaagccaagatgcagaggttgatgaaggcacagcccatggagatgtggaagtagaaggggaagagtttgctctgcactagtccgaagggatccagttctgacagccaagaccactcctctcataaaataataccggatattaggtgaagatcccgaaagccccgaggaaaccctaaatctcatcctgaggacaccgatcccaccaaagccccgaggaaacgccaaatctcatcccgaggacaccgatcccaccgttaggaaccgggacctcaatccgcagcacccggattccgagaacagaggcgtcggggccaaatgggctgaatctggtacctcactcccacgcccccgggtggacagcgaccctcctcggccgcgtcccctcgtgggtttcccccaaccaataattcgtcccgcctcccagctgagcccgaagccaatcgggtcgtagatctgcacctttctatcccgccctcctgggtattgactaatcgtagaaacccccctgggatcccgccccctccacgggcttttatccaattacgccgcggctactaagcgcagctgaagcgtgaaggcgccaatgaggccttcggctactccggcaggggcggaactaaaatgccggccacacccctctctgtgactcagtctctgagcgttttaatacgatggtgtccccgcgggatcaaacttcagcgtcacagctgaggactggcttcgtggtccctgatgggagagcatgaacaggtggtatgtgaagcccttggagaccagctcttccaaagtcaaagccaagaccattgtgatgattcccgactcccagaagctcctgcgatgtgaacttgagtcactcaagagccagttacaggcccagaccaaggctttcgagttcctgaaccactcagtgaccatgttggagaaggagagctgcttgcagcaaatcaagattcagcagcttgaagaggtgctgagccccacaggccgccagggagagaaggaggagcacaagtggggcatggagcagggccggcaggagctgtatggggccctgacccaaggccttcaggggctggagaagaccctgcgtgacagtgaggagatgcagcgggcccgcaccactcgctgcctgcagctgctggcccaggagatccgggacagatcctgaccaagatgaagcagcagggtcatgagacagccgcctgtccggagactgaagagataccgcagggagccagtggctgctggaaggatgacctccagaaggaactgagtgatatatggtgatgcccagcctgcagtctgacccctgaccctcctctgaacccgttcccccaacgggatctggcagtgaccaccagaacctggagcccacctgagtccagacttccctcaccccctaggactcaccccaccacggcccccaaccttagctgtactgctgtctacaccctgagcagtgtggagtctcccagcgcccccagctccttgtcttcttgcaggtctgctgtgcacgtgctgcagaactccatagacagcctcactttgtgctcgggggcctgtcccaaggcctcgagcctaagaggccacaaggggcaccagtgcctgagccctccactcccctcctgggactctgactccgactctgaccaggacctctcccagccacctttcagcaagagcggccgctccttcccacccggtgcagatcctccccagtccccccctccacccatttccctcctgacctgcccttgactcccacagtctagaccctcagaacaggcccagatcctgatctgggcatgcggtccctgacctgcagccccggagtcccctggacctggccaggccctgacccaccctctctctccacagcttgagcagccgggactgctctccctgaagacccctccagagagaaaataaactagcccagaccctcctctagccccgactgttagtcttgctgcttcctgtgcctaggaatccccctgccctcctagtttacccctcattgttgggggggaggggtgtagagaccccaggggtcattcgggatgtgtgggcttggaatcaggggacatctgaagccagatttaatatatgacaaggcaaggagtcattctgtccagacacgagcagccagacagacttccacactggccacagagccttcctttctggggggccctggcgaatggggaaactgaggcccagagagggagaggcgcggcccagggacatactctgaagcccctccctcctattaccctcggagccccgcccaccccagggtcctccctctctacttccattcttggttccttcctacaatcgatgctaacacgccccgcctccaagatcacggaggccccgcccca

SEQ ID NO: 278040 - DNA, 3349 bp, Homo sapiens
agcagctagcagggagatgctgggggatagacagggctgctggggactgttgtacaggctgtgcactgctcaagggtatccagagcccagctttgtatctaccaggaagaaggggctcccctcccctcccttcctcttccctcccctctcctttcctctcctctcctttcctttcctttttttttttttttttgagatggagtcttgctttgtcgccctggctggagtgcaatggcatgatctcggctcactgcaacctctgcctcctcggttcaagcaattctcctgcctcagcctcctgagtagctggaattacaggtgcacaccaccacgcctggctaatttttttgtatttttagtagagacggggtttcaccatgttggtcaggctggtcttgaactcctgacctcgtgatccgcccacctcggcctcccaaagtgttgggattacaggcgtgagccaccatgcctagcctttttttttccccccctggaaaaggtgtagccataggcgctgactgaggtcctgggaacaagtctccagagggcagtggcactcaaacccacgtacctggctggcctcccagaatgtgagctgagcccaagcatgctgtgaagccaagatgcagaggttgatgaaggcacagcccatggagatgtggaagtagaaggggaagagtttgctctgcactagtccgaagggatccagttctgacagccaagaccactcctctcataaaataataccggatattaggtgaagatcccgaaagccccgaggaaaccctaaatctcatcctgaggacaccgatcccaccaaagccccgaggaaacgccaaatctcatcccgaggacaccgatcccaccgttaggaaccgggacctcaatccgcagcacccggattccgagaacagaggcgtcggggccaaatgggctgaatctggtacctcactcccacgcccccgggtggacagcgaccctcctcggccgcgtcccctcgtgggtttcccccaaccaataattcgtcccgcctcccagctgagcccgaagccaatcgggtcgtagatctgcacctttctatcccgccctcctgggtattgactaatcgtagaaacccccctgggatcccgccccctccacgggcttttatccaattacgccgcggctactaagcgcagctgaagcgtgaaggcgccaatgaggccttcggctactccggcaggggcggaactaaaatgccggccacacccctctctgtgactcagtctctgagcgttttaatacgatggtgtccccgcgggatcaaacttcagcgtcacagctgaggactggcttcgtggtccctgatgggagagcatgaacaggtggtatgtggctcttcctcggacaaggctctggaagcgtacagctcactggtccaggactccagagccagagaccttgggatgccctgcttctggggacacagtgaggactgcagactgcaggccagggtggggctcagggccttcgccacatgaggctgccccctcccccagtccagacctgcagaagcagtgctgtaatgaccaggacattttgaagaggcatcacaacgtagctaaggtcacccccacccgggaaaccccttcaatgcagaaaaccactgcaatctactgctgtggggcttagggaaggggctgtaaggcagagagactcccatgaatgcacccactgtgtttcttcagcacctagaacagcacctggcactcagcaggccctggctaagcaagtcttaaatgaatggatgaaggaatgaatggaaggaaagagtgtggttgtgtgtcttccatggggatttggctgtgatcgtctctcagccacataagtgcacttctgagcatatgtagcccaagggggaggtgcatgaatatgcctggagtgcagctttgcctgcacttacggtttgggacacctagaactgaggagatccaactcttgtccagccctcaaaactgggttgaggtgagcaaggaggcagctcagggacaaatttctactcccatctcatctctcttccttagaagcccttggagaccagctcttccaaagtcaaagccaagaccattgtgatgattcccgactcccagaagctcctgcgatgtgaacttgagtcactcaagagccagttacaggcccagaccaaggctttcgagttcctgaaccactcagtgaccatgttggagaaggagagctgcttgcagcaaatcaagattcagcagcttgaagaagcgcaggaggatgagatctcagagaacttggtgaacattcagaaaatgcagaaaacgcaggtgaaatgccgcaaaatcctgaccaagatgaagcagcagggtcatgagacagccgcctgtccggagactgaagagataccgcagggagccagtggctgctggaaggatgacctccagaaggaactgagtgatatatggtctgctgtgcacgtgctgcagaactccatagacagcctcactttgtgctcgggggcctgtcccaaggcctcgagcctaagaggccacaaggggcaccagtgcctgagccctccactcccctcctgggactctgactccgactctgaccaggacctctcccagccacctttcagcaagagcggccgctccttcccacccggtgcagatcctccccagtccccccctccacccatttccctcctgacctgcccttgactcccacagtctagaccctcagaacaggcccagatcctgatctgggcatgcggtccctgacctgcagccccggagtcccctggacctggccaggccctgacccaccctctctctccacagcttgagcagccgggactgctctccctgaagacccctccagagagaaaataaactagcccagaccctcctctagccccgactgttagtcttgctgcttcctgtgcctaggaatccccctgccctcctagtttacccctcattgttgggggggaggggtgtagagaccccaggggtcattcgggatgtgtgggcttggaatcaggggacatctgaagccagatttaatatatgacaaggcaaggagtcattctgtccagacacgagcagccagacagacttccacactggccacagagccttcctttctggggggccctggcgaatggggaaactgaggcccagagagggagaggcgcggcccagggacatactctgaagcccctccctcctattaccctcggagccccgcccaccccagggtcctccctctctacttccattcttggttccttcctacaatcgatgctaacacgccccgcctccaagatcacggaggccccgcccca

SEQ ID NO: 278041 - DNA, 2632 bp, Homo sapiens
agcagctagcagggagatgctgggggatagacagggctgctggggactgttgtacaggctgtgcactgctcaagggtatccagagcccagctttgtatctaccaggaagaaggggctcccctcccctcccttcctcttccctcccctctcctttcctctcctctcctttcctttcctttttttttttttttttgagatggagtcttgctttgtcgccctggctggagtgcaatggcatgatctcggctcactgcaacctctgcctcctcggttcaagcaattctcctgcctcagcctcctgagtagctggaattacaggtgcacaccaccacgcctggctaatttttttgtatttttagtagagacggggtttcaccatgttggtcaggctggtcttgaactcctgacctcgtgatccgcccacctcggcctcccaaagtgttgggattacaggcgtgagccaccatgcctagcctttttttttccccccctggaaaaggtgtagccataggcgctgactgaggtcctgggaacaagtctccagagggcagtggcactcaaacccacgtacctggctggcctcccagaatgtgagctgagcccaagcatgctgtgaagccaagatgcagaggttgatgaaggcacagcccatggagatgtggaagtagaaggggaagagtttgctctgcactagtccgaagggatccagttctgacagccaagaccactcctctcataaaataataccggatattaggtgaagatcccgaaagccccgaggaaaccctaaatctcatcctgaggacaccgatcccaccaaagccccgaggaaacgccaaatctcatcccgaggacaccgatcccaccgttaggaaccgggacctcaatccgcagcacccggattccgagaacagaggcgtcggggccaaatgggctgaatctggtacctcactcccacgcccccgggtggacagcgaccctcctcggccgcgtcccctcgtgggtttcccccaaccaataattcgtcccgcctcccagctgagcccgaagccaatcgggtcgtagatctgcacctttctatcccgccctcctgggtattgactaatcgtagaaacccccctgggatcccgccccctccacgggcttttatccaattacgccgcggctactaagcgcagctgaagcgtgaaggcgccaatgaggccttcggctactccggcaggggcggaactaaaatgccggccacacccctctctgtgactcagtctctgagcgttttaatacgatggtgtccccgcgggatcaaacttcagcgtcacagctgaggactggcttcgtggtccctgatgggagagcatgaacaggtggtatgtgaagcccttggagaccagctcttccaaagtcaaagccaagaccattgtgatgattcccgactcccagaagctcctgcgatgtgaacttgagtcactcaagagccagttacaggcccagaccaaggctttcgagttcctgaaccactcagtgaccatgttggagaaggagagctgcttgcagcaaatcaagattcagcagcttgaagaggtgctgagccccacaggccgccagggagagaaggaggagcacaagtggggcatggagcagggccggcaggagctgtatggggccctgacccaaggccttcaggggctggagaagaccctgcgtgacagtgagggaaggatgacctccagaaggaactgagtgatatatggtctgctgtgcacgtgctgcagaactccatagacagcctcactttgtgctcgggggcctgtcccaaggcctcgagcctaagaggccacaaggggcaccagtgcctgagccctccactcccctcctgggactctgactccgactctgaccaggacctctcccagccacctttcagcaagagcggccgctccttcccacccggtgcagatcctccccagtccccccctccacccatttccctcctgacctgcccttgactcccacagtctagaccctcagaacaggcccagatcctgatctgggcatgcggtccctgacctgcagccccggagtcccctggacctggccaggccctgacccaccctctctctccacagcttgagcagccgggactgctctccctgaagacccctccagagagaaaataaactagcccagaccctcctctagccccgactgttagtcttgctgcttcctgtgcctaggaatccccctgccctcctagtttacccctcattgttgggggggaggggtgtagagaccccaggggtcattcgggatgtgtgggcttggaatcaggggacatctgaagccagatttaatatatgacaaggcaaggagtcattctgtccagacacgagcagccagacagacttccacactggccacagagccttcctttctggggggccctggcgaatggggaaactgaggcccagagagggagaggcgcggcccagggacatactctgaagcccctccctcctattaccctcggagccccgcccaccccagggtcctccctctctacttccattcttggttccttcctacaatcgatgctaacacgccccgcctccaagatcacggaggccccgcccca

SEQ ID NO: 278042 - DNA, 3086 bp, Homo sapiens
agcagctagcagggagatgctgggggatagacagggctgctggggactgttgtacaggctgtgcactgctcaagggtatccagagcccagctttgtatctaccaggaagaaggggctcccctcccctcccttcctcttccctcccctctcctttcctctcctctcctttcctttcctttttttttttttttttgagatggagtcttgctttgtcgccctggctggagtgcaatggcatgatctcggctcactgcaacctctgcctcctcggttcaagcaattctcctgcctcagcctcctgagtagctggaattacaggtgcacaccaccacgcctggctaatttttttgtatttttagtagagacggggtttcaccatgttggtcaggctggtcttgaactcctgacctcgtgatccgcccacctcggcctcccaaagtgttgggattacaggcgtgagccaccatgcctagcctttttttttccccccctggaaaaggtgtagccataggcgctgactgaggtcctgggaacaagtctccagagggcagtggcactcaaacccacgtacctggctggcctcccagaatgtgagctgagcccaagcatgctgtgaagccaagatgcagaggttgatgaaggcacagcccatggagatgtggaagtagaaggggaagagtttgctctgcactagtccgaagggatccagttctgacagccaagaccactcctctcataaaataataccggatattaggtgaagatcccgaaagccccgaggaaaccctaaatctcatcctgaggacaccgatcccaccaaagccccgaggaaacgccaaatctcatcccgaggacaccgatcccaccgttaggaaccgggacctcaatccgcagcacccggattccgagaacagaggcgtcggggccaaatgggctgaatctggtacctcactcccacgcccccgggtggacagcgaccctcctcggccgcgtcccctcgtgggtttcccccaaccaataattcgtcccgcctcccagctgagcccgaagccaatcgggtcgtagatctgcacctttctatcccgccctcctgggtattgactaatcgtagaaacccccctgggatcccgccccctccacgggcttttatccaattacgccgcggctactaagcgcagctgaagcgtgaaggcgccaatgaggccttcggctactccggcaggggcggaactaaaatgccggccacacccctctctgtgactcagtctctgagcgttttaatacgatggtgtccccgcgggatcaaacttcagcgtcacagctgaggactggcttcgtggtccctgatgggagagcatgaacaggtggtatgtggctcttcctcggacaaggctctggaagcgtacagctcactggtccaggactccagagccagagaccttgggatgccctgcttctggggacacagtgaggactgcagactgcaggccagggtggggctcagggccttcgccacatgaggctgccccctcccccagtccagacctgcagaagcagtgctgtaatgaccaggacattttgaagaggcatcacaacgtagctaaggtcacccccacccgggaaaccccttcaatgcagaaaaccactgcaatctactgctgtggggcttagggaaggggctgtaaggcagagagactcccatgaatgcacccactgtgtttcttcagcacctagaacagcacctggcactcagcaggccctggctaagcaagtcttaaatgaatggatgaaggaatgaatggaaggaaagagtgtggttgtgtgtcttccatggggatttggctgtgatcgtctctcagccacataagtgcacttctgagcatatgtagcccaagggggaggtgcatgaatatgcctggagtgcagctttgcctgcacttacggtttgggacacctagaactgaggagatccaactcttgtccagccctcaaaactgggttgaggtgagcaaggaggcagctcagggacaaatttctactcccatctcatctctcttccttagaagcccttggagaccagctcttccaaagtcaaagccaagaccattgtgatgattcccgactcccagaagctcctgcgatgtgaacttgagtcactcaagagccaggaaggatgacctccagaaggaactgagtgatatatggtctgctgtgcacgtgctgcagaactccatagacagcctcactttgtgctcgggggcctgtcccaaggcctcgagcctaagaggccacaaggggcaccagtgcctgagccctccactcccctcctgggactctgactccgactctgaccaggacctctcccagccacctttcagcaagagcggccgctccttcccacccggtgcagatcctccccagtccccccctccacccatttccctcctgacctgcccttgactcccacagtctagaccctcagaacaggcccagatcctgatctgggcatgcggtccctgacctgcagccccggagtcccctggacctggccaggccctgacccaccctctctctccacagcttgagcagccgggactgctctccctgaagacccctccagagagaaaataaactagcccagaccctcctctagccccgactgttagtcttgctgcttcctgtgcctaggaatccccctgccctcctagtttacccctcattgttgggggggaggggtgtagagaccccaggggtcattcgggatgtgtgggcttggaatcaggggacatctgaagccagatttaatatatgacaaggcaaggagtcattctgtccagacacgagcagccagacagacttccacactggccacagagccttcctttctggggggccctggcgaatggggaaactgaggcccagagagggagaggcgcggcccagggacatactctgaagcccctccctcctattaccctcggagccccgcccaccccagggtcctccctctctacttccattcttggttccttcctacaatcgatgctaacacgccccgcctccaagatcacggaggccccgcccca

SEQ ID NO: 278043 - DNA, 1043 bp, Homo sapiens
gcaggggaggcaaagaggctcagacaaggaatctggagttcaatgacgggagacgcacagggcagagcgaaaggtagggtggcgggagcagggtcccggacactcaccggtcatgctgccagtctgggtgctgactgaccgcccggccctcgcgctctccagattttgcatctgcccagcttctttcatcccaaacctagcgtcctctgctgccaaggaaacctctcccagtcagacatgatctcggccctagcgcccccgcctctcgcctcctctcagcaactgtaaggcaacggcccactaggcgcagccagatgacgcctcaagcttgaccgccacttcagggctcctcgtgtgacgtcatagagaggcggggctttggcgccagagggctgcccctcggccggtgaccgagttaagcaccgagctgtaaatcgcttgagacctgtatttggttgttttgttggttttgccaagtaaggtcacttgaggatttcttggctcgaggtcccaggttgcgcagactctgactgcatcgagttgagaattttggtcagaatgttaaagtggaaacctaccccaggctgtcatgacttttgcattctggtaaccaactgatcctacccggacccatgatgcataactcagctggtcctgtggcgcacacccagaggccgactcaatgcatgaagactgttttccacacccctatgatttcatccccaaccaagcagcagcatccattccctagccccctgcccaccaaattatccataaaaactctggcttctgagttctcagcaaaactgattttagtaataactccagttcttccacttggctggccttagttaattaaacttattctttactatagtaccgtgttcccagtgaattggttttgtctgtgtagcaggcaggacaacccatcaggcaatcacacagttactctgcagtgcttctttttattttgcttttcaaacaaatttcaaatattattagattgaaataaactatacaaatagcttttcctcacaaaaatg

SEQ ID NO: 278044 - DNA, 698 bp, Homo sapiens
aacgcgctgtgctcgcggccgtccggcccgtccggcagccccgggtcagcccggtgaactaagcggacccgggatggccgagccgggggccggcgttctgtgctccgtttgctcaccctgaccgtggcacccgcataagccgtctgtgtgttccagagaggccagccctgcatgtgctgtccgtgagcgtgcttggacctacgcataggacccagctgagcgggacatttacacgactgctggggtcgagggcagaacagggggaaactgtgttctggcggaggcacagcaccccgggagcacccagagcctgaagaacaccgggatgccgcagacaaagaagaagatgaagtaggggatgaagaaggctcctgcagaagagagagaggcagggctgagccacacccgggctcttcctcagcctccatcctttcagaccctcctcccccaacaaacccgccctccaccatcctgttcttaatctccctcctgacactttccaagggcccactcctgcctgcgtgcagtcctgagtgttaggcaggcacaggtgggaatgttctgatctgaaccctacacagaatgagaaaggccttggaagggaaattagtgaaaacttaggtggaaattctaatatatgcactatttattttcttagtgtgctttacaaatctagtcaatagattatttttggaata

SEQ ID NO: 278045 - DNA, 491 bp, Homo sapiens
tttgtcatgtgaacctccttcccatcatacacttgaagcccttttatattacatgattcggttagttggtagtaattgaaaaagccagattgggaattttaaagataatgcatacatatcttaaacattataattaaaagtatatccatttcaccaatcttttgatgtagtggtgagactgtttttgtgtctaagactgctgttcagagttcccaattctctttccagtattaactacacagggagtctcaaacctggctgtaccctgagaacttttaaaaactttggatgcctggaccccagtacagactattgaacctgaatgggaaggagggtggcctggtttttaagcttcccaggtaattctagtgtgcagtctgagagccactcaggcactttcatcatctttggtttcccgttttgctttatttaaagtgaagtatgaatttagacacttctgagtgcagagtacttttgagattaagtcccac

SEQ ID NO: 278046 - DNA, 453 bp, Homo sapiens
ccaacttgctcgagcagggctgggtagaccggcgcgctcccggggacggtggggggggcagtcccggtttcggccatcgctggggtgggctcggagcggccgcaccgggcagcaaccccactcccactcggaggccccctgccctctcccccacttccccccggcccatggtgcgaggctgggagccgccgcccgggctggactgcgttcggagccttctggactgcctgtgaaatggaggataggagaaacatttccttcccaggcccccccgccacacaaacccccaacccccacggctacctcctggcgacctcaacacacgtgcagaacctggccttgcttctggggatcagtggcctttgggaatgaaaggtttagaagaaactgcccctctgactcccgtacccagccatactaagagaaccaaccaggaaactgagaacctgagtc

SEQ ID NO: 278047 - DNA, 693 bp, Homo sapiens
ccaacttgctcgagcagggctgggtagaccggcgcgctcccggggacggtggggggggcagtcccggtttcggccatcgctggggtgggctcggagcggccgcaccgggcagcaaccccactcccactcggaggccccctgccctctcccccacttccccccggcccatggtgcgaggctgggagccgccgcccgggctggactgcgtattaactacacagggagtctcaaacctggctgtaccctgagaacttttaaaaactttggatgcctggaccccagtacagactattgaacctgaatgggaaggagggtggcctggtttttaagcttcccagttttacttgcttccaacaggaaggcaagttttcctccttccatgacgatgaaaggcaggtaactcctttatggaatttgagctggcttccaacagggaagatgaggttttttttcctgcctctagaatagtagagagcagtctacagcctgagacccatcactaggacacaattgaagaaactggtagttttaccaaggctttgactggaatggtgcactttcctataaggaatcaaacttgacttaagaagccaataaagcccttggaaaaactggcctcatattttgtgtacacagtccgtgtacagggtttctggcctgtggacatgagacttcacaacctgctaaaaatct

SEQ ID NO: 278048 - DNA, 1763 bp, Homo sapiens
agagcagaatcagcatgaggagcagacaccccaggagagctatctctgaagggcacaaatcagaaggcaccatgcctcctaataaagaggccagcggtctcagtagttcaccagcggggctcatctgcctccctccaatctctgaggagctacagcttgtgtggacgcaagcagcccagaccagtgagctagacagcaatgaacacctgctcaaaaccttcagctactttccctatcccagcctagcagacattgcccttctctgcctacgttatgggttgcagatggagaaagtcaagacttggtttatggcccagcgcctccgctgtggtattagctggtcatctgaagaaatagaagagactcgagcccgagtagtctaccgtcgggaccaactccatttcaaatcccttctctcttttactcatcatgcgggacggcccccagaggaggtgcctcctcctccagtgccagctccagagcaagttggtattggaataggtcctccaactcttagcaagcctacccagacgaaaggattgaaggtagagcctgaggagccctctcagatgccaccactgccacagagtcaccagaaattaaaggagtccctgatgacacctggcagtggagcattcccctaccaatcagatttttggcaacatcttcaaagcagtggcctctcaaaggagcaggcaggcaggggtcccaaccagtcacatggcataggtactgcttcctggaaccactccacaaccgtcccccagccacaagctcgggataaacccccaccaattgcattaattgccagtagttgtaaggaggagtcagcatctagtgttactccctcttcttcctctacctcttcttctttccaggtactggctaatggagctactgccgcctctaaacccctccagccactaggctgtgtcccacagtcagtgtcacccagtgaacaggcattacccccacatctggaaccagcctggccccaagggctacggcataactcagtaccaggtagagttggccccacagagtacctttccccagatatgcaacgccagcgaaagaccaagcgcaaaaccaaagagcagctggctatccttaaatccttttttttacagtgccagtgggcacggcgtgaggattaccaaaagttagaacagatcactggtttacctcggcctgagatcattcagtggtttggtgacacacgctatgccttgaagcatgggcaactaaagtggtttcgggacaacgcagtacctggtgcccctagtttccaagacccagcaattcctacaccaccaccatcaacccgctccttgaacgaaagggctgagacaccacctctgccgatccctccacccccaccggatatacaacccttggagaggtactgggcagcccaccaacagctacgggaaactgatatccctcaattgagtcaggcatcaaggcttagcacccagcaggtgctggattggtttgactctcgattacctcagccagctgaggtggtagtttgtctagatgaagaagaggaagaggaggaggaagaactgccagaagatgatgaggaagaggaggaggaggaggaagatgatgatgatgatgatgatgatgtgatcatacaagactgagtggggagctgggggaggggaggtctgttactgaaagatgaaccaacttagtaactgtttaaacaaagaaaccacatttttaaaattaccttgtggcagagaactaaaaaaaat

SEQ ID NO: 278049 - DNA, 1856 bp, Homo sapiens
ccaacttgctcgagcagggctgggtagaccggcgcgctcccggggacggtggggggggcagtcccggtttcggccatcgctggggtgggctcggagcggccgcaccgggcagcaaccccactcccactcggaggccccctgccctctcccccacttccccccggcccatggtgcgaggctgggagccgccgcccgggctggactgcgctatctctgaagggcacaaatcagaaggcaccatgcctcctaataaagaggccagcggtctcagtagttcaccagcggggctcatctgcctccctccaatctctgaggagctacagcttgtgtggacgcaagcagcccagaccagtgagctagacagcaatgaacacctgctcaaaaccttcagctactttccctatcccagcctagcagacattgcccttctctgcctacgttatgggttgcagatggagaaagtcaagacttggtttatggcccagcgcctccgctgtggtattagctggtcatctgaagaaatagaagagactcgagcccgagtagtctaccgtcgggaccaactccatttcaaatcccttctctcttttactcatcatgcgggacggcccccagaggaggtgcctcctcctccagtgccagctccagagcaagttggtattggaataggtcctccaactcttagcaagcctacccagacgaaaggattgaaggtagagcctgaggagccctctcagatgccaccactgccacagagtcaccagaaattaaaggagtccctgatgacacctggcagtggagcattcccctaccaatcagatttttggcaacatcttcaaagcagtggcctctcaaaggagcaggcaggcaggggtcccaaccagtcacatggcataggtactgcttcctggaaccactccacaaccgtcccccagccacaagctcgggataaacccccaccaattgcattaattgccagtagttgtaaggaggagtcagcatctagtgttactccctcttcttcctctacctcttcttctttccaggtactggctaatggagctactgccgcctctaaacccctccagccactaggctgtgtcccacagtcagtgtcacccagtgaacaggcattacccccacatctggaaccagcctggccccaagggctacggcataactcagtaccaggtagagttggccccacagagtacctttccccagatatgcaacgccagcgaaagaccaagcgcaaaaccaaagagcagctggctatccttaaatccttttttttacagtgccagtgggcacggcgtgaggattaccaaaagttagaacagatcactggtttacctcggcctgagatcattcagtggtttggtgacacacgctatgccttgaagcatgggcaactaaagtggtttcgggacaacgcagtacctggtgcccctagtttccaagacccagcaattcctacaccaccaccatcaacccgctccttgaacgaaagggctgagacaccacctctgccgatccctcaattgagtcaggcatcaaggcttagcacccagcaggtgctggattggtttgactctcgattacctcagccagctgaggtggtagtttgtctagatgaagaagaggaagaggaggaggaagaactgccagaagatgatgaggaagaggaggaggaggaggaagatgatgatgatgatgatgatgatgtgatcatacaagactgagtggggagctgggggaggggaggtctgttactgaaagatgaaccaacttagtaactgtttaaacaaagaaaccacatttttaaaattaccttgtggcagagaactaaaaaaaat

SEQ ID NO: 278050 - DNA, 754 bp, Homo sapiens
ccaacttgctcgagcagggctgggtagaccggcgcgctcccggggacggtggggggggcagtcccggtttcggccatcgctggggtgggctcggagcggccgcaccgggcagcaaccccactcccactcggaggccccctgccctctcccccacttccccccggcccatggtgcgaggctgggagccgccgcccgggctggactgcggtgagtgatccccagccccttggacttcccctcccagctcgtgtacggtctcccacctctggagccccatccccgcgctggtggggggataattctaggttcgaagtggcccggttctctcttttttctcctctggacttttcggttccctcccctgttgtaactaggggagggtgagtgtctgtgtaggggagggcaagaaggttgggttggggcgcccttggcgagagtaggattgagattcgcctgcctcatggggcttatcgtcccaagtgcaataactttttgttccctgacccagttcggagccttctggactgcctgtgaaatggaggataggagaaacatttccttcccaggcccccccgccacacaaacccccaacccccacggctacctcctggcgacctcaacacacgtgcagaacctggccttgcttctggggatcagtggcctttgggaatgaaaggtttagaagaaactgcccctctgactcccgtacccagccatactaagagaaccaaccaggaaactgagaacctgagtc

SEQ ID NO: 278051 - DNA, 1931 bp, Homo sapiens
ccaacttgctcgagcagggctgggtagaccggcgcgctcccggggacggtggggggggcagtcccggtttcggccatcgctggggtgggctcggagcggccgcaccgggcagcaaccccactcccactcggaggccccctgccctctcccccacttccccccggcccatggtgcgaggctgggagccgccgcccgggctggactgcgctatctctgaagggcacaaatcagaaggcaccatgcctcctaataaagaggccagcggtctcagtagttcaccagcggggctcatctgcctccctccaatctctgaggagctacagcttgtgtggacgcaagcagcccagaccagtgagctagacagcaatgaacacctgctcaaaaccttcagctactttccctatcccagcctagcagacattgcccttctctgcctacgttatgggttgcagatggagaaagtcaagacttggtttatggcccagcgcctccgctgtggtattagctggtcatctgaagaaatagaagagactcgagcccgagtagtctaccgtcgggaccaactccatttcaaatcccttctctcttttactcatcatgcgggacggcccccagaggaggtgcctcctcctccagtgccagctccagagcaagttggtattggaataggtcctccaactcttagcaagcctacccagacgaaaggattgaaggtagagcctgaggagccctctcagatgccaccactgccacagagtcaccagaaattaaaggagtccctgatgacacctggcagtggagcattcccctaccaatcagatttttggcaacatcttcaaagcagtggcctctcaaaggagcaggcaggcaggggtcccaaccagtcacatggcataggtactgcttcctggaaccactccacaaccgtcccccagccacaagctcgggataaacccccaccaattgcattaattgccagtagttgtaaggaggagtcagcatctagtgttactccctcttcttcctctacctcttcttctttccaggtactggctaatggagctactgccgcctctaaacccctccagccactaggctgtgtcccacagtcagtgtcacccagtgaacaggcattacccccacatctggaaccagcctggccccaagggctacggcataactcagtaccaggtagagttggccccacagagtacctttccccagatatgcaacgccagcgaaagaccaagcgcaaaaccaaagagcagctggctatccttaaatccttttttttacagtgccagtgggcacggcgtgaggattaccaaaagttagaacagatcactggtttacctcggcctgagatcattcagtggtttggtgacacacgctatgccttgaagcatgggcaactaaagtggtttcgggacaacgcagtacctggtgcccctagtttccaagacccagcaattcctacaccaccaccatcaacccgctccttgaacgaaagggctgagacaccacctctgccgatccctccacccccaccggatatacaacccttggagaggtactgggcagcccaccaacagctacgggaaactgatatccctcaattgagtcaggcatcaaggcttagcacccagcaggtgctggattggtttgactctcgattacctcagccagctgaggtggtagtttgtctagatgaagaagaggaagaggaggaggaagaactgccagaagatgatgaggaagaggaggaggaggaggaagatgatgatgatgatgatgatgatgtgatcatacaagactgagtggggagctgggggaggggaggtctgttactgaaagatgaaccaacttagtaactgtttaaacaaagaaaccacatttttaaaattaccttgtggcagagaactaaaaaaaat

SEQ ID NO: 278052 - DNA, 1815 bp, Homo sapiens
agcggaggatcaagattaaggacggcgatgccacaggacacgatatctccgaagggcgccgatcataacgcgcctatggcctactaggtatacaggagccgactacccggtcgtcgcatcgattgaacggagctggagggctcactgctgaacttccgcgcatggcacagtctgcattgtatgcgagctcatcacgctctgcggtgcgcaggccaagatacgcacggagaccgaggtgagctagacagcaatgaacacctgctcaaaaccttcagctactttccctatcccagcctagcagacattgcccttctctgcctacgttatgggttgcagatggagaaagtcaagacttggtttatggcccagcgcctccgctgtggtattagctggtcatctgaagaaatagaagagactcgagcccgagtagtctaccgtcgggaccaactccatttcaaatcccttctctcttttactcatcatgcgggacggcccccagaggaggtgcctcctcctccagtgccagctccagagcaagttggtattggaataggtcctccaactcttagcaagcctacccagacgaaaggattgaaggtagagcctgaggagccctctcagatgccaccactgccacagagtcaccagaaattaaaggagtccctgatgacacctggcagtggagcattcccctaccaatcagatttttggcaacatcttcaaagcagtggcctctcaaaggagcaggcaggcaggggtcccaaccagtcacatggcataggtactgcttcctggaaccactccacaaccgtcccccagccacaagctcgggataaacccccaccaattgcattaattgccagtagttgtaaggaggagtcagcatctagtgttactccctcttcttcctctacctcttcttctttccaggtactggctaatggagctactgccgcctctaaacccctccagccactaggctgtgtcccacagtcagtgtcacccagtgaacaggcattacccccacatctggaaccagcctggccccaagggctacggcataactcagtaccaggtagagttggccccacagagtacctttccccagatatgcaacgccagcgaaagaccaagcgcaaaaccaaagagcagctggctatccttaaatccttttttttacagtgccagtgggcacggcgtgaggattaccaaaagttagaacagatcactggtttacctcggcctgagatcattcagtggtttggtgacacacgctatgccttgaagcatgggcaactaaagtggtttcgggacaacgcagtacctggtgcccctagtttccaagacccagcaattcctacaccaccaccatcaacccgctccttgaacgaaagggctgagacaccacctctgccgatccctccacccccaccggatatacaacccttggagaggtactgggcagcccaccaacagctacgggaaactgatatccctcaattgagtcaggcatcaaggcttagcacccagcaggtgctggattggtttgactctcgattacctcagccagctgaggtggtagtttgtctagatgaagaagaggaagaggaggaggaagaactgccagaagatgatgaggaagaggaggaggaggaggaagatgatgatgatgatgatgatgatgtgatcatacaagactgagtggggagctgggggaggggaggtctgttactgaaagatgaaccaacttagtaactgtttaaacaaagaaaccacatttttaaaattaccttgtggcagagaactaaaaaaaat

SEQ ID NO: 278053 - DNA, 937 bp, Homo sapiens
ctttctccattagcgccccccctacattgctatttccctccctccccccttttcgtttccggcgctcccgccttctctccgcagagctcttctctgagcctgttggggggagggaggggggcgtggaggaactggggttcgcgggagcacgagctgcagcaccacttccggaaagttcaggagccctggaaaggagaaggaataagacggcaggaggaagagagagagagggtagaatggaagaatctcacttcaattctaacccgtacttctggccttctatccccacagtctcaggtcagatcgagaacacaatgttcatcaacaagatgaaggatcagctgttgccagagaagggctgtggtctggccccacctcactaccccaccttgctgacagtgcctgcctcagtgtccctgccctcaggcatcagtatggacacagagtccaagtcagaccagctgaccccacacagccaagcgtccgttacccagaatatcacggtggtccctgtgccgtctacaggactgatgactgctggtgagcaactctgctcttctccaatctgaggtgttgatcttccatgatcagtaccccaggctggagggctccaaggacatggggagtgggatatgtgtttgattattcaatcaaatttttattaagtgcctactgtgtgcctagcaatgtgctaggcattgtgggggatacaaagaagtagaagatgcggtccctgcctttgaggaggtgacattctttccttctctgaatcaaggagtctcctgttctcagaggtggagaagagaagggagtcaatcaaggggtaaatctcactgttaccaggggggtggggacaagggttaggagaccattatttttctacagggtttgggatttcctgtgtactctgggttgggtcggcgggggggtgaggggt

SEQ ID NO: 278054 - DNA, 2881 bp, Homo sapiens
ctttctccattagcgccccccctacattgctatttccctccctccccccttttcgtttccggcgctcccgccttctctccgcagagctcttctctgagcctgttggggggagggaggggggcgtggaggaactggggttcgcgggagcacgagctgcagcaccacttccggaaagttcaggagccctggaaaggagaaggaataagacggcaggaggaagagagagagagggtagaatggaagaatctcacttcaattctaacccgtacttctggccttctatccccacagtctcaggtcagatcgagaacacaatgttcatcaacaagatgaaggatcagctgttgccagagaagggctgtggtctggccccacctcactaccccaccttgctgacagtgcctgcctcagtgtccctgccctcaggcatcagtatggacacagagtccaagtcagaccagctgaccccacacagccaagcgtccgttacccagaatatcacggtggtccctgtgccgtctacaggactgatgactgctggagtctcctgttctcagaggtggagaagagaagggagtcaatcaaggggtccgggtttggtaatcacgtccccctcaggctctcttgtgaccacagcatcatcagctcagaccttccccatttcggctcccatgattgtctcagctcttccccctggctcacaagccctgcaggttgtccctgacctctccaagaaggtagcatcgaccctaaccgaggaaggaggcggaggtggtggtggaggtggcagtgtggctcctaagccaccccggggccggaagaagaagcggatgctggaatcagggctgcccgagatgaatgacccttatgtcctctcccctgaggatgatgatgaccatcagaaagacggcaagacctacaggtgccggatgtgctcactgacattctactccaagtcggagatgcagatccactccaagtcacacaccgagaccaagccccacaagtgcccacattgctccaagaccttcgccaacagctcctacctggcccagcacatccgtatacactcaggggctaagccctacagttgtaacttctgtgagaaatccttccgccagctctcccaccttcagcagcacacccgaatccacactggtgatagaccatacaaatgtgcacacccaggctgtgagaaagccttcacacaactctccaatctgcagtcccacagacggcaacacaacaaagataaacccttcaagtgccacaactgtcatcgggcgtacacggatgcagcctcactagaggtgcacctgtctacgcacacagtgaagcatgccaaggtgtacacctgcactatctgcagtcgggcatacacatcagaaacataccttatgaaacatatgcgcaaacacaacccgcctgatcttcagcaacaggtgcaggcagcagcagcagcggcagcagtggcccaggcccaggctcaagctcaagcccaggctcaggctcaggctcaagcccaggcccaggcccaggcctcccaggcatcacagcagcagcagcagcagcagcagcagcagcagcagcagcaacagccaccaccacacttccagtctcctggggcagccccccagggtgggggtggtggggacagcaatcccaaccctccaccccagtgttcctttgacctgaccccgtataagacggcggagcatcataaggacatctgcctcactgtcaccaccagcaccatccaggtggagcacctggccagctcttagagatccgtgctgccacccactgggaagaggaagaagtagtcctggtgtcttctttctccaactcttggtgggaaaagtccttttcttccttgacaggccttggctccatctccttgggcctctgtcacggctttccttcacaggataccatcctttttctgaactcttcttcaaaaggaacatcagccctcctgattgcaaaggaatactgagctgatggtgtcatccagcagcctcccctcccaagcaaagcttctaaaactgggggtcggtgctcaagggaaggatttgctatgacctcatagaaccttgtccagtgtggccacttaccctatccttaccctccttatcctcaaagtttgggctgatgtaagactagaggctggccctcccagataacagagaaaagggagccccaaatgcaaccagcctcttgttctattcttgcctgcaaaagaacagaggtttctcaaatgcctcagtccctgagagccatttcttcccctacatcgtctcactttgcttcctattgactgctggtagaaggagatttggggtaggggctagacctccttttatttgaagggggcaagggctgagatgtggtccccaaggggccagaaattcccaagttggtcacaggtggcttagaagtgtgtgttatggttttacggatttccttgaagcctctctccttctctgcctacaaagacctatactctcaagtctccccaacccacccccaaggagctgtgggaggctttgtgtaatctgtgcaaactccaaaacaggggtgttgcggagaagggagagttcaaggtaaactcaaggactggacttagctccctaggtgccacagtcagatgccggacacggatttatatataaatatatatatataaatatattatacccactcatcacggccatctttgttgtaaccatttctgtgtttataaatgcattatctctgagaattttcatatttgatgttttgtttatttttgtcctttttttccctctctccacccctgtcctctagccacagcatttttctttttgtccttggggtgggggaggggggagggatggaattc

SEQ ID NO: 278055 - DNA, 3717 bp, Homo sapiens
actgtgtgtgtgtccgtcccggaaccggaagtggttgtggaggagcgggcgatgggaaggaatgggggggtttagggggcgggtgcctgtctggtgggtggcagagttcagctccctggaggggaaggagggacgtcccaaggaagggtctttgagaaaggggtaggggacgacatcaggagaaggctcccaggaactgtctcaggggagcgaaggttttgaggggacagctggggtctccagtagatagaccacggtgcaggctgagggaggtacttcttggcacaaggcctcgggtaggcagggggcgaagtcctcgaagaagtggggggaaggctagaggaagtggctgggcctgaactggcactgtgcctgccacaaggtcttgtgcatcccccagccctcagctttgccttctgaagccactcctcaggggcacagaccctcctcctcctccatctctaatgttctctgacccctggttacctgtggcctgggaacgaacaaggaccagtctctgagcctaggagtgaaacccaaacgctggtgatagaattcgtcttagtttctgggaattggatttatttctcttgtatccacgtagagggtagcactagactgctgttattatatccacccgtctttggattgctggctggggggtctgcctgccttccagactgactgctgacaaataattcctgaggttctccacagttctctggtggctgcaccctgcctggcccctgtaacctagacaatttgtttacagaaagttcaggagccctggaaaggagaaggaataagacggcaggaggaagagagagagagggtagaatggaagaatctcacttcaattctaacccgtacttctggccttctatccccacagtctcaggtcagatcgagaacacaatgttcatcaacaagatgaaggatcagctgttgccagagaagggctgtggtctggccccacctcactaccccaccttgctgacagtgcctgcctcagtgtccctgccctcaggcatcagtatggacacagagtccaagtcagaccagctgaccccacacagccaagcgtccgttacccagaatatcacggtggtccctgtgccgtctacaggactgatgactgctggtgagcaactctgctcttctccaatctgaggtgttgatcttccatgatcagtaccccaggctggagggctccaaggacatggggagtgggatatgtgtttgattattcaatcaaatttttattaagtgcctactgtgtgcctagcaatgtgctaggcattgtgggggatacaaagaagtagaagatgcggtccctgcctttgaggaggtgacattctttccttctctgaatcaaggagtctcctgttctcagaggtggagaagagaagggagtcaatcaaggggtccgggtttggtaatcacgtccccctcaggctctcttgtgaccacagcatcatcagctcagaccttccccatttcggctcccatgattgtctcagctcttccccctggctcacaagccctgcaggttgtccctgacctctccaagaaggtagcatcgaccctaaccgaggaaggaggcggaggtggtggtggaggtggcagtgtggctcctaagccaccccggggccggaagaagaagcggatgctggaatcagggctgcccgagatgaatgacccttatgtcctctcccctgaggatgatgatgaccatcagaaagacggcaagacctacaggtgccggatgtgctcactgacattctactccaagtcggagatgcagatccactccaagtcacacaccgagaccaagccccacaagtgcccacattgctccaagaccttcgccaacagctcctacctggcccagcacatccgtatacactcaggggctaagccctacagttgtaacttctgtgagaaatccttccgccagctctcccaccttcagcagcacacccgaatccacactggtgatagaccatacaaatgtgcacacccaggctgtgagaaagccttcacacaactctccaatctgcagtcccacagacggcaacacaacaaagataaacccttcaagtgccacaactgtcatcgggcgtacacggatgcagcctcactagaggtgcacctgtctacgcacacagtgaagcatgccaaggtgtacacctgcactatctgcagtcgggcatacacatcagaaacataccttatgaaacatatgcgcaaacacaacccgcctgatcttcagcaacaggtgcaggcagcagcagcagcggcagcagtggcccaggcccaggctcaagctcaagcccaggctcaggctcaggctcaagcccaggcccaggcccaggcctcccaggcatcacagcagcagcagcagcagcagcagcagcagcagcagcagcaacagccaccaccacacttccagtctcctggggcagccccccagggtgggggtggtggggacagcaatcccaaccctccaccccagtgttcctttgacctgaccccgtataagacggcggagcatcataaggacatctgcctcactgtcaccaccagcaccatccaggtggagcacctggccagctcttagagatccgtgctgccacccactgggaagaggaagaagtagtcctggtgtcttctttctccaactcttggtgggaaaagtccttttcttccttgacaggccttggctccatctccttgggcctctgtcacggctttccttcacaggataccatcctttttctgaactcttcttcaaaaggaacatcagccctcctgattgcaaaggaatactgagctgatggtgtcatccagcagcctcccctcccaagcaaagcttctaaaactgggggtcggtgctcaagggaaggatttgctatgacctcatagaaccttgtccagtgtggccacttaccctatccttaccctccttatcctcaaagtttgggctgatgtaagactagaggctggccctcccagataacagagaaaagggagccccaaatgcaaccagcctcttgttctattcttgcctgcaaaagaacagaggtttctcaaatgcctcagtccctgagagccatttcttcccctacatcgtctcactttgcttcctattgactgctggtagaaggagatttggggtaggggctagacctccttttatttgaagggggcaagggctgagatgtggtccccaaggggccagaaattcccaagttggtcacaggtggcttagaagtgtgtgttatggttttacggatttccttgaagcctctctccttctctgcctacaaagacctatactctcaagtctccccaacccacccccaaggagctgtgggaggctttgtgtaatctgtgcaaactccaaaacaggggtgttgcggagaagggagagttcaaggtaaactcaaggactggacttagctccctaggtgccacagtcagatgccggacacggatttatatataaatatatatatataaatatattatacccactcatcacggccatctttgttgtaaccatttctgtgtttataaatgcattatctctgagaattttcatatttgatgttttgtttatttttgtcctttttttccctctctccacccctgtcctctagccacagcatttttctttttgtccttggggtgggggaggggggagggatggaattc

SEQ ID NO: 278056 - DNA, 3665 bp, Homo sapiens
actgtgtgtgtgtccgtcccggaaccggaagtggttgtggaggagcgggcgatgggaaggaatgggggggtttagggggcgggtgcctgtctggtgggtggcagagttcagctccctggaggggaaggagggacgtcccaaggaagggtctttgagaaaggggtaggggacgacatcaggagaaggctcccaggaactgtctcaggggagcgaaggttttgaggggacagctggggtctccagtagatagaccacggtgcaggctgagggaggtacttcttggcacaaggcctcgggtaggcagggggcgaagtcctcgaagaagtggggggaaggctagaggaagtggctgggcctgaactggcactgtgcctgccacaaggtcttgtgcatcccccagccctcagctttgccttctgaagccactcctcaggggcacagaccctcctcctcctccatctctaatgttctctgacccctggttacctgtggcctgggaacgaacaaggaccagtctctgagcctaggagtgaaacccaaacgctggtgatagaattcgtcttagtttctgggaattggatttatttctcttgtatccacgtagagggtagcactagactgctgttattatatccacccgtctttggattgctggctggggggtctgcctgccttccagactgactgctgacaaataattcctgaggttctccacagttctctggtggctgcaccctgcctggcccctgtaacctagacaatttgtttacagaaagttcaggagccctggaaaggagaaggaataagacggcaggaggaagagagagagagggtagaatggaagaatctcacttcaattctaacccgtacttctggccttctatccccacagtctcaggtcagatcgagaacacaatgttcatcaacaagatgaaggatcagctgttgccagagaagggctgtggtctggccccacctcactaccccaccttgctgacagtgcctgcctcagtgtccctgccctcaggcatcagtatggacacagagtccaagtcagaccagctgaccccacacagccaagcgtccgttacccagaatatcacggtggtccctgtgccgtctacaggactgatgactgctggagtctcctgttctcagaggtggagaagagaagggagtcaatcaaggggtccgggtttggtaatcacgtccccctcaggctctcttgtgaccacagcatcatcagctcagaccttccccatttcggctcccatgattgtctcagctcttccccctggctcacaagccctgcaggttgtccctgacctctccaagaaggtagcatcgaccctaaccgaggaaggaggcggaggtggtggtggaggtggcagtgtggctcctaagccaccccggggccggaagaagaagcggatgctggaatcagggctgcccgagatgaatgacccttatgtcctctcccctgaggatgatgatgaccatcagaaagacggcaagacctacaggtgccggatgtgctcactgacattctactccaagtcggagatgcagatccactccaagtcacacaccgagaccaagccccacaagtgcccacattgctccaagaccttcgccaacagctcctacctggcccagcacatccgtatacactcaggggctaagccctacagttgtaacttctgtgagaaatccttccgccagctctcccaccttcagcagcacacccggatccactccaagatgcacacggagaccatcaagccccacaagtgcccgcactgctccaagaccttcgccaacacctcctacctggcccagcacctccgtatccactcgggggccaagccctacaactgttcctactgccagaaggccttccgccagctctcccacctccagcagcacacacgaatccacactggtgatagaccatacaaatgtgcacacccaggctgtgagaaagccttcacacaactctccaatctgcagtcccacagacggcaacacaacaaagataaacccttcaagtgccacaactgtcatcgggcgtacacggatgcagcctcactagaggtgcacctgtctacgcacacagtgaagcatgccaaggtgtacacctgcactatctgcagtcgggcatacacatcagaaacataccttatgaaacatatgcgcaaacacaacccgcctgatcttcagcaacaggtgcaggcagcagcagcagcggcagcagtggcccaggcccaggctcaagctcaagcccaggctcaggctcaggctcaagcccaggcccaggcccaggcctcccaggcatcacagcagcagcagcagcagcagcagcagcagcagcagcagcaacagccaccaccacacttccagtctcctggggcagccccccagggtgggggtggtggggacagcaatcccaaccctccaccccagtgttcctttgacctgaccccgtataagacggcggagcatcataaggacatctgcctcactgtcaccaccagcaccatccaggtggagcacctggccagctcttagagatccgtgctgccacccactgggaagaggaagaagtagtcctggtgtcttctttctccaactcttggtgggaaaagtccttttcttccttgacaggccttggctccatctccttgggcctctgtcacggctttccttcacaggataccatcctttttctgaactcttcttcaaaaggaacatcagccctcctgattgcaaaggaatactgagctgatggtgtcatccagcagcctcccctcccaagcaaagcttctaaaactgggggtcggtgctcaagggaaggatttgctatgacctcatagaaccttgtccagtgtggccacttaccctatccttaccctccttatcctcaaagtttgggctgatgtaagactagaggctggccctcccagataacagagaaaagggagccccaaatgcaaccagcctcttgttctattcttgcctgcaaaagaacagaggtttctcaaatgcctcagtccctgagagccatttcttcccctacatcgtctcactttgcttcctattgactgctggtagaaggagatttggggtaggggctagacctccttttatttgaagggggcaagggctgagatgtggtccccaaggggccagaaattcccaagttggtcacaggtggcttagaagtgtgtgttatggttttacggatttccttgaagcctctctccttctctgcctacaaagacctatactctcaagtctccccaacccacccccaaggagctgtgggaggctttgtgtaatctgtgcaaactccaaaacaggggtgttgcggagaagggagagttcaaggtaaactcaaggactggacttagctccctaggtgccacagtcagatgccggacacggatttatatataaatatatatatataaatatattatacccactcatcacggccatctttgttgtaaccatttctgtgtttataaatgcattatctctgagaattttcatatttgatgttttgtttatttttgtcctttttttccctctctccacccctgtcctctagccacagcatttttctttttgtccttggggtgggggaggggggagggatggaattc

SEQ ID NO: 278057 - DNA, 3103 bp, Homo sapiens
ctttctccattagcgccccccctacattgctatttccctccctccccccttttcgtttccggcgctcccgccttctctccgcagagctcttctctgagcctgttggggggagggaggggggcgtggaggaactggggttcgcgggagcacgagctgcagcaccacttccgggtgagtgcaaggggagggcagcaaggagggggggccacccactacctcgcgcccccgccctgcgggtgtctcgcgcgcgttccgtgcgtgtgagtgtgtgggtctgtctcgctccagaagtgcgtgcccgcgcgctgcgccttgcgctttttcccctccctcgccccttcctggtcctcccaccctcctaggctccctcctttcccagcaaacgccgcccctcccgcgccctggctcaggctctggcgccgccgcagccgtcgccgcccgaaagttcaggagccctggaaaggagaaggaataagacggcaggaggaagagagagagagggtagaatggaagaatctcacttcaattctaacccgtacttctggccttctatccccacagtctcaggtcagatcgagaacacaatgttcatcaacaagatgaaggatcagctgttgccagagaagggctgtggtctggccccacctcactaccccaccttgctgacagtgcctgcctcagtgtccctgccctcaggcatcagtatggacacagagtccaagtcagaccagctgaccccacacagccaagcgtccgttacccagaatatcacggtggtccctgtgccgtctacaggactgatgactgctggtccgggtttggtaatcacgtccccctcaggctctcttgtgaccacagcatcatcagctcagaccttccccatttcggctcccatgattgtctcagctcttccccctggctcacaagccctgcaggttgtccctgacctctccaagaaggtagcatcgaccctaaccgaggaaggaggcggaggtggtggtggaggtggcagtgtggctcctaagccaccccggggccggaagaagaagcggatgctggaatcagggctgcccgagatgaatgacccttatgtcctctcccctgaggatgatgatgaccatcagaaagacggcaagacctacaggtgccggatgtgctcactgacattctactccaagtcggagatgcagatccactccaagtcacacaccgagaccaagccccacaagtgcccacattgctccaagaccttcgccaacagctcctacctggcccagcacatccgtatacactcaggggctaagccctacagttgtaacttctgtgagaaatccttccgccagctctcccaccttcagcagcacacccgaatccacactggtgatagaccatacaaatgtgcacacccaggctgtgagaaagccttcacacaactctccaatctgcagtcccacagacggcaacacaacaaagataaacccttcaagtgccacaactgtcatcgggcgtacacggatgcagcctcactagaggtgcacctgtctacgcacacagtgaagcatgccaaggtgtacacctgcactatctgcagtcgggcatacacatcagaaacataccttatgaaacatatgcgcaaacacaacccgcctgatcttcagcaacaggtgcaggcagcagcagcagcggcagcagtggcccaggcccaggctcaagctcaagcccaggctcaggctcaggctcaagcccaggcccaggcccaggcctcccaggcatcacagcagcagcagcagcagcagcagcagcagcagcagcagcaacagccaccaccacacttccagtctcctggggcagccccccagggtgggggtggtggggacagcaatcccaaccctccaccccagtgttcctttgacctgaccccgtataagacggcggagcatcataaggacatctgcctcactgtcaccaccagcaccatccaggtggagcacctggccagctcttagagatccgtgctgccacccactgggaagaggaagaagtagtcctggtgtcttctttctccaactcttggtgggaaaagtccttttcttccttgacaggccttggctccatctccttgggcctctgtcacggctttccttcacaggataccatcctttttctgaactcttcttcaaaaggaacatcagccctcctgattgcaaaggaatactgagctgatggtgtcatccagcagcctcccctcccaagcaaagcttctaaaactgggggtcggtgctcaagggaaggatttgctatgacctcatagaaccttgtccagtgtggccacttaccctatccttaccctccttatcctcaaagtttgggctgatgtaagactagaggctggccctcccagataacagagaaaagggagccccaaatgcaaccagcctcttgttctattcttgcctgcaaaagaacagaggtttctcaaatgcctcagtccctgagagccatttcttcccctacatcgtctcactttgcttcctattgactgctggtagaaggagatttggggtaggggctagacctccttttatttgaagggggcaagggctgagatgtggtccccaaggggccagaaattcccaagttggtcacaggtggcttagaagtgtgtgttatggttttacggatttccttgaagcctctctccttctctgcctacaaagacctatactctcaagtctccccaacccacccccaaggagctgtgggaggctttgtgtaatctgtgcaaactccaaaacaggggtgttgcggagaagggagagttcaaggtaaactcaaggactggacttagctccctaggtgccacagtcagatgccggacacggatttatatataaatatatatatataaatatattatacccactcatcacggccatctttgttgtaaccatttctgtgtttataaatgcattatctctgagaattttcatatttgatgttttgtttatttttgtcctttttttccctctctccacccctgtcctctagccacagcatttttctttttgtccttggggtgggggaggggggagggatggaattc

SEQ ID NO: 278058 - DNA, 2375 bp, Homo sapiens
gacaatgatctgggggaaatgaaataggattaggatcaggactgaacaacatgacgccatctcctttttctcccaatcctaggtccgggtttggtaatcacgtccccctcaggctctcttgtgaccacagcatcatcagctcagaccttccccatttcggctcccatgattgtctcagctcttccccctggctcacaagccctgcaggttgtccctgacctctccaagaaggtagcatcgaccctaaccgaggaaggaggcggaggtggtggtggaggtggcagtgtggctcctaagccaccccggggccggaagaagaagcggatgctggaatcagggctgcccgagatgaatgacccttatgtcctctcccctgaggatgatgatgaccatcagaaagacggcaagacctacaggtgccggatgtgctcactgacattctactccaagtcggagatgcagatccactccaagtcacacaccgagaccaagccccacaagtgcccacattgctccaagaccttcgccaacagctcctacctggcccagcacatccgtatacactcaggggctaagccctacagttgtaacttctgtgagaaatccttccgccagctctcccaccttcagcagcacacccgaatccacactggtgatagaccatacaaatgtgcacacccaggctgtgagaaagccttcacacaactctccaatctgcagtcccacagacggcaacacaacaaagataaacccttcaagtgccacaactgtcatcgggcgtacacggatgcagcctcactagaggtgcacctgtctacgcacacagtgaagcatgccaaggtgtacacctgcactatctgcagtcgggcatacacatcagaaacataccttatgaaacatatgcgcaaacacaacccgcctgatcttcagcaacaggtgcaggcagcagcagcagcggcagcagtggcccaggcccaggctcaagctcaagcccaggctcaggctcaggctcaagcccaggcccaggcccaggcctcccaggcatcacagcagcagcagcagcagcagcagcagcagcagcagcagcaacagccaccaccacacttccagtctcctggggcagccccccagggtgggggtggtggggacagcaatcccaaccctccaccccagtgttcctttgacctgaccccgtataagacggcggagcatcataaggacatctgcctcactgtcaccaccagcaccatccaggtggagcacctggccagctcttagagatccgtgctgccacccactgggaagaggaagaagtagtcctggtgtcttctttctccaactcttggtgggaaaagtccttttcttccttgacaggccttggctccatctccttgggcctctgtcacggctttccttcacaggataccatcctttttctgaactcttcttcaaaaggaacatcagccctcctgattgcaaaggaatactgagctgatggtgtcatccagcagcctcccctcccaagcaaagcttctaaaactgggggtcggtgctcaagggaaggatttgctatgacctcatagaaccttgtccagtgtggccacttaccctatccttaccctccttatcctcaaagtttgggctgatgtaagactagaggctggccctcccagataacagagaaaagggagccccaaatgcaaccagcctcttgttctattcttgcctgcaaaagaacagaggtttctcaaatgcctcagtccctgagagccatttcttcccctacatcgtctcactttgcttcctattgactgctggtagaaggagatttggggtaggggctagacctccttttatttgaagggggcaagggctgagatgtggtccccaaggggccagaaattcccaagttggtcacaggtggcttagaagtgtgtgttatggttttacggatttccttgaagcctctctccttctctgcctacaaagacctatactctcaagtctccccaacccacccccaaggagctgtgggaggctttgtgtaatctgtgcaaactccaaaacaggggtgttgcggagaagggagagttcaaggtaaactcaaggactggacttagctccctaggtgccacagtcagatgccggacacggatttatatataaatatatatatataaatatattatacccactcatcacggccatctttgttgtaaccatttctgtgtttataaatgcattatctctgagaattttcatatttgatgttttgtttatttttgtcctttttttccctctctccacccctgtcctctagccacagcatttttctttttgtccttggggtgggggaggggggagggatggaattc

SEQ ID NO: 278059 - DNA, 2309 bp, Homo sapiens
actgtgtgtgtgtccgtcccggaaccggaagtggttgtggaggagcgggcgatgggaaggaatgggggggtttagggggcgggtgcctgtctggtgggtggcagagttcagctccctggaggggaaggagggacgtcccaaggaagggtctttgagaaaggggtaggggacgacatcaggagaaggctcccaggaactgtctcaggggagcgaaggttttgaggggacagctggggtctccagtagatagaccacggtgcaggctgagggaggtacttcttggcacaaggcctcgggtaggcagggggcgaagtcctcgaagaagtggggggaaggctagaggaagtggctgggcctgaactggcactgtgcctgccacaaggtcttgtgcatcccccagccctcagctttgccttctgaagccactcctcaggggcacagaccctcctcctcctccatctctaatgttctctgacccctggttacctgtggcctgggaacgaacaaggaccagtctctgagcctaggagtgaaacccaaacgctggtgatagaattcgtcttagtttctgggaattggatttatttctcttgtatccacgtagagggtagcactagactgctgttattatatccacccgtctttggattgctggctggggggtctgcctgccttccagactgactgctgacaaataattcctgaggttctccacagttctctggtggctgcaccctgcctggcccctgtaacctagacaatttgtttacagaaagttcaggagccctggaaaggagaaggaataagacggcaggaggaagagagagagagggtagaatggaagaatctcacttcaattctaacccgtacttctggccttctatccccacagtctcaggtcagatcgagaacacaatgttcatcaacaagatgaaggatcagctgttgccagagaagggctgtggtctggccccacctcactaccccaccttgctgacagtgcctgcctcagtgtccctgccctcaggcatcagtatggacacagagtccaagtcagaccagctgaccccacacagccaagcgtccgttacccagaatatcacggtggtccctgtgccgtctacaggactgatgactgctggagtctcctgttctcagaggtggagaagagaagggagtcaatcaaggggtccgggtttggtaatcacgtccccctcaggctctcttgtgaccacagcatcatcagctcagaccttccccatttcggctcccatgattgtctcagctcttccccctggctcacaagccctgcaggttgtccctgacctctccaagaaggtagcatcgaccctaaccgaggaaggaggcggaggtggtggtggaggtggcagtgtggctcctaagccaccccggggccggaagaagaagcggatgctggaatcagggctgcccgagatgaatgacccttatgtcctctcccctgaggatgatgatgaccatcagaaagacggcaagacctacaggtgccggatgtgctcactgacattctactccaagtcggagatgcagatccactccaagtcacacaccgagaccaagccccacaagtgcccacattgctccaagaccttcgccaacagctcctacctggcccagcacatccgtatacactcaggggctaagccctacagttgtaacttctgtgagaaatccttccgccagctctcccaccttcagcagcacacccgaatccacactggtgatagaccatacaaatgtgcacacccaggctgtgagaaagccttcacacaactctccaatctgcagtcccacagacggcaacacaacaaagataaacccttcaagtgccacaactgtcatcgggcgtacacggatgcagcctcactagaggtgcacctgtctacgcacacagtgaagcatgccaaggtgtacacctgcactatctgcagtcgggcatacacatcagaaacataccttatgaaacatatgcgcaaacacaacccgcctgatcttcagcaacaggtgcaggcagcagcagcagcggcagcagtggcccaggcccaggctcaagctcaagcccaggctcaggctcaggctcaagcccaggcccaggcccaggcctcccaggcatcacagcagcagcagcagcagcagcagcagcagcagcagcagcaacagccaccaccacacttccagtctcctggggcagccccccagggtgggggtggttttcatagttactattttcttctgatttttattatctatttcgttaggccattgttttt

SEQ ID NO: 278060 - DNA, 1853 bp, Homo sapiens
actgtgtgtgtgtccgtcccggaaccggaagtggttgtggaggagcgggcgatgggaaggaatgggggggtttagggggcgggtgcctgtctggtgggtggcagagttcagctccctggaggggaaggagggacgtcccaaggaagggtctttgagaaaggggtaggggacgacatcaggagaaggctcccaggaactgtctcaggggagcgaaggttttgaggggacagctggggtctccagtagatagaccacggtgcaggctgagggaggtacttcttggcacaaggcctcgggtaggcagggggcgaagtcctcgaagaagtggggggaaggctagaggaagtggctgggcctgaactggcactgtgcctgccacaaggtcttgtgcatcccccagccctcagctttgccttctgaagccactcctcaggggcacagaccctcctcctcctccatctctaatgttctctgacccctggttacctgtggcctgggaacgaacaaggaccagtctctgagcctaggagtgaaacccaaacgctggtgatagaattcgtcttagtttctgggaattggatttatttctcttgtatccacgtagagggtagcactagactgctgttattatatccacccgtctttggattgctggctggggggtctgcctgccttccagactgactgctgacaaataattcctgaggttctccacagttctctggtggctgcaccctgcctggcccctgtaacctagacaatttgtttacagaaagttcaggagccctggaaaggagaaggaataagacggcaggaggaagagagagagagggtagaatggaagaatctcacttcaattctaacccgtacttctggccttctatccccacagtctcaggtcagatcgagaacacaatgttcatcaacaagatgaaggatcagctgttgccagagaagggctgtggtctggccccacctcactaccccaccttgctgacagtgcctgcctcagtgtccctgccctcaggcatcagtatggacacagagtccaagtcagaccagctgaccccacacagccaagcgtccgttacccagaatatcacggtggtccctgtgccgtctacaggactgatgactgctggagtctcctgttctcagaggtggagaagagaagggagtcaatcaaggggtccgggtttggtaatcacgtccccctcaggctctcttgtgaccacagcatcatcagctcagaccttccccatttcggctcccatgattgtctcagctcttccccctggctcacaagccctgcaggttgtccctgacctctccaagaaggtagcatcgaccctaaccgaggaaggaggcggaggtggtggtggaggtggcagtgtggctcctaagccaccccggggccggaagaagaagcggatgctggaatcagggctgcccgagatgaatgacccttatgtcctctcccctgaggatgatgatgaccatcagaaagacggcaagacctacaggtgccggatgtgctcactgacattctactccaagtcggagatgcagatccactccaagtcacacaccgagaccaagccccacaagtgcccacattgctccaagaccttcgccaacagctcctacctggcccagcacatccgtatacactcaggggctaagccctacagttgtaacttctgtgagaaatccttccgccagctctcccaccttcagcagcacacccgaatccacactggtgatagaccatacaaatgtgcacacccaggctgtgagaaagccttcacacaactctccaatctgcagtctctaatcactagtgaattccggcc

SEQ ID NO: 278061 - DNA, 1817 bp, Homo sapiens
tactgggattacaggtgtgagccaccgcacctggcccagttagatattttccatgagactccagaaaaggttgtaaagttgtttcattcaggggtctttgaaaaaaatagcagctcattcctttgccagttgaatgttgagtgacttctaaaggttcctctcttttttttctcagtagtgagccactgaaagtgctacttgagttttgctcagtcttggctccagaaaaccagtataaagcttactctgcttacagcagaatcagagcctggggtgctagttacaagtaatctcttttccttcctctttatccctcaacttctttttaccatctccctcaggaaacataccttatgaaacatatgcgcaaacacaacccgcctgatcttcagcaacaggtgcaggcagcagcagcagcggcagcagtggcccaggcccaggctcaagctcaagcccaggctcaggctcaggctcaagcccaggcccaggcccaggcctcccaggcatcacagcagcagcagcagcagcagcagcagcagcagcagcagcaacagccaccaccacacttccagtctcctggggcagccccccagggtgggggtggtggggacagcaatcccaaccctccaccccagtgttcctttgacctgaccccgtataagacggcggagcatcataaggacatctgcctcactgtcaccaccagcaccatccaggtggagcacctggccagctcttagagatccgtgctgccacccactgggaagaggaagaagtagtcctggtgtcttctttctccaactcttggtgggaaaagtcctttttccatctccttgggcctctgtcacggctttccttcacaggataccatcctttttctgaactcttcttcaaaaggaacatcagccctcctgattgcaaaggaatactgagctgatggtgtcatccagcagcctcccctcccaagcaaagcttctaaaactgggggtcggtgctcaagggaaggatttgctatgacctcatagaaccttgtccagtgtggccacttaccctatccttaccctccttatcctcaaagtttgggctgatgtaagactagaggctggccctcccagataacagagaaaagggagccccaaatgcaaccagcctcttgttctattcttgcctgcaaaagaacagaggtttctcaaatgcctcagtccctgagagccatttcttcccctacatcgtctcactttgcttcctattgactgctggtagaaggagatttggggtaggggctagacctccttttatttgaagggggcaagggctgagatgtggtccccaaggggccagaaattcccaagttggtcacaggtggcttagaagtgtgtgttatggttttacggatttccttgaagcctctctccttctctgcctacaaagacctatactctcaagtctccccaacccacccccaaggagctgtgggaggctttgtgtaatctgtgcaaactccaaaacaggggtgttgcggagaagggagagttcaaggtaaactcaaggactggacttagctccctaggtgccacagtcagatgccggacacggatttatatataaatatatatatataaatatattatacccactcatcacggccatctttgttgtaaccatttctgtgtttataaatgcattatctctgagaattttcatatttgatgttttgtttatttttgtcctttttttccctctctccacccctgtcctctagccacagcatttttctttttgtccttggggtgggggaggggggagggatggaattc

SEQ ID NO: 278062 - DNA, 454 bp, Homo sapiens
cagcagagaggagcctcagcttgagctgagtgatgcaggcattgaccagaagcaaatcatcagtacctgatccacatcagagaggaaggctggtgcctcttggaggcccatctgatgtgcctccttaggagagcaggatgggcctggagaagatttgttgagccagttcctaaatggtcttgctgacattctttcccttttttctcttatcctgtgcagaatccacactggtgatagaccatacaaatgtgcacacccaggctgtgagaaagccttcacacaactctccaatctgcaggtaaatgttccaccctccacacaagaccttgagtctgagacatggggccatttgaatagtatcgtggttctcaaatgttttcaggactcctttacactcaaacattattgagggacccaaagagtttttgtttatgtgggtaatagctgtctacat

SEQ ID NO: 278063 - DNA, 799 bp, Homo sapiens
gacaatgatctgggggaaatgaaataggattaggatcaggactgaacaacatgacgccatctcctttttctcccaatcctaggtccgggtttggtaatcacgtccccctcaggctctcttgtgaccacagcatcatcagctcagaccttccccatttcggctcccatgattgtctcagctcttccccctggctcacaagccctgcaggttgtccctgacctctccaagaaggtagcatcgaccctaaccgaggaaggaggcggaggtggtggtggaggtggcagtgtggctcctaagccaccccggggccggaagaagaagcggatgctggaatcagggctgcccgagatgaatgacccttatgtcctctcccctgaggatgatgatgaccatcagaaagacggcaagacctacaggtgccggatgtgctcactgacattctactccaagtcggagatgcagatccactccaagtcacacaccgagaccaagccccacaagtgcccacattgctccaagaccttcgccaacagctcctacctggcccagcacatccgtatacactcaggggctaagccctacagttgtaacttctgtgagaaatccttccgccagctctcccaccttcagcagcacacccggtaaggctgctcttggtttaccccaccacctggccgtgaaccctaagaccatgttgcctgcacctactcctctctccacatgtattattctttccctttcacctttgcccattggtagcctcaacctcctattactgtctgtggaaattatatatcct

SEQ ID NO: 278064 - DNA, 3482 bp, Homo sapiens
actgtgtgtgtgtccgtcccggaaccggaagtggttgtggaggagcgggcgatgggaaggaatgggggggtttagggggcgggtgcctgtctggtgggtggcagagttcagctccctggaggggaaggagggacgtcccaaggaagggtctttgagaaaggggtaggggacgacatcaggagaaggctcccaggaactgtctcaggggagcgaaggttttgaggggacagctggggtctccagtagatagaccacggtgcaggctgagggaggtacttcttggcacaaggcctcgggtaggcagggggcgaagtcctcgaagaagtggggggaaggctagaggaagtggctgggcctgaactggcactgtgcctgccacaaggtcttgtgcatcccccagccctcagctttgccttctgaagccactcctcaggggcacagaccctcctcctcctccatctctaatgttctctgacccctggttacctgtggcctgggaacgaacaaggaccagtctctgagcctaggagtgaaacccaaacgctggtgatagaattcgtcttagtttctgggaattggatttatttctcttgtatccacgtagagggtagcactagactgctgttattatatccacccgtctttggattgctggctggggggtctgcctgccttccagactgactgctgacaaataattcctgaggttctccacagttctctggtggctgcaccctgcctggcccctgtaacctagacaatttgtttacagaaagttcaggagccctggaaaggagaaggaataagacggcaggaggaagagagagagagggtagaatggaagaatctcacttcaattctaacccgtacttctggccttctatccccacagtctcaggtcagatcgagaacacaatgttcatcaacaagatgaaggatcagctgttgccagagaagggctgtggtctggccccacctcactaccccaccttgctgacagtgcctgcctcagtgtccctgccctcaggcatcagtatggacacagagtccaagtcagaccagctgaccccacacagccaagcgtccgttacccagaatatcacggtggtccctgtgccgtctacaggactgatgactgctggagtctcctgttctcagaggtggagaagagaagggagtcaatcaaggggtccgggtttggtaatcacgtccccctcaggctctcttgtgaccacagcatcatcagctcagaccttccccatttcggctcccatgattgtctcagctcttccccctggctcacaagccctgcaggttgtccctgacctctccaagaaggtagcatcgaccctaaccgaggaaggaggcggaggtggtggtggaggtggcagtgtggctcctaagccaccccggggccggaagaagaagcggatgctggaatcagggctgcccgagatgaatgacccttatgtcctctcccctgaggatgatgatgaccatcagaaagacggcaagacctacaggtgccggatgtgctcactgacattctactccaagtcggagatgcagatccactccaagtcacacaccgagaccaagccccacaagtgcccacattgctccaagaccttcgccaacagctcctacctggcccagcacatccgtatacactcaggggctaagccctacagttgtaacttctgtgagaaatccttccgccagctctcccaccttcagcagcacacccgaatccacactggtgatagaccatacaaatgtgcacacccaggctgtgagaaagccttcacacaactctccaatctgcagtcccacagacggcaacacaacaaagataaacccttcaagtgccacaactgtcatcgggcgtacacggatgcagcctcactagaggtgcacctgtctacgcacacagtgaagcatgccaaggtgtacacctgcactatctgcagtcgggcatacacatcagaaacataccttatgaaacatatgcgcaaacacaacccgcctgatcttcagcaacaggtgcaggcagcagcagcagcggcagcagtggcccaggcccaggctcaagctcaagcccaggctcaggctcaggctcaagcccaggcccaggcccaggcctcccaggcatcacagcagcagcagcagcagcagcagcagcagcagcagcagcaacagccaccaccacacttccagtctcctggggcagccccccagggtgggggtggtggggacagcaatcccaaccctccaccccagtgttcctttgacctgaccccgtataagacggcggagcatcataaggacatctgcctcactgtcaccaccagcaccatccaggtggagcacctggccagctcttagagatccgtgctgccacccactgggaagaggaagaagtagtcctggtgtcttctttctccaactcttggtgggaaaagtccttttcttccttgacaggccttggctccatctccttgggcctctgtcacggctttccttcacaggataccatcctttttctgaactcttcttcaaaaggaacatcagccctcctgattgcaaaggaatactgagctgatggtgtcatccagcagcctcccctcccaagcaaagcttctaaaactgggggtcggtgctcaagggaaggatttgctatgacctcatagaaccttgtccagtgtggccacttaccctatccttaccctccttatcctcaaagtttgggctgatgtaagactagaggctggccctcccagataacagagaaaagggagccccaaatgcaaccagcctcttgttctattcttgcctgcaaaagaacagaggtttctcaaatgcctcagtccctgagagccatttcttcccctacatcgtctcactttgcttcctattgactgctggtagaaggagatttggggtaggggctagacctccttttatttgaagggggcaagggctgagatgtggtccccaaggggccagaaattcccaagttggtcacaggtggcttagaagtgtgtgttatggttttacggatttccttgaagcctctctccttctctgcctacaaagacctatactctcaagtctccccaacccacccccaaggagctgtgggaggctttgtgtaatctgtgcaaactccaaaacaggggtgttgcggagaagggagagttcaaggtaaactcaaggactggacttagctccctaggtgccacagtcagatgccggacacggatttatatataaatatatatatataaatatattatacccactcatcacggccatctttgttgtaaccatttctgtgtttataaatgcattatctctgagaattttcatatttgatgttttgtttatttttgtcctttttttccctctctccacccctgtcctctagccacagcatttttctttttgtccttggggtgggggaggggggagggatggaattc

SEQ ID NO: 278065 - DNA, 3575 bp, Homo sapiens
actgtgtgtgtgtccgtcccggaaccggaagtggttgtggaggagcgggcgatgggaaggaatgggggggtttagggggcgggtgcctgtctggtgggtggcagagttcagctccctggaggggaaggagggacgtcccaaggaagggtctttgagaaaggggtaggggacgacatcaggagaaggctcccaggaactgtctcaggggagcgaaggttttgaggggacagctggggtctccagtagatagaccacggtgcaggctgagggaggtacttcttggcacaaggcctcgggtaggcagggggcgaagtcctcgaagaagtggggggaaggctagaggaagtggctgggcctgaactggcactgtgcctgccacaaggtcttgtgcatcccccagccctcagctttgccttctgaagccactcctcaggggcacagaccctcctcctcctccatctctaatgttctctgacccctggttacctgtggcctgggaacgaacaaggaccagtctctgagcctaggagtgaaacccaaacgctggtgatagaattcgtcttagtttctgggaattggatttatttctcttgtatccacgtagagggtagcactagactgctgttattatatccacccgtctttggattgctggctggggggtctgcctgccttccagactgactgctgacaaataattcctgaggttctccacagttctctggtggctgcaccctgcctggcccctgtaacctagacaatttgtttacagaaagttcaggagccctggaaaggagaaggaataagacggcaggaggaagagagagagagggtagaatggaagaatctcacttcaattctaacccgtacttctggccttctatccccacagtctcaggtcagatcgagaacacaatgttcatcaacaagatgaaggatcagctgttgccagagaagggctgtggtctggccccacctcactaccccaccttgctgacagtgcctgcctcagtgtccctgccctcaggcatcagtatggacacagagtccaagtcagaccagctgaccccacacagccaagcgtccgttacccagaatatcacggtggtccctgtgccgtctacaggactgatgactgctggagtctcctgttctcagaggtggagaagagaagggagtcaatcaaggggtccgggtttggtaatcacgtccccctcaggctctcttgtgaccacagcatcatcagctcagaccttccccatttcggctcccatgattgtctcagctcttccccctggctcacaagccctgcaggttgtccctgacctctccaagaaggtagcatcgaccctaaccgaggaaggaggcggaggtggtggtggaggtggcagtgtggctcctaagccaccccggggccggaagaagaagcggatgctggaatcagggctgcccgagatgaatgacccttatgtcctctcccctgaggatgatgatgaccatcagaaagacggcaagacctacaggagcgaagggaactgcggcacaggaaatggacagagccttgggctcatggattcagttcccggctccaccacgaatttgctgtgtgaccctgggtgccggatgtgctcactgacattctactccaagtcggagatgcagatccactccaagtcacacaccgagaccaagccccacaagtgcccacattgctccaagaccttcgccaacagctcctacctggcccagcacatccgtatacactcaggggctaagccctacagttgtaacttctgtgagaaatccttccgccagctctcccaccttcagcagcacacccgaatccacactggtgatagaccatacaaatgtgcacacccaggctgtgagaaagccttcacacaactctccaatctgcagtcccacagacggcaacacaacaaagataaacccttcaagtgccacaactgtcatcgggcgtacacggatgcagcctcactagaggtgcacctgtctacgcacacagtgaagcatgccaaggtgtacacctgcactatctgcagtcgggcatacacatcagaaacataccttatgaaacatatgcgcaaacacaacccgcctgatcttcagcaacaggtgcaggcagcagcagcagcggcagcagtggcccaggcccaggctcaagctcaagcccaggctcaggctcaggctcaagcccaggcccaggcccaggcctcccaggcatcacagcagcagcagcagcagcagcagcagcagcagcagcagcaacagccaccaccacacttccagtctcctggggcagccccccagggtgggggtggtggggacagcaatcccaaccctccaccccagtgttcctttgacctgaccccgtataagacggcggagcatcataaggacatctgcctcactgtcaccaccagcaccatccaggtggagcacctggccagctcttagagatccgtgctgccacccactgggaagaggaagaagtagtcctggtgtcttctttctccaactcttggtgggaaaagtccttttcttccttgacaggccttggctccatctccttgggcctctgtcacggctttccttcacaggataccatcctttttctgaactcttcttcaaaaggaacatcagccctcctgattgcaaaggaatactgagctgatggtgtcatccagcagcctcccctcccaagcaaagcttctaaaactgggggtcggtgctcaagggaaggatttgctatgacctcatagaaccttgtccagtgtggccacttaccctatccttaccctccttatcctcaaagtttgggctgatgtaagactagaggctggccctcccagataacagagaaaagggagccccaaatgcaaccagcctcttgttctattcttgcctgcaaaagaacagaggtttctcaaatgcctcagtccctgagagccatttcttcccctacatcgtctcactttgcttcctattgactgctggtagaaggagatttggggtaggggctagacctccttttatttgaagggggcaagggctgagatgtggtccccaaggggccagaaattcccaagttggtcacaggtggcttagaagtgtgtgttatggttttacggatttccttgaagcctctctccttctctgcctacaaagacctatactctcaagtctccccaacccacccccaaggagctgtgggaggctttgtgtaatctgtgcaaactccaaaacaggggtgttgcggagaagggagagttcaaggtaaactcaaggactggacttagctccctaggtgccacagtcagatgccggacacggatttatatataaatatatatatataaatatattatacccactcatcacggccatctttgttgtaaccatttctgtgtttataaatgcattatctctgagaattttcatatttgatgttttgtttatttttgtcctttttttccctctctccacccctgtcctctagccacagcatttttctttttgtccttggggtgggggaggggggagggatggaattc

SEQ ID NO: 278066 - DNA, 3151 bp, Homo sapiens
ctttctccattagcgccccccctacattgctatttccctccctccccccttttcgtttccggcgctcccgccttctctccgcagagctcttctctgagcctgttggggggagggaggggggcgtggaggaactggggttcgcgggagcacgagctgcagcaccacttccgggtgagtgcaaggggagggcagcaaggagggggggccacccactacctcgcgcccccgccctgcgggtgtctcgcgcgcgttccgtgcgtgtgagtgtgtgggtctgtctcgctccagaagtgcgtgcccgcgcgctgcgccttgcgctttttcccctccctcgccccttcctggtcctcccaccctcctaggctccctcctttcccagcaaacgccgcccctcccgcgccctggctcaggctctggcgccgccgcagccgtcgccgcccgaaagttcaggagccctggaaaggagaaggaataagacggcaggaggaagagagagagagggtagaatggaagaatctcacttcaattctaacccgtacttctggccttctatccccacagtctcaggtcagatcgagaacacaatgttcatcaacaagatgaaggatcagctgttgccagagaagggctgtggtctggccccacctcactaccccaccttgctgacagtgcctgcctcagtgtccctgccctcaggcatcagtatggacacagagtccaagtcagaccagctgaccccacacagccaagcgtccgttacccagaatatcacggtggtccctgtgccgtctacaggactgatgactgctggagtctcctgttctcagaggtggagaagagaagggagtcaatcaaggggtccgggtttggtaatcacgtccccctcaggctctcttgtgaccacagcatcatcagctcagaccttccccatttcggctcccatgattgtctcagctcttccccctggctcacaagccctgcaggttgtccctgacctctccaagaaggtagcatcgaccctaaccgaggaaggaggcggaggtggtggtggaggtggcagtgtggctcctaagccaccccggggccggaagaagaagcggatgctggaatcagggctgcccgagatgaatgacccttatgtcctctcccctgaggatgatgatgaccatcagaaagacggcaagacctacaggtgccggatgtgctcactgacattctactccaagtcggagatgcagatccactccaagtcacacaccgagaccaagccccacaagtgcccacattgctccaagaccttcgccaacagctcctacctggcccagcacatccgtatacactcaggggctaagccctacagttgtaacttctgtgagaaatccttccgccagctctcccaccttcagcagcacacccgaatccacactggtgatagaccatacaaatgtgcacacccaggctgtgagaaagccttcacacaactctccaatctgcagtcccacagacggcaacacaacaaagataaacccttcaagtgccacaactgtcatcgggcgtacacggatgcagcctcactagaggtgcacctgtctacgcacacagtgaagcatgccaaggtgtacacctgcactatctgcagtcgggcatacacatcagaaacataccttatgaaacatatgcgcaaacacaacccgcctgatcttcagcaacaggtgcaggcagcagcagcagcggcagcagtggcccaggcccaggctcaagctcaagcccaggctcaggctcaggctcaagcccaggcccaggcccaggcctcccaggcatcacagcagcagcagcagcagcagcagcagcagcagcagcagcaacagccaccaccacacttccagtctcctggggcagccccccagggtgggggtggtggggacagcaatcccaaccctccaccccagtgttcctttgacctgaccccgtataagacggcggagcatcataaggacatctgcctcactgtcaccaccagcaccatccaggtggagcacctggccagctcttagagatccgtgctgccacccactgggaagaggaagaagtagtcctggtgtcttctttctccaactcttggtgggaaaagtccttttcttccttgacaggccttggctccatctccttgggcctctgtcacggctttccttcacaggataccatcctttttctgaactcttcttcaaaaggaacatcagccctcctgattgcaaaggaatactgagctgatggtgtcatccagcagcctcccctcccaagcaaagcttctaaaactgggggtcggtgctcaagggaaggatttgctatgacctcatagaaccttgtccagtgtggccacttaccctatccttaccctccttatcctcaaagtttgggctgatgtaagactagaggctggccctcccagataacagagaaaagggagccccaaatgcaaccagcctcttgttctattcttgcctgcaaaagaacagaggtttctcaaatgcctcagtccctgagagccatttcttcccctacatcgtctcactttgcttcctattgactgctggtagaaggagatttggggtaggggctagacctccttttatttgaagggggcaagggctgagatgtggtccccaaggggccagaaattcccaagttggtcacaggtggcttagaagtgtgtgttatggttttacggatttccttgaagcctctctccttctctgcctacaaagacctatactctcaagtctccccaacccacccccaaggagctgtgggaggctttgtgtaatctgtgcaaactccaaaacaggggtgttgcggagaagggagagttcaaggtaaactcaaggactggacttagctccctaggtgccacagtcagatgccggacacggatttatatataaatatatatatataaatatattatacccactcatcacggccatctttgttgtaaccatttctgtgtttataaatgcattatctctgagaattttcatatttgatgttttgtttatttttgtcctttttttccctctctccacccctgtcctctagccacagcatttttctttttgtccttggggtgggggaggggggagggatggaattc

SEQ ID NO: 278067 - DNA, 2872 bp, Homo sapiens
actgtgtgtgtgtccgtcccggaaccggaagtggttgtggaggagcgggcgatgggaaggaatgggggggtttagggggcgggtgcctgtctggtgggtggcagagttcagctccctggaggggaaggagggacgtcccaaggaagggtctttgagaaagggaaagttcaggagccctggaaaggagaaggaataagacggcaggaggaagagagagagagggtagaatggaagaatctcacttcaattctaacccgtacttctggccttctatccccacagtctcaggtcagatcgagaacacaatgttcatcaacaagatgaaggatcagctgttgccagagaagggctgtggtctggccccacctcactaccccaccttgctgacagtgcctgcctcagtgtccctgccctcaggcatcagtatggacacagagtccaagtcagaccagctgaccccacacagccaagcgtccgttacccagaatatcacggtggtccctgtgccgtctacaggactgatgactgctggagtctcctgttctcagaggtggagaagagaagggagtcaatcaaggggtccgggtttggtaatcacgtccccctcaggctctcttgtgaccacagcatcatcagctcagaccttccccatttcggctcccatgattgtctcagctcttccccctggctcacaagccctgcaggttgtccctgacctctccaagaaggtagcatcgaccctaaccgaggaaggaggcggaggtggtggtggaggtggcagtgtggctcctaagccaccccggggccggaagaagaagcggatgctggaatcagggctgcccgagatgaatgacccttatgtcctctcccctgaggatgatgatgaccatcagaaagacggcaagacctacaggtgccggatgtgctcactgacattctactccaagtcggagatgcagatccactccaagtcacacaccgagaccaagccccacaagtgcccacattgctccaagaccttcgccaacagctcctacctggcccagcacatccgtatacactcaggggctaagccctacagttgtaacttctgtgagaaatccttccgccagctctcccaccttcagcagcacacccgaatccacactggtgatagaccatacaaatgtgcacacccaggctgtgagaaagccttcacacaactctccaatctgcagtcccacagacggcaacacaacaaagataaacccttcaagtgccacaactgtcatcgggcgtacacggatgcagcctcactagaggtgcacctgtctacgcacacagtgaagcatgccaaggtgtacacctgcactatctgcagtcgggcatacacatcagaaacataccttatgaaacatatgcgcaaacacaacccgcctgatcttcagcaacaggtgcaggcagcagcagcagcggcagcagtggcccaggcccaggctcaagctcaagcccaggctcaggctcaggctcaagcccaggcccaggcccaggcctcccaggcatcacagcagcagcagcagcagcagcagcagcagcagcagcagcaacagccaccaccacacttccagtctcctggggcagccccccagggtgggggtggtggggacagcaatcccaaccctccaccccagtgttcctttgacctgaccccgtataagacggcggagcatcataaggacatctgcctcactgtcaccaccagcaccatccaggtggagcacctggccagctcttagagatccgtgctgccacccactgggaagaggaagaagtagtcctggtgtcttctttctccaactcttggtgggaaaagtccttttcttccttgacaggccttggctccatctccttgggcctctgtcacggctttccttcacaggataccatcctttttctgaactcttcttcaaaaggaacatcagccctcctgattgcaaaggaatactgagctgatggtgtcatccagcagcctcccctcccaagcaaagcttctaaaactgggggtcggtgctcaagggaaggatttgctatgacctcatagaaccttgtccagtgtggccacttaccctatccttaccctccttatcctcaaagtttgggctgatgtaagactagaggctggccctcccagataacagagaaaagggagccccaaatgcaaccagcctcttgttctattcttgcctgcaaaagaacagaggtttctcaaatgcctcagtccctgagagccatttcttcccctacatcgtctcactttgcttcctattgactgctggtagaaggagatttggggtaggggctagacctccttttatttgaagggggcaagggctgagatgtggtccccaaggggccagaaattcccaagttggtcacaggtggcttagaagtgtgtgttatggttttacggatttccttgaagcctctctccttctctgcctacaaagacctatactctcaagtctccccaacccacccccaaggagctgtgggaggctttgtgtaatctgtgcaaactccaaaacaggggtgttgcggagaagggagagttcaaggtaaactcaaggactggacttagctccctaggtgccacagtcagatgccggacacggatttatatataaatatatatatataaatatattatacccactcatcacggccatctttgttgtaaccatttctgtgtttataaatgcattatctctgagaattttcatatttgatgttttgtttatttttgtcctttttttccctctctccacccctgtcctctagccacagcatttttctttttgtccttggggtgggggaggggggagggatggaattc

SEQ ID NO: 278068 - DNA, 1964 bp, Homo sapiens
gagttttgaccctgtgggccccctgtgaaggtcttagtgttccctaaagatccccatgcctcattttaagaaccactggactggtgagacgggcataagctgtcttgggatcctggtatgtgctacatgaggtatgcttccacccttagcctgtagcttctcaagtttcatttgaaacaatttctactttcttcagatagagggagaagctgggaggcctgacacctacctttttgctttccatcgaggtcaagggggcaggaggaaagagtacaatgtattcattctggtttctcccaattttctcagtcccacagacggcaacacaacaaagataaacccttcaagtgccacaactgtcatcgggcgtacacggatgcagcctcactagaggtgcacctgtctacgcacacagtgaagcatgccaaggtgtacacctgcactatctgcagtcgggcatacacatcagaaacataccttatgaaacatatgcgcaaacacaacccgcctgatcttcagcaacaggtgcaggcagcagcagcagcggcagcagtggcccaggcccaggctcaagctcaagcccaggctcaggctcaggctcaagcccaggcccaggcccaggcctcccaggcatcacagcagcagcagcagcagcagcagcagcagcagcagcagcaacagccaccaccacacttccagtctcctggggcagccccccagggtgggggtggtggggacagcaatcccaaccctccaccccagtgttcctttgacctgaccccgtataagacggcggagcatcataaggacatctgcctcactgtcaccaccagcaccatccaggtggagcacctggccagctcttagagatccgtgctgccacccactgggaagaggaagaagtagtcctggtgtcttctttctccaactcttggtgggaaaagtccttttcttccttgacaggccttggctccatctccttgggcctctgtcacggctttccttcacaggataccatcctttttctgaactcttcttcaaaaggaacatcagccctcctgattgcaaaggaatactgagctgatggtgtcatccagcagcctcccctcccaagcaaagcttctaaaactgggggtcggtgctcaagggaaggatttgctatgacctcatagaaccttgtccagtgtggccacttaccctatccttaccctccttatcctcaaagtttgggctgatgtaagactagaggctggccctcccagataacagagaaaagggagccccaaatgcaaccagcctcttgttctattcttgcctgcaaaagaacagaggtttctcaaatgcctcagtccctgagagccatttcttcccctacatcgtctcactttgcttcctattgactgctggtagaaggagatttggggtaggggctagacctccttttatttgaagggggcaagggctgagatgtggtccccaaggggccagaaattcccaagttggtcacaggtggcttagaagtgtgtgttatggttttacggatttccttgaagcctctctccttctctgcctacaaagacctatactctcaagtctccccaacccacccccaaggagctgtgggaggctttgtgtaatctgtgcaaactccaaaacaggggtgttgcggagaagggagagttcaaggtaaactcaaggactggacttagctccctaggtgccacagtcagatgccggacacggatttatatataaatatatatatataaatatattatacccactcatcacggccatctttgttgtaaccatttctgtgtttataaatgcattatctctgagaattttcatatttgatgttttgtttatttttgtcctttttttccctctctccacccctgtcctctagccacagcatttttctttttgtccttggggtgggggaggggggagggatggaattc

SEQ ID NO: 278069 - DNA, 1837 bp, Homo sapiens
tactgggattacaggtgtgagccaccgcacctggcccagttagatattttccatgagactccagaaaaggttgtaaagttgtttcattcaggggtctttgaaaaaaatagcagctcattcctttgccagttgaatgttgagtgacttctaaaggttcctctcttttttttctcagtagtgagccactgaaagtgctacttgagttttgctcagtcttggctccagaaaaccagtataaagcttactctgcttacagcagaatcagagcctggggtgctagttacaagtaatctcttttccttcctctttatccctcaacttctttttaccatctccctcaggaaacataccttatgaaacatatgcgcaaacacaacccgcctgatcttcagcaacaggtgcaggcagcagcagcagcggcagcagtggcccaggcccaggctcaagctcaagcccaggctcaggctcaggctcaagcccaggcccaggcccaggcctcccaggcatcacagcagcagcagcagcagcagcagcagcagcagcagcagcaacagccaccaccacacttccagtctcctggggcagccccccagggtgggggtggtggggacagcaatcccaaccctccaccccagtgttcctttgacctgaccccgtataagacggcggagcatcataaggacatctgcctcactgtcaccaccagcaccatccaggtggagcacctggccagctcttagagatccgtgctgccacccactgggaagaggaagaagtagtcctggtgtcttctttctccaactcttggtgggaaaagtccttttcttccttgacaggccttggctccatctccttgggcctctgtcacggctttccttcacaggataccatcctttttctgaactcttcttcaaaaggaacatcagccctcctgattgcaaaggaatactgagctgatggtgtcatccagcagcctcccctcccaagcaaagcttctaaaactgggggtcggtgctcaagggaaggatttgctatgacctcatagaaccttgtccagtgtggccacttaccctatccttaccctccttatcctcaaagtttgggctgatgtaagactagaggctggccctcccagataacagagaaaagggagccccaaatgcaaccagcctcttgttctattcttgcctgcaaaagaacagaggtttctcaaatgcctcagtccctgagagccatttcttcccctacatcgtctcactttgcttcctattgactgctggtagaaggagatttggggtaggggctagacctccttttatttgaagggggcaagggctgagatgtggtccccaaggggccagaaattcccaagttggtcacaggtggcttagaagtgtgtgttatggttttacggatttccttgaagcctctctccttctctgcctacaaagacctatactctcaagtctccccaacccacccccaaggagctgtgggaggctttgtgtaatctgtgcaaactccaaaacaggggtgttgcggagaagggagagttcaaggtaaactcaaggactggacttagctccctaggtgccacagtcagatgccggacacggatttatatataaatatatatatataaatatattatacccactcatcacggccatctttgttgtaaccatttctgtgtttataaatgcattatctctgagaattttcatatttgatgttttgtttatttttgtcctttttttccctctctccacccctgtcctctagccacagcatttttctttttgtccttggggtgggggaggggggagggatggaattc

SEQ ID NO: 278070 - DNA, 654 bp, Homo sapiens
aaggaggagcgcacgaggaggaggaggggtgttggcgcgtgtgtttcacactcgcctccctggcgttcgcgagctgacccgaggagtggtaatctcacgcggcaaagcagggaggaagaaaaaaaggagacaaaagaaaaaaagacttttatctgggcagaaagtcacaatgcctagcggccaaacgtttgtgagcggtgaagttggttgactgctcaagtttgcagagcttcagcagtaggttactttctctggacggtttctgctatctttgctcttttcgagctctagcatcgtttgcaaatatttcaatgacttggaccaagtgcagagttttacttcatagctcacccttttagattcggagtacagaaaaaggcatcgtggagttttagggttggttttcatcaatcctttccaaggcctttactttctacatggagaaacgtgtagagggagaggttgtgaattgccaaagacatgccgttagattccagatctcctgtgtttgaccaaagttcttgaccaaagttcttaatatcttatttgaaccaaattatattgtatttggaatattgggtagccacaggcccttggacttcagtgatattccaaactattgatggcaaatgacattatggagatctgagtaaa

SEQ ID NO: 278071 - DNA, 462 bp, Homo sapiens
actaaagagatttcaagttttatttagcaacttgtactctacctttttgcaaaactttatgaagattgcatcactaaagagagcaagcacacagatttggtaagttcagtaatgtttacaaaataataggtgatgcatgccaacattgttaatactgagattaggaggggctttccaggacttaagttacaaatcaatgttctcttcaccactattcaggaaaaaaaaaaatctgacgatcaaagaagcccctcctcacactaccaaaggtttaaagacaacggaaaaaagtggtatagacagatcctcaaagcctctcaccatgtcctattctcaatgagacatagcctaagaaaacggaatctaaaagcaagacagatacattaccaacaaatacagtagtttgtagatgaaaacaaaaaatgatttaacaaaaataaaataatccattgaaagctgata

SEQ ID NO: 278072 - DNA, 515 bp, Homo sapiens
aaggaggagcgcacgaggaggaggaggggtgttggcgcgtgtgtttcacactcgcctccctggcgttcgcgagctgacccgaggagtggtaatctcacgcggcaaagcagggaggaagaaaaaaaggagacaaaagaaaaaaagacttttatctgggcagaaagtcacaatgcctagcggccaaacgtttgtgagcggtgaagttggttgactgctcaagtttgcagagcttcagcaattgcatcactaaagagagcaagcacacagatttggaaaaaaaaaaatctgacgatcaaagaagcccctcctcacactaccaaaggtttaaagacaacggaaaaaagtggtatagacagatcctcaaagcctctcaccatgtcctattctcaatgagacatagcctaagaaaacggaatctaaaagcaagacagatacattaccaacaaatacagtagtttgtagatgaaaacaaaaaatgatttaacaaaaataaaataatccattgaaagctgata

SEQ ID NO: 278073 - DNA, 2034 bp, Homo sapiens
taattataaaagaggtttaattttcgactcacagttccacatggctgggaaggcctcaggaaacttaacaatcacggtggaaggcacctcttcacagggcggcaagagtgagaatgagagccagtaggggaaatgccaggcacttataaaaccatcagatctcatgaaagctcactatcatgagaatagcatgagggaaactgcccccatgattcaattacctaccacaacacctgggaattatgaggattaaaattcaagatgagacttgggtggggatacatccaaaccatatcaatccatatatggctgaaatttacatcagacaatggtaaatatctatgttcaaagtccattgatgctttgagattctgagctattttctggtatggaaaacagacttagcatctccatctccattggatgtatgctgcctcctgtgatgatcaaggaatgcaatggttctcccaagtccacagtgcacatttgccttaaagtgcctgctgcaattttctggtcgtcggctccaaccctggctaagccaacacaaagtgtctcctcggtaactgctattaaaaaaaaaagatactgctattcaattcagcaagtgcatcatccatccaacagtcaaacaaacattagtaccacaagtacatttcaagaagccccaaatatcttaaatctcttttgccacttatggaccagttatccattaattcatccaagggattttctaaatcatttgtattacctaatataaaagagtacttccaaactttaccctttcagaattacaaaggcttacactaagcttttaggacttgacaagctatacttacactctacaattgcacagcattcgtttttaaataagttctgagtaaacaatgtttattacacacaggtttttaataacttgcttgagataatgttcatattgacctagatatactgaagaaaccatgagattatgaaataaattcacagatttgagtttctgccttgccatccaattagctgtgtgataaacttcagttttctcattttttaaaatgtaatactccctcttttaaatcatggtaatgagagctaagatagtagatatgagactagtagactatagattccttaacaaataatgagcatttggcactatttatgtttttcagttaaaaacagccagccttagctttagtattattcactctggtgctacagctaaagagctgaccctttaatggttgtattgtttagttgggaaaggggtcttgattgaacaatgatcaaaagggggcaaatggtttatccaaggacaaacaggaatgcaggaaacttctgtacaaagttatggatatagaacatccttgcagactatttgtttcacgactttaacatggcctactaatgagaataaaataagcaacaatcactcaagaatctcttgactgggtgcggtgactcgcacctgtaatcccagcattttgggaggctgaggcaggcggatcgcttgagctcaggagtttgagaccagctgggcaacatggtgaaaccccatctccaccaaaaatacaaaaaaattagctgggtgtggtggcatgcacctgtagtcccagctactcaagtggctaaggtgagagggtggcttgagcccgggaggcagaggttgcagtgagccatgattgcaccactgcactctaacttgggcaacaaagcaagaccccatctcaaaaaaaaaaaaaagtctcacagtgggccaggcgtggtggttcacacctgtaatcccaacactttgggaggctttgggaggctgaggtgggaggattgcttgagccaaggaattcgagaaaagcctgggcaacatggtgaaaccctgtctctaccaaaaacacacaaagaaattagctgggcatggtggcatgcacttgtagttcagctaaggtgggaggatcacttgagcccaggaggtggaggctgcaatgagctgagatagtgcctctgcactccagcctgcgtgacaaagtgagaccctctctc

SEQ ID NO: 278074 - DNA, 1251 bp, Homo sapiens
caggtatggagagggggttcagcgagcctgacaactttcttctgccctctcttgccccagaaacagcagaggcaggagagagactccctctggctcctatcccacctctttgcatgggaccctgtgccaaacacccaagtttaagagaagagtagagctgtggcatctccagaccaggcctttccacccacccacccccagttaccctcccagccacctgctgcatctgttcctgcctgcagccctaggatcagggcaaggtttggcaagaaggaagatctgcactactttgcggcctctgctcctccggttcccccaccccagcttcctgctcaatgctgatcagggacaggtggcgcaggtgagcctgacaggcccccacaggagcccagatggacaagcctcagcgttaccctgcaggcttcttcctgtgaggaaagccagcatcacggatctcagccagcaccgtcagaagctgaaccagcaccgtatgggctagggtgggaggctcagccacaggcagaagggtgggaagggcctggagtctgtggctggtgaggaaggaaggagggtgtattgtctagactgaacatggtacacattctgcatgtatagcagagcagccagcaggtagcaatcctggctgtccttctatgctggatcccagatggactctggcccttacctccccacctgagattagggtgagtgtgtttgctctggctgagagcagagctgagagcaggtatacagagctggaagtggaccatggaaaacatcgataaccatgcatcctcttgcttggccacctcctgaaactgctccacctttgaagtttgaactttagtccctccacactctgactgctgcctccttcctcccagctctctcactgagttatcttcactgtacctgttccagcatatccccactatctctctttctcctgatctgtgctgtcttattctcctccttaggcttcctattacctgggattccatgattcattccttcagaccctctcctgccagtatgctaaaccctccctctctctttcttatcccgctgtcccattggcccagcctggatgaatctatcaataaaacaactagagaatggtggtcagtgagacactatagaattactaaggagaagatgcctctggagtttggatcgggtgttacaggtacaagtaggtatgttgcagaggaaaataaatatcaaactgtatactaaaattacattttaaaa

SEQ ID NO: 278075 - DNA, 1792 bp, Homo sapiens
gatgggggagagaaggcgttcaccttggctctgctggcgttttccttggggccctccagctgcagccagatgtgggggttgtccggacagtccttcggaaggacgctcacccccacgctgaagatgcgctccacatggggctgctgttcccgaaccttgttctcagcctccgcagacaccgcaaagcgatctggggacgcggggcgggccccccaggtcctggtgaacgagggcggtggctttgaccgggcctctggctccttcgtagcccctgtccggggtgtctacagcttccggttccatgtggtgaaggtgtacaaccgccaaactgtccaggtgagcctgatgctgaacacgtggcctgtcatctcagcctttgccaatgatcctgacgtgacccgggaggcagccaccagctctgtgctactgcccttggaccctggggaccgagtgtctctgcgcctgcgtcgggggaatctactgggtggttggaaatactcaagtttctctggcttcctcatcttccctctctgaggacccaagtctttcaagcacaagaatccagcccctgacaactttcttctgccctctcttgccccagaaacagcagaggcaggagagagactccctctggctcctatcccacctctttgcatgggaccctgtgccaaacacccaagtttaagagaagagtagagctgtggcatctccagaccaggcctttccacccacccacccccagttaccctcccagccacctgctgcatctgttcctgcctgcagccctaggatcagggcaaggtttggcaagaaggaagatctgcactactttgcggcctctgctcctccggttcccccaccccagcttcctgctcaatgctgatcagggacaggtggcgcaggtgagcctgacaggcccccacaggagcccagatggacaagcctcagcgttaccctgcaggcttcttcctgtgaggaaagccagcatcacggatctcagccagcaccgtcagaagctgaaccagcaccgtatgggctagggtgggaggctcagccacaggcagaagggtgggaagggcctggagtctgtggctggtgaggaaggaaggagggtgtattgtctagactgaacatggtacacattctgcatgtatagcagagcagccagcaggtagcaatcctggctgtccttctatgctggatcccagatggactctggcccttacctccccacctgagattagggtgagtgtgtttgctctggctgagagcagagctgagagcaggtatacagagctggaagtggaccatggaaaacatcgataaccatgcatcctcttgcttggccacctcctgaaactgctccacctttgaagtttgaactttagtccctccacactctgactgctgcctccttcctcccagctctctcactgagttatcttcactgtacctgttccagcatatccccactatctctctttctcctgatctgtgctgtcttattctcctccttaggcttcctattacctgggattccatgattcattccttcagaccctctcctgccagtatgctaaaccctccctctctctttcttatcccgctgtcccattggcccagcctggatgaatctatcaataaaacaactagagaatggtggtcagtgagacactatagaattactaaggagaagatgcctctggagtttggatcgggtgttacaggtacaagtaggtatgttgcagaggaaaataaatatcaaactgtatactaaaattacattttaaaa

SEQ ID NO: 278076 - DNA, 867 bp, Homo sapiens
gatgggggagagaaggcgttcaccttggctctgctggcgttttccttggggccctccagctgcagccagatgtgggggttgtccggacagtccttcggaaggacgctcacccccacgctgaagatgcgctccacatggggctgctgttcccgaaccttgttctcagcctccgcagacaccgcaaagcgatctggggacgcggggcgggccccccaggtcctggtgaacgagggcggtggctttgaccgggcctctggctccttcgtagcccctgtccggggtgtctacagcttccggttccatgtggtgaaggtgtacaaccgccaaactgtccaggtgagcctgatgctgaacacgtggcctgtcatctcagcctttgccaatgatcctgacgtgacccgggaggcagccaccagctctgtgctactgcccttggaccctggggaccgagtgtctctgcgcctgcgtcgggggaatctactgggtggttggaaatactcaagtttctctggcttcctcatcttccctctctgaggacccaagtctttcaagcacaagaatccagcccctgacaactttcttctgccctctcttgccccagaaacagcagaggcaggagagagactccctctggctcctatcccacctctttgcatgggaccctgtgccaaacacccaagtttaagagaagagtagagctgtggcatctccagaccaggccttactactgatatacttgtagtgaccttatcacttatctagttcatctaatggtgcttttatccctaggatctggccctggttttgcaacaggcgtacatttttcccctcttatccgcttcaagtccctcctatacccttctcctc

SEQ ID NO: 278077 - DNA, 1869 bp, Homo sapiens
agcgggcgggtgcgcgagccgcgcgctcccgccgcccgcgtcgccatctttttccccctccgtctgtctgtctgctgttggctttgtccgtctgcagcgccgcccctcggctccccgccaccggctcggctcggcccggagccccttccgctcgccggggcccagtcccggagcgccccggcccggctggcttgggctgcggtcccgggtccattgtccggcggtccgtctgtccggaggcggggcccagggacccagagcgcagcgcagcgccgaggcgccggatacagatcacttggattcagtcgagtttgctttgctccgtgggaactgcaccagagctggaggttagcatcttgcaaggaggtagtaacatatccagtcgtgaaactgggaaagaccagagctcttgcatcagggaaacatgtcccgtcggaaacagacaaatccaaataaagttcactgtgacagtgagggtgatgaagaggagacgacacaagatgaagtctcttcccacacatcagaggaagatggaggggtggtcaaagtggagaaagagttagaaaatacagaacagcctgttggtgggaacgaagtggtagagcacgaggtcacagggaatttgaattctgaccccttgcttgaactctgccagtgtcccctctgccagctagactgcgggagccgggagcagttgattgctcacgtgtaccagcacactgcagcagtggtgagcgccaagagctacatgtgtcctgtctgtggccgggcccttagctccccggggtcattgggtcgccacctcttaatccactcggaggaccagcgatctaactgtgctgtgtgtggagcccggttcaccagccatgccacttttaacagtgagaaacttcctgaagtactaaatatggaatccctacccacagtccacaatgagggtccctccagtgctgaggggaaggatattgcctttagtcctccagtgtaccctgctggaattctgcttgtgtgcaacaactgtgctgcctaccgtaaactgctggaagcccagactcccagtgtacgcaagtgggctctacgtcgacagaatgagcctttggaagtacggctgcagcggctggaacgagagcgcacggccaagaagagccggcgggacaatgagacccccgaggagcgggaggtgaggcgcatgagggaccgtgaagccaagcgcttgcagcgcatgcaggagacagacgagcagcgggcacgccggctgcagcgggatcgggaggccatgaggctgaagcgggccaatgaaaccccggaaaagcggcaggcccggctcatccgagagcgagaggccaagcggctcaagaggaggctggagaaaatggacatgatgttgcgagctcagtttggccaggacccttctgccatggcagccttagcagctgaaatgaacttcttccagctgcctgtaagtggggtggagttggacagccagcttctgggcaagatggcctttgaagagcagaacagcagctctctgcactgaaccacaccctcctgcctgccctccttcccacctacctacccacccacccacacccacagccacgaggaccagtgctgctgccacccacgaggccctgtccttgctgccagaggcaggcctgggtttattgcaggtggacctgagcagcccttgcatatgggaacaggatgatggggtcaggagggacctggctcaaggcagctctggacaagggagcaggcagtccagagaactggcctccccagcccactgccacaggctgtgcttctaggactgtgggcccctgtgtggcccatgaagttgtgaagtcaaataaattaattttatcttta

SEQ ID NO: 278078 - DNA, 1828 bp, Homo sapiens
agcgggcgggtgcgcgagccgcgcgctcccgccgcccgcgtcgccatctttttccccctccgtctgtctgtctgctgttggctttgtccgtctgcagcgccgcccctcggctccccgccaccggctcggctcggcccggagccccttccgctcgccggggcccagtcccggagcgccccggcccggctggcttgggctgcggtcccgggtccattgtccggcggtccgtctgtccggaggcggggcccagggacccagagcgcagcgcagcgccgaggcgccggatacagatcacttggattcagtcgagtttgctttgctccgtgggaactgcaccagagctggaggttagcatcttgcaaggaggtagtaacatatccagtcgtgaaactgggaaagaccagagctcttgcatcagggaaacatgtcccgtcggaaacagacaaatccaaataaagttcactgggatcaagtatttgctgggctagaagagcaagcccgccaggcgatgatgaaaactgattttcctggagaccttggcagtcagcgacaagctatccaacaactaagagatcaggactccagtagcagtgacagtgagggtgatgaagaggagacgacacaagatgaagtctcttcccacacatcagaggaagatggaggggtggtcaaagtggagaaagagttagaaaatacagaacagcctgttggtgggaacgaagtggtagagcacgaggtcacagggaatttgaattctgaccccttgcttgaactctgccagtgtcccctctgccagctagactgcgggagccgggagcagttgattgctcacgtgtaccagtgagaaacttcctgaagtactaaatatggaatccctacccacagtccacaatgagggtccctccagtgctgaggggaaggatattgcctttagtcctccagtgtaccctgctggaattctgcttgtgtgcaacaactgtgctgcctaccgtaaactgctggaagcccagactcccagtgtacgcaagtgggctctacgtcgacagaatgagcctttggaagtacggctgcagcggctggaacgagagcgcacggccaagaagagccggcgggacaatgagacccccgaggagcgggaggtgaggcgcatgagggaccgtgaagccaagcgcttgcagcgcatgcaggagacagacgagcagcgggcacgccggctgcagcgggatcgggaggccatgaggctgaagcgggccaatgaaaccccggaaaagcggcaggcccggctcatccgagagcgagaggccaagcggctcaagaggaggctggagaaaatggacatgatgttgcgagctcagtttggccaggacccttctgccatggcagccttagcagctgaaatgaacttcttccagctgcctgtaagtggggtggagttggacagccagcttctgggcaagatggcctttgaagagcagaacagcagctctctgcactgaaccacaccctcctgcctgccctccttcccacctacctacccacccacccacacccacagccacgaggaccagtgctgctgccacccacgaggccctgtccttgctgccagaggcaggcctgggtttattgcaggtggacctgagcagcccttgcatatgggaacaggatgatggggtcaggagggacctggctcaaggcagctctggacaagggagcaggcagtccagagaactggcctccccagcccactgccacaggctgtgcttctaggactgtgggcccctgtgtggcccatgaagttgtgaagtcaaataaattaattttatcttta

SEQ ID NO: 278079 - DNA, 1847 bp, Homo sapiens
agcgggcgggtgcgcgagccgcgcgctcccgccgcccgcgtcgccatctttttccccctccgtctgtctgtctgctgttggctttgtccgtctgcagcgccgcccctcggctccccgccaccggctcggctcggcccggagccccttccgctcgccggggcccagtcccggagcgccccggcccggctggcttgggctgcggtcccgggtccattgtccggcggtccgtctgtccggaggcggggcccagggacccagagcgcagcgcagcgccgaggcgccggatacagatcacttggattcagtcgagtttgctttgctccgtgggaactgcaccagagctggaggttagcatcttgcaaggaggtagtaacatatccagtcgtgaaactgggaaagaccagagctcttgcatcagggaaacatgtcccgtcggaaacagacaaatccaaataaagttcactgggatcaagtatttgctgggctagaagagcaagcccgccaggcgatgatgaaaactgattttcctggagaccttggcagtcagcgacaagctatccaacaactaagagatcaggactccagtagcagtgagttctgcaccttctggtgacagtgagggtgatgaagaggagacgacacaagatgaagtctcttcccacacatcagaggaagatggaggggtggtcaaagtggagaaagagttagaaaatacagaacagcctgttggtgggaacgaagtggtagagcacgaggtcacagggaatttgaattctgaccccttgcttgaactctgccagtgtcccctctgccagctagactgcgggagccgggagcagttgattgctcacgtgtaccagtgagaaacttcctgaagtactaaatatggaatccctacccacagtccacaatgagggtccctccagtgctgaggggaaggatattgcctttagtcctccagtgtaccctgctggaattctgcttgtgtgcaacaactgtgctgcctaccgtaaactgctggaagcccagactcccagtgtacgcaagtgggctctacgtcgacagaatgagcctttggaagtacggctgcagcggctggaacgagagcgcacggccaagaagagccggcgggacaatgagacccccgaggagcgggaggtgaggcgcatgagggaccgtgaagccaagcgcttgcagcgcatgcaggagacagacgagcagcgggcacgccggctgcagcgggatcgggaggccatgaggctgaagcgggccaatgaaaccccggaaaagcggcaggcccggctcatccgagagcgagaggccaagcggctcaagaggaggctggagaaaatggacatgatgttgcgagctcagtttggccaggacccttctgccatggcagccttagcagctgaaatgaacttcttccagctgcctgtaagtggggtggagttggacagccagcttctgggcaagatggcctttgaagagcagaacagcagctctctgcactgaaccacaccctcctgcctgccctccttcccacctacctacccacccacccacacccacagccacgaggaccagtgctgctgccacccacgaggccctgtccttgctgccagaggcaggcctgggtttattgcaggtggacctgagcagcccttgcatatgggaacaggatgatggggtcaggagggacctggctcaaggcagctctggacaagggagcaggcagtccagagaactggcctccccagcccactgccacaggctgtgcttctaggactgtgggcccctgtgtggcccatgaagttgtgaagtcaaataaattaattttatcttta

SEQ ID NO: 278080 - DNA, 1995 bp, Homo sapiens
agcgggcgggtgcgcgagccgcgcgctcccgccgcccgcgtcgccatctttttccccctccgtctgtctgtctgctgttggctttgtccgtctgcagcgccgcccctcggctccccgccaccggctcggctcggcccggagccccttccgctcgccggggcccagtcccggagcgccccggcccggctggcttgggctgcggtcccgggtccattgtccggcggtccgtctgtccggaggcggggcccagggacccagagcgcagcgcagcgccgaggcgccggatacagatcacttggattcagtcgagtttgctttgctccgtgggaactgcaccagagctggaggttagcatcttgcaaggaggtagtaacatatccagtcgtgaaactgggaaagaccagagctcttgcatcagggaaacatgtcccgtcggaaacagacaaatccaaataaagttcactgggatcaagtatttgctgggctagaagagcaagcccgccaggcgatgatgaaaactgattttcctggagaccttggcagtcagcgacaagctatccaacaactaagagatcaggactccagtagcagtgacagtgagggtgatgaagaggagacgacacaagatgaagtctcttcccacacatcagaggaagatggaggggtggtcaaagtggagaaagagttagaaaatacagaacagcctgttggtgggaacgaagtggtagagcacgaggtcacagggaatttgaattctgaccccttgcttgaactctgccagtgtcccctctgccagctagactgcgggagccgggagcagttgattgctcacgtgtaccagcacactgcagcagtggtgagcgccaagagctacatgtgtcctgtctgtggccgggcccttagctccccggggtcattgggtcgccacctcttaatccactcggaggaccagcgatctaactgtgctgtgtgtggagcccggttcaccagccatgccacttttaacagtgagaaacttcctgaagtactaaatatggaatccctacccacagtccacaatgagggtccctccagtgctgaggggaaggatattgcctttagtcctccagtgtaccctgctggaattctgcttgtgtgcaacaactgtgctgcctaccgtaaactgctggaagcccagactcccagtgtacgcaagtgggctctacgtcgacagaatgagcctttggaagtacggctgcagcggctggaacgagagcgcacggccaagaagagccggcgggacaatgagacccccgaggagcgggaggtgaggcgcatgagggaccgtgaagccaagcgcttgcagcgcatgcaggagacagacgagcagcgggcacgccggctgcagcgggatcgggaggccatgaggctgaagcgggccaatgaaaccccggaaaagcggcaggcccggctcatccgagagcgagaggccaagcggctcaagaggaggctggagaaaatggacatgatgttgcgagctcagtttggccaggacccttctgccatggcagccttagcagctgaaatgaacttcttccagctgcctgtaagtggggtggagttggacagccagcttctgggcaagatggcctttgaagagcagaacagcagctctctgcactgaaccacaccctcctgcctgccctccttcccacctacctacccacccacccacacccacagccacgaggaccagtgctgctgccacccacgaggccctgtccttgctgccagaggcaggcctgggtttattgcaggtggacctgagcagcccttgcatatgggaacaggatgatggggtcaggagggacctggctcaaggcagctctggacaagggagcaggcagtccagagaactggcctccccagcccactgccacaggctgtgcttctaggactgtgggcccctgtgtggcccatgaagttgtgaagtcaaataaattaattttatcttta

SEQ ID NO: 278081 - DNA, 2014 bp, Homo sapiens
agcgggcgggtgcgcgagccgcgcgctcccgccgcccgcgtcgccatctttttccccctccgtctgtctgtctgctgttggctttgtccgtctgcagcgccgcccctcggctccccgccaccggctcggctcggcccggagccccttccgctcgccggggcccagtcccggagcgccccggcccggctggcttgggctgcggtcccgggtccattgtccggcggtccgtctgtccggaggcggggcccagggacccagagcgcagcgcagcgccgaggcgccggatacagatcacttggattcagtcgagtttgctttgctccgtgggaactgcaccagagctggaggttagcatcttgcaaggaggtagtaacatatccagtcgtgaaactgggaaagaccagagctcttgcatcagggaaacatgtcccgtcggaaacagacaaatccaaataaagttcactgggatcaagtatttgctgggctagaagagcaagcccgccaggcgatgatgaaaactgattttcctggagaccttggcagtcagcgacaagctatccaacaactaagagatcaggactccagtagcagtgagttctgcaccttctggtgacagtgagggtgatgaagaggagacgacacaagatgaagtctcttcccacacatcagaggaagatggaggggtggtcaaagtggagaaagagttagaaaatacagaacagcctgttggtgggaacgaagtggtagagcacgaggtcacagggaatttgaattctgaccccttgcttgaactctgccagtgtcccctctgccagctagactgcgggagccgggagcagttgattgctcacgtgtaccagcacactgcagcagtggtgagcgccaagagctacatgtgtcctgtctgtggccgggcccttagctccccggggtcattgggtcgccacctcttaatccactcggaggaccagcgatctaactgtgctgtgtgtggagcccggttcaccagccatgccacttttaacagtgagaaacttcctgaagtactaaatatggaatccctacccacagtccacaatgagggtccctccagtgctgaggggaaggatattgcctttagtcctccagtgtaccctgctggaattctgcttgtgtgcaacaactgtgctgcctaccgtaaactgctggaagcccagactcccagtgtacgcaagtgggctctacgtcgacagaatgagcctttggaagtacggctgcagcggctggaacgagagcgcacggccaagaagagccggcgggacaatgagacccccgaggagcgggaggtgaggcgcatgagggaccgtgaagccaagcgcttgcagcgcatgcaggagacagacgagcagcgggcacgccggctgcagcgggatcgggaggccatgaggctgaagcgggccaatgaaaccccggaaaagcggcaggcccggctcatccgagagcgagaggccaagcggctcaagaggaggctggagaaaatggacatgatgttgcgagctcagtttggccaggacccttctgccatggcagccttagcagctgaaatgaacttcttccagctgcctgtaagtggggtggagttggacagccagcttctgggcaagatggcctttgaagagcagaacagcagctctctgcactgaaccacaccctcctgcctgccctccttcccacctacctacccacccacccacacccacagccacgaggaccagtgctgctgccacccacgaggccctgtccttgctgccagaggcaggcctgggtttattgcaggtggacctgagcagcccttgcatatgggaacaggatgatggggtcaggagggacctggctcaaggcagctctggacaagggagcaggcagtccagagaactggcctccccagcccactgccacaggctgtgcttctaggactgtgggcccctgtgtggcccatgaagttgtgaagtcaaataaattaattttatcttta

SEQ ID NO: 278082 - DNA, 1874 bp, Homo sapiens
gggggaggggaggatgggcgtgggcgtgcagaccggggggtatcagtccccgcgtctgggtctcgcagaaaagcttctaaatttagatttcggagattgtgttgtctaagggtttgtctgagccgcctcggaagacctccggctcttgtcaggctcttgtctgatacagatcacttggattcagtcgagtttgctttgctccgtgggaactgcaccagagctggaggttagcatcttgcaaggaggtagtaacatatccagtcgtgaaactgggaaagaccagagctcttgcatcagggaaacatgtcccgtcggaaacagacaaatccaaataaagttcactgggatcaagtatttgctgggctagaagagcaagcccgccaggcgatgatgaaaactgattttcctggagaccttggcagtcagcgacaagctatccaacaactaagagatcaggactccagtagcagtgacagtgagggtgatgaagaggagacgacacaagatgaagtctcttcccacacatcagaggaagatggaggggtggtcaaagtggagaaagagttagaaaatacagaacagcctgttggtgggaacgaagtggtagagcacgaggtcacagggaatttgaattctgaccccttgcttgaactctgccagtgtcccctctgccagctagactgcgggagccgggagcagttgattgctcacgtgtaccagcacactgcagcagtggtgagcgccaagagctacatgtgtcctgtctgtggccgggcccttagctccccggggtcattgggtcgccacctcttaatccactcggaggaccagcgatctaactgtgctgtgtgtggagcccggttcaccagccatgccacttttaacagtgagaaacttcctgaagtactaaatatggaatccctacccacagtccacaatgagggtccctccagtgctgaggggaaggatattgcctttagtcctccagtgtaccctgctggaattctgcttgtgtgcaacaactgtgctgcctaccgtaaactgctggaagcccagactcccagtgtacgcaagtgggctctacgtcgacagaatgagcctttggaagtacggctgcagcggctggaacgagagcgcacggccaagaagagccggcgggacaatgagacccccgaggagcgggaggtgaggcgcatgagggaccgtgaagccaagcgcttgcagcgcatgcaggagacagacgagcagcgggcacgccggctgcagcgggatcgggaggccatgaggctgaagcgggccaatgaaaccccggaaaagcggcaggcccggctcatccgagagcgagaggccaagcggctcaagaggaggctggagaaaatggacatgatgttgcgagctcagtttggccaggacccttctgccatggcagccttagcagctgaaatgaacttcttccagctgcctgtaagtggggtggagttggacagccagcttctgggcaagatggcctttgaagagcagaacagcagctctctgcactgaaccacaccctcctgcctgccctccttcccacctacctacccacccacccacacccacagccacgaggaccagtgctgctgccacccacgaggccctgtccttgctgccagaggcaggcctgggtttattgcaggtggacctgagcagcccttgcatatgggaacaggatgatggggtcaggagggacctggctcaaggcagctctggacaagggagcaggcagtccagagaactggcctccccagcccactgccacaggctgtgcttctaggactgtgggcccctgtgtggcccatgaagttgtgaagtcaaataaattaattttatcttta

SEQ ID NO: 278083 - DNA, 1564 bp, Homo sapiens
ggggaaaatgacatgtgctaacaataaccttttttattgcaggttagcatcttgcaaggaggtagtaacatatccagtcgtgaaactgggaaagaccagagctcttgcatcagggaaacatgtcccgtcggaaacagacaaatccaaataaagttcactgtgacagtgagggtgatgaagaggagacgacacaagatgaagtctcttcccacacatcagaggaagatggaggggtggtcaaagtggagaaagagttagaaaatacagaacagcctgttggtgggaacgaagtggtagagcacgaggtcacagggaatttgaattctgaccccttgcttgaactctgccagtgtcccctctgccagctagactgcgggagccgggagcagttgattgctcacgtgtaccagcacactgcagcagtggtgagcgccaagagctacatgtgtcctgtctgtggccgggcccttagctccccggggtcattgggtcgccacctcttaatccactcggaggaccagcgatctaactgtgctgtgtgtggagcccggttcaccagccatgccacttttaacagtgagaaacttcctgaagtactaaatatggaatccctacccacagtccacaatgagggtccctccagtgctgaggggaaggatattgcctttagtcctccagtgtaccctgctggaattctgcttgtgtgcaacaactgtgctgcctaccgtaaactgctggaagcccagactcccagtgtacgcaagtgggctctacgtcgacagaatgagcctttggaagtacggctgcagcggctggaacgagagcgcacggccaagaagagccggcgggacaatgagacccccgaggagcgggaggtgaggcgcatgagggaccgtgaagccaagcgcttgcagcgcatgcaggagacagacgagcagcgggcacgccggctgcagcgggatcgggaggccatgaggctgaagcgggccaatgaaaccccggaaaagcggcaggcccggctcatccgagagcgagaggccaagcggctcaagaggaggctggagaaaatggacatgatgttgcgagctcagtttggccaggacccttctgccatggcagccttagcagctgaaatgaacttcttccagctgcctgtaagtggggtggagttggacagccagcttctgggcaagatggcctttgaagagcagaacagcagctctctgcactgaaccacaccctcctgcctgccctccttcccacctacctacccacccacccacacccacagccacgaggaccagtgctgctgccacccacgaggccctgtccttgctgccagaggcaggcctgggtttattgcaggtggacctgagcagcccttgcatatgggaacaggatgatggggtcaggagggacctggctcaaggcagctctggacaagggagcaggcagtccagagaactggcctccccagcccactgccacaggctgtgcttctaggactgtgggcccctgtgtggcccatgaagttgtgaagtcaaataaattaattttatcttta

SEQ ID NO: 278084 - DNA, 1897 bp, Homo sapiens
gggggaggggaggatgggcgtgggcgtgcagaccggggggtatcagtccccgcgtctgggtctcgcagaaaagcttctaaatttagatttcggagattgtgttgtctaagggtttgtctgagccgcctcggaagacctccggctcttgtcaggctcttgtctggtaattcctgggaatttacctgggctcatgcttgaagaagcagagggaccatctcggctgattagacacgccccagacccaaccccaggggtcaggtgaacagccaggcggctaagtgaccagctttcttgtcctctcctttttggcagatacagatcacttggattcagtcgagtttgctttgctccgtgggaactgcaccagagctggaggttagcatcttgcaaggaggtagtaacatatccagtcgtgaaactgggaaagaccagagctcttgcatcagggaaacatgtcccgtcggaaacagacaaatccaaataaagttcactgtgacagtgagggtgatgaagaggagacgacacaagatgaagtctcttcccacacatcagaggaagatggaggggtggtcaaagtggagaaagagttagaaaatacagaacagcctgttggtgggaacgaagtggtagagcacgaggtcacagggaatttgaattctgaccccttgcttgaactctgccagtgtcccctctgccagctagactgcgggagccgggagcagttgattgctcacgtgtaccagcacactgcagcagtggtgagcgccaagagctacatgtgtcctgtctgtggccgggcccttagctccccggggtcattgggtcgccacctcttaatccactcggaggaccagcgatctaactgtgctgtgtgtggagcccggttcaccagccatgccacttttaacagtgagaaacttcctgaagtactaaatatggaatccctacccacagtccacaatgagggtccctccagtgctgaggggaaggatattgcctttagtcctccagtgtaccctgctggaattctgcttgtgtgcaacaactgtgctgcctaccgtaaactgctggaagcccagactcccagtgtacgcaagtgggctctacgtcgacagaatgagcctttggaagtacggctgcagcggctggaacgagagcgcacggccaagaagagccggcgggacaatgagacccccgaggagcgggaggtgaggcgcatgagggaccgtgaagccaagcgcttgcagcgcatgcaggagacagacgagcagcgggcacgccggctgcagcgggatcgggaggccatgaggctgaagcgggccaatgaaaccccggaaaagcggcaggcccggctcatccgagagcgagaggccaagcggctcaagaggaggctggagaaaatggacatgatgttgcgagctcagtttggccaggacccttctgccatggcagccttagcagctgaaatgaacttcttccagctgcctgtaagtggggtggagttggacagccagcttctgggcaagatggcctttgaagagcagaacagcagctctctgcactgaaccacaccctcctgcctgccctccttcccacctacctacccacccacccacacccacagccacgaggaccagtgctgctgccacccacgaggccctgtccttgctgccagaggcaggcctgggtttattgcaggtggacctgagcagcccttgcatatgggaacaggatgatggggtcaggagggacctggctcaaggcagctctggacaagggagcaggcagtccagagaactggcctccccagcccactgccacaggctgtgcttctaggactgtgggcccctgtgtggcccatgaagttgtgaagtcaaataaattaattttatcttta

SEQ ID NO: 278085 - DNA, 1967 bp, Homo sapiens
agcgggcgggtgcgcgagccgcgcgctcccgccgcccgcgtcgccatctttttccccctccgtctgtctgtctgctgttggctttgtccgtctgcagcgccgcccctcggctccccgccaccggctcggctcggcccggagccccttccgctcgccggggcccagtcccggagcgccccggcccggctggcttgggctgcggtcccgggtccattgtccggcggtccgtctgtccggaggcggggcccagggacccagagcgcagcgcagcgccgaggcgccggatacagatcacttggattcagtcgagtttgctttgctccgtgggaactgcaccagagctggaggtctgaaaaagaactgtgtttgatatgcagatatgctagaagactgcctgaaagctgcttcctttgccacttcctgtggaggcctgtctttgccatttgcggtttctttattcttttggttagcatcttgcaaggaggtagtaacatatccagtcgtgaaactgggaaagaccagagctcttgcatcagggaaacatgtcccgtcggaaacagacaaatccaaataaagttcactgggatcaagtatttgctgggctagaagagcaagcccgccaggcgatgatgaaaactgattttcctggagaccttggcagtcagcgacaagctatccaacaactaagagatcaggactccagtagcagtcacagggaatttgaattctgaccccttgcttgaactctgccagtgtcccctctgccagctagactgcgggagccgggagcagttgattgctcacgtgtaccagcacactgcagcagtggtgagcgccaagagctacatgtgtcctgtctgtggccgggcccttagctccccggggtcattgggtcgccacctcttaatccactcggaggaccagcgatctaactgtgctgtgtgtggagcccggttcaccagccatgccacttttaacagtgagaaacttcctgaagtactaaatatggaatccctacccacagtccacaatgagggtccctccagtgctgaggggaaggatattgcctttagtcctccagtgtaccctgctggaattctgcttgtgtgcaacaactgtgctgcctaccgtaaactgctggaagcccagactcccagtgtacgcaagtgggctctacgtcgacagaatgagcctttggaagtacggctgcagcggctggaacgagagcgcacggccaagaagagccggcgggacaatgagacccccgaggagcgggaggtgaggcgcatgagggaccgtgaagccaagcgcttgcagcgcatgcaggagacagacgagcagcgggcacgccggctgcagcgggatcgggaggccatgaggctgaagcgggccaatgaaaccccggaaaagcggcaggcccggctcatccgagagcgagaggccaagcggctcaagaggaggctggagaaaatggacatgatgttgcgagctcagtttggccaggacccttctgccatggcagccttagcagctgaaatgaacttcttccagctgcctgtaagtggggtggagttggacagccagcttctgggcaagatggcctttgaagagcagaacagcagctctctgcactgaaccacaccctcctgcctgccctccttcccacctacctacccacccacccacacccacagccacgaggaccagtgctgctgccacccacgaggccctgtccttgctgccagaggcaggcctgggtttattgcaggtggacctgagcagcccttgcatatgggaacaggatgatggggtcaggagggacctggctcaaggcagctctggacaagggagcaggcagtccagagaactggcctccccagcccactgccacaggctgtgcttctaggactgtgggcccctgtgtggcccatgaagttgtgaagtcaaataaattaattttatcttta

SEQ ID NO: 278086 - DNA, 1580 bp, Homo sapiens
gggggaggggaggatgggcgtgggcgtgcagaccggggggtatcagtccccgcgtctgggtctcgcagaaaagcttctaaatttagatttcggagattgtgttgtctaagggtttgtctgagccgcctcggaagacctccggctcttgtcaggctcttgtctgatacagatcacttggattcagtcgagtttgctttgctccgtgggaactgcaccagagctggaggttagcatcttgcaaggaggtagtaacatatccagtcgtgaaactgggaaagaccagagctcttgcatcagggaaacatgtcccgtcggaaacagacaaatccaaataaagttcactgggatcaagtatttgctgggctagaagagcaagcccgccaggcgatgatgaaaactgattttcctggagaccttggcagtcagcgacaagctatccaacaactaagagatcaggactccagtagcagtgagttctgcaccttctggtcacagggaatttgaattctgaccccttgcttgaactctgccagtgtcccctctgccagctagactgcgggagccgggagcagttgattgctcacgtgtaccagtgagaaacttcctgaagtactaaatatggaatccctacccacagtccacaatgagggtccctccagtgctgaggggaaggatattgcctttagtcctccagtgtaccctgctggaattctgcttgtgtgcaacaactgtgctgcctaccgtaaactgctggaagcccagactcccagtgtacgcaagtgggctctacgtcgacagaatgagcctttggaagtacggctgcagcggctggaacgagagcgcacggccaagaagagccggcgggacaatgagacccccgaggagcgggaggtgaggcgcatgagggaccgtgaagccaagcgcttgcagcgcatgcaggagacagacgagcagcgggcacgccggctgcagcgggatcgggaggccatgaggctgaagcgggccaatgaaaccccggaaaagcggcaggcccggctcatccgagagcgagaggccaagcggctcaagaggaggctggagaaaatggacatgatgttgcgagctcagtttggccaggacccttctgccatggcagccttagcagctgaaatgaacttcttccagctgcctgtaagtggggtggagttggacagccagcttctgggcaagatggcctttgaagagcagaacagcagctctctgcactgaaccacaccctcctgcctgccctccttcccacctacctacccacccacccacacccacagccacgaggaccagtgctgctgccacccacgaggccctgtccttgctgccagaggcaggcctgggtttattgcaggtggacctgagcagcccttgcatatgggaacaggatgatggggtcaggagggacctggctcaaggcagctctggacaagggagcaggcagtccagagaactggcctccccagcccactgccacaggctgtgcttctaggactgtgggcccctgtgtggcccatgaagttgtgaagtcaaataaattaattttatcttta

SEQ ID NO: 278087 - DNA, 1345 bp, Homo sapiens
ggtcagaagaaaccatcccgctgcagaccctgcgctgctacaacgactacaccagccacatcacctgcaggtggcagaccacccaggatgcccagcggctcgtcaacgtgacagtgagggtgatgaagaggagacgacacaagatgaagtctcttcccacacatcagaggaagatggaggggtggtcaaagtggagaaagagttagaaaatacagaacagcctgttggtgggaacgaagtggtagagcacgaggtcacagggaatttgaattctgaccccttgcttgaactctgccagtgtcccctctgccagctagactgcgggagccgggagcagttgattgctcacgtgtaccagtgagaaacttcctgaagtactaaatatggaatccctacccacagtccacaatgagggtccctccagtgctgaggggaaggatattgcctttagtcctccagtgtaccctgctggaattctgcttgtgtgcaacaactgtgctgcctaccgtaaactgctggaagcccagactcccagtgtacgcaagtgggctctacgtcgacagaatgagcctttggaagtacggctgcagcggctggaacgagagcgcacggccaagaagagccggcgggacaatgagacccccgaggagcgggaggtgaggcgcatgagggaccgtgaagccaagcgcttgcagcgcatgcaggagacagacgagcagcgggcacgccggctgcagcgggatcgggaggccatgaggctgaagcgggccaatgaaaccccggaaaagcggcaggcccggctcatccgagagcgagaggccaagcggctcaagaggaggctggagaaaatggacatgatgttgcgagctcagtttggccaggacccttctgccatggcagccttagcagctgaaatgaacttcttccagctgcctgtaagtggggtggagttggacagccagcttctgggcaagatggcctttgaagagcagaacagcagctctctgcactgaaccacaccctcctgcctgccctccttcccacctacctacccacccacccacacccacagccacgaggaccagtgctgctgccacccacgaggccctgtccttgctgccagaggcaggcctgggtttattgcaggtggacctgagcagcccttgcatatgggaacaggatgatggggtcaggagggacctggctcaaggcagctctggacaagggagcaggcagtccagagaactggcctccccagcccactgccacaggctgtgcttctaggactgtgggcccctgtgtggcccatgaagttgtgaagtcaaataaattaattttatcttta

SEQ ID NO: 278088 - DNA, 1752 bp, Homo sapiens
gccgaagccaccgcgaagcgtgggggaatgaggcgaagaggatacagatcacttggattcagtcgagtttgctttgctccgtgggaactgcaccagagctggaggttagcatcttgcaaggaggtagtaacatatccagtcgtgaaactgggaaagaccagagctcttgcatcagggaaacatgtcccgtcggaaacagacaaatccaaataaagttcactgggatcaagtatttgctgggctagaagagcaagcccgccaggcgatgatgaaaactgattttcctggagaccttggcagtcagcgacaagctatccaacaactaagagatcaggactccagtagcagtgacagtgagggtgatgaagaggagacgacacaagatgaagtctcttcccacacatcagaggaagatggaggggtggtcaaagtggagaaagagttagaaaatacagaacagcctgttggtgggaacgaagtggtagagcacgaggtcacagggaatttgaattctgaccccttgcttgaactctgccagtgtcccctctgccagctagactgcgggagccgggagcagttgattgctcacgtgtaccagcacactgcagcagtggtgagcgccaagagctacatgtgtcctgtctgtggccgggcccttagctccccggggtcattgggtcgccacctcttaatccactcggaggaccagcgatctaactgtgctgtgtgtggagcccggttcaccagccatgccacttttaacagtgagaaacttcctgaagtactaaatatggaatccctacccacagtccacaatgagggtccctccagtgctgaggggaaggatattgcctttagtcctccagtgtaccctgctggaattctgcttgtgtgcaacaactgtgctgcctaccgtaaactgctggaagcccagactcccagtgtacgcaagtgggctctacgtcgacagaatgagcctttggaagtacggctgcagcggctggaacgagagcgcacggccaagaagagccggcgggacaatgagacccccgaggagcgggaggtgaggcgcatgagggaccgtgaagccaagcgcttgcagcgcatgcaggagacagacgagcagcgggcacgccggctgcagcgggatcgggaggccatgaggctgaagcgggccaatgaaaccccggaaaagcggcaggcccggctcatccgagagcgagaggccaagcggctcaagaggaggctggagaaaatggacatgatgttgcgagctcagtttggccaggacccttctgccatggcagccttagcagctgaaatgaacttcttccagctgcctgtaagtggggtggagttggacagccagcttctgggcaagatggcctttgaagagcagaacagcagctctctgcactgaaccacaccctcctgcctgccctccttcccacctacctacccacccacccacacccacagccacgaggaccagtgctgctgccacccacgaggccctgtccttgctgccagaggcaggcctgggtttattgcaggtggacctgagcagcccttgcatatgggaacaggatgatggggtcaggagggacctggctcaaggcagctctggacaagggagcaggcagtccagagaactggcctccccagcccactgccacaggctgtgcttctaggactgtgggcccctgtgtggcccatgaagttgtgaagtcaaataaattaattttatcttta

SEQ ID NO: 278089 - DNA, 1723 bp, Homo sapiens
agcgggcgggtgcgcgagccgcgcgctcccgccgcccgcgtcgccatctttttccccctccgtctgtctgtctgctgttggctttgtccgtctgcagcgccgcccctcggctccccgccaccggctcggctcggcccggagccccttccgctcgccggggcccagtcccggagcgccccggcccggctggcttgggctgcggtcccgggtccattgtccggcggtccgtctgtccggaggcggggcccagggacccagagcgcagcgcagcgccgaggcgccggatacagatcacttggattcagtcgagtttgctttgctccgtgggaactgcaccagagctggaggttagcatcttgcaaggaggtagtaacatatccagtcgtgaaactgggaaagaccagagctcttgcatcagggaaacatgtcccgtcggaaacagacaaatccaaataaagttcactgtcacagggaatttgaattctgaccccttgcttgaactctgccagtgtcccctctgccagctagactgcgggagccgggagcagttgattgctcacgtgtaccagcacactgcagcagtggtgagcgccaagagctacatgtgtcctgtctgtggccgggcccttagctccccggggtcattgggtcgccacctcttaatccactcggaggaccagcgatctaactgtgctgtgtgtggagcccggttcaccagccatgccacttttaacagtgagaaacttcctgaagtactaaatatggaatccctacccacagtccacaatgagggtccctccagtgctgaggggaaggatattgcctttagtcctccagtgtaccctgctggaattctgcttgtgtgcaacaactgtgctgcctaccgtaaactgctggaagcccagactcccagtgtacgcaagtgggctctacgtcgacagaatgagcctttggaagtacggctgcagcggctggaacgagagcgcacggccaagaagagccggcgggacaatgagacccccgaggagcgggaggtgaggcgcatgagggaccgtgaagccaagcgcttgcagcgcatgcaggagacagacgagcagcgggcacgccggctgcagcgggatcgggaggccatgaggctgaagcgggccaatgaaaccccggaaaagcggcaggcccggctcatccgagagcgagaggccaagcggctcaagaggaggctggagaaaatggacatgatgttgcgagctcagtttggccaggacccttctgccatggcagccttagcagctgaaatgaacttcttccagctgcctgtaagtggggtggagttggacagccagcttctgggcaagatggcctttgaagagcagaacagcagctctctgcactgaaccacaccctcctgcctgccctccttcccacctacctacccacccacccacacccacagccacgaggaccagtgctgctgccacccacgaggccctgtccttgctgccagaggcaggcctgggtttattgcaggtggacctgagcagcccttgcatatgggaacaggatgatggggtcaggagggacctggctcaaggcagctctggacaagggagcaggcagtccagagaactggcctccccagcccactgccacaggctgtgcttctaggactgtgggcccctgtgtggcccatgaagttgtgaagtcaaataaattaattttatcttta

SEQ ID NO: 278090 - DNA, 1706 bp, Homo sapiens
agcgggcgggtgcgcgagccgcgcgctcccgccgcccgcgtcgccatctttttccccctccgtctgtctgtctgctgttggctttgtccgtctgcagcgccgcccctcggctccccgccaccggctcggctcggcccggagccccttccgctcgccggggcccagtcccggagcgccccggcccggctggcttgggctgcggtcccgggtccattgtccggcggtccgtctgtccggaggcggggcccagggacccagagcgcagcgcagcgccgaggcgccggatacagatcacttggattcagtcgagtttgctttgctccgtgggaactgcaccagagctggaggttagcatcttgcaaggaggtagtaacatatccagtcgtgaaactgggaaagaccagagctcttgcatcagggaaacatgtcccgtcggaaacagacaaatccaaataaagttcactgggatcaagtatttgctgggctagaagagcaagcccgccaggcgatgatgaaaactgattttcctggagaccttggcagtcagcgacaagctatccaacaactaagagatcaggactccagtagcagtgacagtgagggtgatgaagaggagacgacacaagatgaagtctcttcccacacatcagaggaagatggaggggtggtcaaagtggagaaagagttagaaaatacagaacagcctgttggtgggaacgaagtggtagagcacgaggtcacagggaatttgaattctgaccccttgcttgaactctgccagtgtcccctctgccagctagactgcgggagccgggagcagttgattgctcacgtgtaccagtgagaaacttcctgaagtactaaatatggaatccctacccacagtccacaatgagggtccctccagtgctgaggggaaggatattgcctttagtcctccagtgtaccctgctggaattctgcttgtgtgcaacaactgtgctgcctaccgtaaactgctggaagcccagactcccagtgtacgcaagtgggctctacgtcgacagaatgagcctttggaagtacggctgcagcggctggaacgagagcgcacggccaagaagagccggcgggacaatgagacccccgaggagcgggaggtgaggcgcatgagggaccgtgaagccaagcgcttgcagcgcatgcaggagacagacgagcagcgggcacgccggctgcagcgggatcgggaggccatgaggctgaagcgggccaatgaaaccccggaaaagcggcaggcccggctcatccgagagcgagaggccaagcggctcaagaggaggctggagaaaatggacatgatgttgcgagctcagtttggccaggacccttctgccatggcagccttagcagctgaaatgaacttcttccagctgcctgtaagtggggtggagttggacagccagcttctgggcaagatggcctttgaagagcagaacagcagctctctgctgaacaaacctcttggtggccttcttccataactaacaacaacaaaccaagcagagacagtgtgttgcaccaagaggctgtctgtgcagagaggctggttatgcagtggctgagagctggttggaaagtgtggggcggaggaaggaaggattggagaggagggaaaggtccccagagggggttaatgggccgtggaaatgggaaattttaaaaag

SEQ ID NO: 278091 - DNA, 3386 bp, Homo sapiens
agtgggccgttgccttacagttgctgagaggaggcgagaggcgggggcgctagggccgagatcatgtctgactgggagaggtttccttggcagcagaggacgctaggtttgggatgaaagaagctgggcagatgcaaaatctggagagcgcgagggccgggcggtcagtcagcacccagactggcagcatgaccggtcagataccaaggctttctaaagtcaaccttttcactctgctcagcctctggatggagctctttccagcagaagcccagcggcaaaaatctcagaaaaatgaagagggaaagcatggacccttaggagataatgaagagaggaccagagtatctactgacaaaagacaggtaaagagaactggtcttgtggtggtgaaaaacatgaaaattgttggtctccactgttctagtgaagatttacatgccgggcagattgctcttattaaacatgggtcaaggctgaaaaactgtgatctttatttttccagaaaaccatgttctgcttgtttgaaaatgattgtaaatgctggagttaaccgaatttcatactggcctgctgatccagaaataagtttgcttacggaggcttctagttctgaagatgcaaagttagatgccaaagcagtggaaagattgaagtcaaacagtcgggcccatgtgtgtgtcttacttcaacctttggtgtgttatatggtgcagtttgtagaggagacctcttacaaatgtgactttattcaaaaaattacaaaaacattgccggatgctaacactgacttttattatgaatgtaaacaagaaagaataaaagaatatgaaatgttatttttggtttcaaatgaagaaatgcataagcaaatactgatgactataggtttggagaacctgtgtgaaaatccatactttagcaatctaaggcaaaacatgaaagaccttatcctacttttggccacagtagcttccagtgtgccgaactttaaacacttcggattttaccgtagcaatccagaacagattaatgaaattcacaatcaaagtttgccacaggaaattgcaaggcactgcatggttcaggccaggttattggcatatcgaactgaggatcataaaacaggagttggggcagtcatttgggcagaagggaaatctagaagttgtgatggaacaggtgccatgtactttgtaggatgtggttacaatgcttttcctgttggatctgagtatgctgacttcccacacatggatgacaagcagaaagacagagaaataaggaaattcagatacatcatacatgcggaacagaatgccttgacatttaggtgtcaagaaataaaaccagaagaaagaagcatgatttttgtgacaaagtgcccatgtgatgagtgtgtacctttaattaaaggtgcaggcataaaacaaatctatgcaggagatgtagatgttggaaaaaagaaggcagacatctcttacatgaggttcggggagcttgaaggtgttagcaaatttacgtggcagctgaatccatcaggagcttatggtcttgaacaaaatgagcctgaaaggagagaaaatggtgtgttgagacctgtcccacagaaggaagagcagcaccaggacaagaagctgcgcctcggaatccactaagaaggcctgtctacactgcaggggaacctcaagaacttttcattgcacttctaaaattcagccttgttcattcagaaaataaggatggattttgtgaataattgaaaagattttttaaggaagctaatttatttctaggatacaaatggtgttaataagaatatttgtcttttagatttatgtgtgggttttccataatgtagtagtgtgttattttattacacgaaatgagggagcaataacttcaaccaatgtaatcaccaacagggactgatttctatttatcttgactttatattagccaatttgaaagggtctgcttcacaagaggtcatgcctctgcagggaatcacacaccttttgagaaatattaattcttttgaattacaagagtgacagttagtaaactgctccagggaaataagtgtcatcttttaagagtcagtgtatagcaaaccaaaagatcacatttatacccaaagctttctagtaatcagaatttacttaattagaattgactcataaaaataaagttagtggactttgtctccatttttaaagtatattttgtaaatgttaattctgtggtcctgtttatcacagactttgggtagcaataggaagagagtgttattctgagacagtgtcgctgcttgatatcactgactcttgaaatcactaacagtgaacctcaaatttggttatgatgttaacagagaagaaatatttgagtctggaatattgaaactagctttcctagaattccattaataaatgctgctcccccatatagtcttcccttctgtataattaacataggttgtctcatggctttgatcttcaaaaggaagagccttttaaaaacatttgccaacctcaagaataaatactgaaagtcttgaaagtatggtcatttcagctattccagattgctgtctgtgatttctcacatttttatttgctgagaaacattcagaaaattattccaaaaatgaaggtacattttctgttctctcctaggttagagaggggtggcctggggtgcttcatgagaaatgtcttcctggatctgcggtggtcaggtttgcctctgcttttgttccctgcctttccgccacatcacacggcctcactgggcttcctaccagtttctcagaattacacgcacgaccatccaaacattggctccatgccagggctgtgactgcagcctgtgtaggaccatggggagttcagagtcatcatacaaggcagccaagaactgccataaacactacacagatggagggcatgggataggacaggagaggaggtgatgtacacttagaggtaactaaggctagtttgaaaaccgtgaattaagatattcttatcagtataaaaacactgagattgcttacctcccaaattgctttattgtattaactctcatgcttcagctcttggatttgttgtttctaactaacatgtcatgtacaccaaacattttataaatcaatcagtaaatattttgtaagacccaaaatcctggcatattgccaggtctgtggatttgcctgttgggtgttgggatgggatatcagaggaagaagcatacaagtgggaaaaactgtgattagaaagggaaaaataggcatttccacagtactattaagagaggcatgataatgccattttttttcttctgtacaactggtcagatttcaataaataatcattgatggttta

SEQ ID NO: 278092 - DNA, 3736 bp, Homo sapiens
agtgggccgttgccttacagttgctgagaggaggcgagaggcgggggcgctagggccgagatcatgtctgactgggagaggtttccttggcagcagaggacgctaggtttgggatgaaagaagctgggcagatgcaaaatctggagagcgcgagggccgggcggtcagtcagcacccagactggcagcatgaccggtgagtgtccgggaccctgctcccgccaccctacctttcgctctgccctgtgcgtctcccgtcattgaactccagattccttgtctgagcctctttgcctcccctgctgcttttggatgtctcctgcccgccctctgcgtgtcccctccgcggtcgccaggaccaatcggctcggtcgcactggcttttgaagtctcgctttttacccctgttagctacttctcacaggacctagagctggggcctctgaggtcaaagagcctgaacatttccaaacggcgcttttgccttgatttccaaattaaccgcacgtgacgctttcctgtatttcgactgctttaccgtcgaaggtcagataccaaggctttctaaagtcaaccttttcactctgctcagcctctggatggagctctttccagcagaagcccagcggcaaaaatctcagaaaaatgaagagggaaagcatggacccttaggagataatgaagagaggaccagagtatctactgacaaaagacaggtaaagagaactggtcttgtggtggtgaaaaacatgaaaattgttggtctccactgttctagtgaagatttacatgccgggcagattgctcttattaaacatgggtcaaggctgaaaaactgtgatctttatttttccagaaaaccatgttctgcttgtttgaaaatgattgtaaatgctggagttaaccgaatttcatactggcctgctgatccagaaataagtttgcttacggaggcttctagttctgaagatgcaaagttagatgccaaagcagtggaaagattgaagtcaaacagtcgggcccatgtgtgtgtcttacttcaacctttggtgtgttatatggtgcagtttgtagaggagacctcttacaaatgtgactttattcaaaaaattacaaaaacattgccggatgctaacactgacttttattatgaatgtaaacaagaaagaataaaagaatatgaaatgttatttttggtttcaaatgaagaaatgcataagcaaatactgatgactataggtttggagaacctgtgtgaaaatccatactttagcaatctaaggcaaaacatgaaagaccttatcctacttttggccacagtagcttccagtgtgccgaactttaaacacttcggattttaccgtagcaatccagaacagattaatgaaattcacaatcaaagtttgccacaggaaattgcaaggcactgcatggttcaggccaggttattggcatatcgaactgaggatcataaaacaggagttggggcagtcatttgggcagaagggaaatctagaagttgtgatggaacaggtgccatgtactttgtaggatgtggttacaatgcttttcctgttggatctgagtatgctgacttcccacacatggatgacaagcagaaagacagagaaataaggaaattcagatacatcatacatgcggaacagaatgccttgacatttaggtgtcaagaaataaaaccagaagaaagaagcatgatttttgtgacaaagtgcccatgtgatgagtgtgtacctttaattaaaggtgcaggcataaaacaaatctatgcaggagatgtagatgttggaaaaaagaaggcagacatctcttacatgaggttcggggagcttgaaggtgttagcaaatttacgtggcagctgaatccatcaggagcttatggtcttgaacaaaatgagcctgaaaggagagaaaatggtgtgttgagacctgtcccacagaaggaagagcagcaccaggacaagaagctgcgcctcggaatccactaagaaggcctgtctacactgcaggggaacctcaagaacttttcattgcacttctaaaattcagccttgttcattcagaaaataaggatggattttgtgaataattgaaaagattttttaaggaagctaatttatttctaggatacaaatggtgttaataagaatatttgtcttttagatttatgtgtgggttttccataatgtagtagtgtgttattttattacacgaaatgagggagcaataacttcaaccaatgtaatcaccaacagggactgatttctatttatcttgactttatattagccaatttgaaagggtctgcttcacaagaggtcatgcctctgcagggaatcacacaccttttgagaaatattaattcttttgaattacaagagtgacagttagtaaactgctccagggaaataagtgtcatcttttaagagtcagtgtatagcaaaccaaaagatcacatttatacccaaagctttctagtaatcagaatttacttaattagaattgactcataaaaataaagttagtggactttgtctccatttttaaagtatattttgtaaatgttaattctgtggtcctgtttatcacagactttgggtagcaataggaagagagtgttattctgagacagtgtcgctgcttgatatcactgactcttgaaatcactaacagtgaacctcaaatttggttatgatgttaacagagaagaaatatttgagtctggaatattgaaactagctttcctagaattccattaataaatgctgctcccccatatagtcttcccttctgtataattaacataggttgtctcatggctttgatcttcaaaaggaagagccttttaaaaacatttgccaacctcaagaataaatactgaaagtcttgaaagtatggtcatttcagctattccagattgctgtctgtgatttctcacatttttatttgctgagaaacattcagaaaattattccaaaaatgaaggtacattttctgttctctcctaggttagagaggggtggcctggggtgcttcatgagaaatgtcttcctggatctgcggtggtcaggtttgcctctgcttttgttccctgcctttccgccacatcacacggcctcactgggcttcctaccagtttctcagaattacacgcacgaccatccaaacattggctccatgccagggctgtgactgcagcctgtgtaggaccatggggagttcagagtcatcatacaaggcagccaagaactgccataaacactacacagatggagggcatgggataggacaggagaggaggtgatgtacacttagaggtaactaaggctagtttgaaaaccgtgaattaagatattcttatcagtataaaaacactgagattgcttacctcccaaattgctttattgtattaactctcatgcttcagctcttggatttgttgtttctaactaacatgtcatgtacaccaaacattttataaatcaatcagtaaatattttgtaagacccaaaatcctggcatattgccaggtctgtggatttgcctgttgggtgttgggatgggatatcagaggaagaagcatacaagtgggaaaaactgtgattagaaagggaaaaataggcatttccacagtactattaagagaggcatgataatgccattttttttcttctgtacaactggtcagatttcaataaataatcattgatggttta

SEQ ID NO: 278093 - DNA, 3721 bp, Homo sapiens
agtgggccgttgccttacagttgctgagaggaggcgagaggcgggggcgctagggccgagatcatgtctgactgggagaggtttccttggcagcagaggacgctaggtttgggatgaaagaagctgggcagatgcaaaatctggagagcgcgagggccgggcggtcagtcagcacccagactggcagcatgaccggtgagtgtccgggaccctgctcccgccaccctacctttcgctctgccctgtgcgtctcccgtcattgaactccagattccttgtctgagcctctttgcctcccctgctgcttttggatgtctcctgcccgccctctgcgtgtcccctccgcggtcgccaggaccaatcggctcggtcgcactggcttttgaagtctcgctttttacccctgttagctacttctcacaggacctagagctggggcctctgaggtcaaagagcctgaacatttccaaacggcgcttttgccttgatttccaaattaaccgcacgtgacgctttcctgtatttcgactgctttaccgtcgaaggtcagataccaaggctttctaaagtcaaccttttcactctgctcagcctctggatggagctctttccagcagaagcccagcggcaaaaatctcagaaaaatgaagagggaaagcatggacccttaggagataatgaagagaggaccagagtatctactgacaaaagacagaaaaccatgttctgcttgtttgaaaatgattgtaaatggattactgggagcagctaagatgcctagatgaaaggtttaccatcactgctggttaggaaatggattatgagaactcgaacagagggaaggtgaaatgcaaccggaggaaacactctgatatgagctggagttaaccgaatttcatactggcctgctgatccagaaataagtttgcttacggaggcttctagttctgaagatgcaaagttagatgccaaagcagtggaaagattgaagtcaaacagtcgggcccatgtgtgtgtcttacttcaacctttggtgtgttatatggtgcagtttgtagaggagacctcttacaaatgtgactttattcaaaaaattacaaaaacattgccggatgctaacactgacttttattatgaatgtaaacaagaaagaataaaagaatatgaaatgttatttttggtttcaaatgaagaaatgcataagcaaatactgatgactataggtttggagaacctgtgtgaaaatccatactttagcaatctaaggcaaaacatgaaagaccttatcctacttttggccacagtagcttccagtgtgccgaactttaaacacttcggattttaccgtagcaatccagaacagattaatgaaattcacaatcaaagtttgccacaggaaattgcaaggcactgcatggttcaggccaggttattggcatatcgaactgaggatcataaaacaggagttggggcagtcatttgggcagaagggaaatctagaagttgtgatggaacaggtgccatgtactttgtaggatgtggttacaatgcttttcctgttggatctgagtatgctgacttcccacacatggatgacaagcagaaagacagagaaataaggaaattcagatacatcatacatgcggaacagaatgccttgacatttaggtgtcaagaaataaaaccagaagaaagaagcatgatttttgtgacaaagtgcccatgtgatgagtgtgtacctttaattaaaggtgcaggcataaaacaaatctatgcaggagatgtagatgttggaaaaaagaaggcagacatctcttacatgaggttcggggagcttgaaggtgttagcaaatttacgtggcagctgaatccatcaggagcttatggtcttgaacaaaatgagcctgaaaggagagaaaatggtgtgttgagacctgtcccacagaaggaagagcagcaccaggacaagaagctgcgcctcggaatccactaagaaggcctgtctacactgcaggggaacctcaagaacttttcattgcacttctaaaattcagccttgttcattcagaaaataaggatggattttgtgaataattgaaaagattttttaaggaagctaatttatttctaggatacaaatggtgttaataagaatatttgtcttttagatttatgtgtgggttttccataatgtagtagtgtgttattttattacacgaaatgagggagcaataacttcaaccaatgtaatcaccaacagggactgatttctatttatcttgactttatattagccaatttgaaagggtctgcttcacaagaggtcatgcctctgcagggaatcacacaccttttgagaaatattaattcttttgaattacaagagtgacagttagtaaactgctccagggaaataagtgtcatcttttaagagtcagtgtatagcaaaccaaaagatcacatttatacccaaagctttctagtaatcagaatttacttaattagaattgactcataaaaataaagttagtggactttgtctccatttttaaagtatattttgtaaatgttaattctgtggtcctgtttatcacagactttgggtagcaataggaagagagtgttattctgagacagtgtcgctgcttgatatcactgactcttgaaatcactaacagtgaacctcaaatttggttatgatgttaacagagaagaaatatttgagtctggaatattgaaactagctttcctagaattccattaataaatgctgctcccccatatagtcttcccttctgtataattaacataggttgtctcatggctttgatcttcaaaaggaagagccttttaaaaacatttgccaacctcaagaataaatactgaaagtcttgaaagtatggtcatttcagctattccagattgctgtctgtgatttctcacatttttatttgctgagaaacattcagaaaattattccaaaaatgaaggtacattttctgttctctcctaggttagagaggggtggcctggggtgcttcatgagaaatgtcttcctggatctgcggtggtcaggtttgcctctgcttttgttccctgcctttccgccacatcacacggcctcactgggcttcctaccagtttctcagaattacacgcacgaccatccaaacattggctccatgccagggctgtgactgcagcctgtgtaggaccatggggagttcagagtcatcatacaaggcagccaagaactgccataaacactacacagatggagggcatgggataggacaggagaggaggtgatgtacacttagaggtaactaaggctagtttgaaaaccgtgaattaagatattcttatcagtataaaaacactgagattgcttacctcccaaattgctttattgtattaactctcatgcttcagctcttggatttgttgtttctaactaacatgtcatgtacaccaaacattttataaatcaatcagtaaatattttgtaagacccaaaatcctggcatattgccaggtctgtggatttgcctgttgggtgttgggatgggatatcagaggaagaagcatacaagtgggaaaaactgtgattagaaagggaaaaataggcatttccacagtactattaagagaggcatgataatgccattttttttcttctgtacaactggtcagatttcaataaataatcattgatggttta

SEQ ID NO: 278094 - DNA, 3371 bp, Homo sapiens
agtgggccgttgccttacagttgctgagaggaggcgagaggcgggggcgctagggccgagatcatgtctgactgggagaggtttccttggcagcagaggacgctaggtttgggatgaaagaagctgggcagatgcaaaatctggagagcgcgagggccgggcggtcagtcagcacccagactggcagcatgaccggtcagataccaaggctttctaaagtcaaccttttcactctgctcagcctctggatggagctctttccagcagaagcccagcggcaaaaatctcagaaaaatgaagagggaaagcatggacccttaggagataatgaagagaggaccagagtatctactgacaaaagacagaaaaccatgttctgcttgtttgaaaatgattgtaaatggattactgggagcagctaagatgcctagatgaaaggtttaccatcactgctggttaggaaatggattatgagaactcgaacagagggaaggtgaaatgcaaccggaggaaacactctgatatgagctggagttaaccgaatttcatactggcctgctgatccagaaataagtttgcttacggaggcttctagttctgaagatgcaaagttagatgccaaagcagtggaaagattgaagtcaaacagtcgggcccatgtgtgtgtcttacttcaacctttggtgtgttatatggtgcagtttgtagaggagacctcttacaaatgtgactttattcaaaaaattacaaaaacattgccggatgctaacactgacttttattatgaatgtaaacaagaaagaataaaagaatatgaaatgttatttttggtttcaaatgaagaaatgcataagcaaatactgatgactataggtttggagaacctgtgtgaaaatccatactttagcaatctaaggcaaaacatgaaagaccttatcctacttttggccacagtagcttccagtgtgccgaactttaaacacttcggattttaccgtagcaatccagaacagattaatgaaattcacaatcaaagtttgccacaggaaattgcaaggcactgcatggttcaggccaggttattggcatatcgaactgaggatcataaaacaggagttggggcagtcatttgggcagaagggaaatctagaagttgtgatggaacaggtgccatgtactttgtaggatgtggttacaatgcttttcctgttggatctgagtatgctgacttcccacacatggatgacaagcagaaagacagagaaataaggaaattcagatacatcatacatgcggaacagaatgccttgacatttaggtgtcaagaaataaaaccagaagaaagaagcatgatttttgtgacaaagtgcccatgtgatgagtgtgtacctttaattaaaggtgcaggcataaaacaaatctatgcaggagatgtagatgttggaaaaaagaaggcagacatctcttacatgaggttcggggagcttgaaggtgttagcaaatttacgtggcagctgaatccatcaggagcttatggtcttgaacaaaatgagcctgaaaggagagaaaatggtgtgttgagacctgtcccacagaaggaagagcagcaccaggacaagaagctgcgcctcggaatccactaagaaggcctgtctacactgcaggggaacctcaagaacttttcattgcacttctaaaattcagccttgttcattcagaaaataaggatggattttgtgaataattgaaaagattttttaaggaagctaatttatttctaggatacaaatggtgttaataagaatatttgtcttttagatttatgtgtgggttttccataatgtagtagtgtgttattttattacacgaaatgagggagcaataacttcaaccaatgtaatcaccaacagggactgatttctatttatcttgactttatattagccaatttgaaagggtctgcttcacaagaggtcatgcctctgcagggaatcacacaccttttgagaaatattaattcttttgaattacaagagtgacagttagtaaactgctccagggaaataagtgtcatcttttaagagtcagtgtatagcaaaccaaaagatcacatttatacccaaagctttctagtaatcagaatttacttaattagaattgactcataaaaataaagttagtggactttgtctccatttttaaagtatattttgtaaatgttaattctgtggtcctgtttatcacagactttgggtagcaataggaagagagtgttattctgagacagtgtcgctgcttgatatcactgactcttgaaatcactaacagtgaacctcaaatttggttatgatgttaacagagaagaaatatttgagtctggaatattgaaactagctttcctagaattccattaataaatgctgctcccccatatagtcttcccttctgtataattaacataggttgtctcatggctttgatcttcaaaaggaagagccttttaaaaacatttgccaacctcaagaataaatactgaaagtcttgaaagtatggtcatttcagctattccagattgctgtctgtgatttctcacatttttatttgctgagaaacattcagaaaattattccaaaaatgaaggtacattttctgttctctcctaggttagagaggggtggcctggggtgcttcatgagaaatgtcttcctggatctgcggtggtcaggtttgcctctgcttttgttccctgcctttccgccacatcacacggcctcactgggcttcctaccagtttctcagaattacacgcacgaccatccaaacattggctccatgccagggctgtgactgcagcctgtgtaggaccatggggagttcagagtcatcatacaaggcagccaagaactgccataaacactacacagatggagggcatgggataggacaggagaggaggtgatgtacacttagaggtaactaaggctagtttgaaaaccgtgaattaagatattcttatcagtataaaaacactgagattgcttacctcccaaattgctttattgtattaactctcatgcttcagctcttggatttgttgtttctaactaacatgtcatgtacaccaaacattttataaatcaatcagtaaatattttgtaagacccaaaatcctggcatattgccaggtctgtggatttgcctgttgggtgttgggatgggatatcagaggaagaagcatacaagtgggaaaaactgtgattagaaagggaaaaataggcatttccacagtactattaagagaggcatgataatgccattttttttcttctgtacaactggtcagatttcaataaataatcattgatggttta

SEQ ID NO: 278095 - DNA, 3511 bp, Homo sapiens
agtgggccgttgccttacagttgctgagaggaggcgagaggcgggggcgctagggccgagatcatgtctgactgggagaggtttccttggcagcagaggacgctaggtttgggatgaaagaagctgggcagatgcaaaatctggagagcgcgagggccgggcggtcagtcagcacccagactggcagcatgaccggtcagataccaaggctttctaaagtcaaccttttcactctgctcagcctctggatggagctctttccagcagaagcccagcggcaaaaatctcagaaaaatgaagagggaaagcatggacccttaggagataatgaagagaggaccagagtatctactgacaaaagacaggtaaagagaactggtcttgtggtggtgaaaaacatgaaaattgttggtctccactgttctagtgaagatttacatgccgggcagattgctcttattaaacatgggtcaaggctgaaaaactgtgatctttatttttccagaaaaccatgttctgcttgtttgaaaatgattgtaaatggattactgggagcagctaagatgcctagatgaaaggtttaccatcactgctggttaggaaatggattatgagaactcgaacagagggaaggtgaaatgcaaccggaggaaacactctgatatgagctggagttaaccgaatttcatactggcctgctgatccagaaataagtttgcttacggaggcttctagttctgaagatgcaaagttagatgccaaagcagtggaaagattgaagtcaaacagtcgggcccatgtgtgtgtcttacttcaacctttggtgtgttatatggtgcagtttgtagaggagacctcttacaaatgtgactttattcaaaaaattacaaaaacattgccggatgctaacactgacttttattatgaatgtaaacaagaaagaataaaagaatatgaaatgttatttttggtttcaaatgaagaaatgcataagcaaatactgatgactataggtttggagaacctgtgtgaaaatccatactttagcaatctaaggcaaaacatgaaagaccttatcctacttttggccacagtagcttccagtgtgccgaactttaaacacttcggattttaccgtagcaatccagaacagattaatgaaattcacaatcaaagtttgccacaggaaattgcaaggcactgcatggttcaggccaggttattggcatatcgaactgaggatcataaaacaggagttggggcagtcatttgggcagaagggaaatctagaagttgtgatggaacaggtgccatgtactttgtaggatgtggttacaatgcttttcctgttggatctgagtatgctgacttcccacacatggatgacaagcagaaagacagagaaataaggaaattcagatacatcatacatgcggaacagaatgccttgacatttaggtgtcaagaaataaaaccagaagaaagaagcatgatttttgtgacaaagtgcccatgtgatgagtgtgtacctttaattaaaggtgcaggcataaaacaaatctatgcaggagatgtagatgttggaaaaaagaaggcagacatctcttacatgaggttcggggagcttgaaggtgttagcaaatttacgtggcagctgaatccatcaggagcttatggtcttgaacaaaatgagcctgaaaggagagaaaatggtgtgttgagacctgtcccacagaaggaagagcagcaccaggacaagaagctgcgcctcggaatccactaagaaggcctgtctacactgcaggggaacctcaagaacttttcattgcacttctaaaattcagccttgttcattcagaaaataaggatggattttgtgaataattgaaaagattttttaaggaagctaatttatttctaggatacaaatggtgttaataagaatatttgtcttttagatttatgtgtgggttttccataatgtagtagtgtgttattttattacacgaaatgagggagcaataacttcaaccaatgtaatcaccaacagggactgatttctatttatcttgactttatattagccaatttgaaagggtctgcttcacaagaggtcatgcctctgcagggaatcacacaccttttgagaaatattaattcttttgaattacaagagtgacagttagtaaactgctccagggaaataagtgtcatcttttaagagtcagtgtatagcaaaccaaaagatcacatttatacccaaagctttctagtaatcagaatttacttaattagaattgactcataaaaataaagttagtggactttgtctccatttttaaagtatattttgtaaatgttaattctgtggtcctgtttatcacagactttgggtagcaataggaagagagtgttattctgagacagtgtcgctgcttgatatcactgactcttgaaatcactaacagtgaacctcaaatttggttatgatgttaacagagaagaaatatttgagtctggaatattgaaactagctttcctagaattccattaataaatgctgctcccccatatagtcttcccttctgtataattaacataggttgtctcatggctttgatcttcaaaaggaagagccttttaaaaacatttgccaacctcaagaataaatactgaaagtcttgaaagtatggtcatttcagctattccagattgctgtctgtgatttctcacatttttatttgctgagaaacattcagaaaattattccaaaaatgaaggtacattttctgttctctcctaggttagagaggggtggcctggggtgcttcatgagaaatgtcttcctggatctgcggtggtcaggtttgcctctgcttttgttccctgcctttccgccacatcacacggcctcactgggcttcctaccagtttctcagaattacacgcacgaccatccaaacattggctccatgccagggctgtgactgcagcctgtgtaggaccatggggagttcagagtcatcatacaaggcagccaagaactgccataaacactacacagatggagggcatgggataggacaggagaggaggtgatgtacacttagaggtaactaaggctagtttgaaaaccgtgaattaagatattcttatcagtataaaaacactgagattgcttacctcccaaattgctttattgtattaactctcatgcttcagctcttggatttgttgtttctaactaacatgtcatgtacaccaaacattttataaatcaatcagtaaatattttgtaagacccaaaatcctggcatattgccaggtctgtggatttgcctgttgggtgttgggatgggatatcagaggaagaagcatacaagtgggaaaaactgtgattagaaagggaaaaataggcatttccacagtactattaagagaggcatgataatgccattttttttcttctgtacaactggtcagatttcaataaataatcattgatggttta

SEQ ID NO: 278096 - DNA, 3246 bp, Homo sapiens
agtgggccgttgccttacagttgctgagaggaggcgagaggcgggggcgctagggccgagatcatgtctgactgggagaggtttccttggcagcagaggacgctaggtttgggatgaaagaagctgggcagatgcaaaatctggagagcgcgagggccgggcggtcagtcagcacccagactggcagcatgaccggtcagataccaaggctttctaaagtcaaccttttcactctgctcagcctctggatggagctctttccagcagaagcccagcggcaaaaatctcagaaaaatgaagagggaaagcatggacccttaggagataatgaagagaggaccagagtatctactgacaaaagacagaaaaccatgttctgcttgtttgaaaatgattgtaaatgctggagttaaccgaatttcatactggcctgctgatccagaaataagtttgcttacggaggcttctagttctgaagatgcaaagttagatgccaaagcagtggaaagattgaagtcaaacagtcgggcccatgtgtgtgtcttacttcaacctttggtgtgttatatggtgcagtttgtagaggagacctcttacaaatgtgactttattcaaaaaattacaaaaacattgccggatgctaacactgacttttattatgaatgtaaacaagaaagaataaaagaatatgaaatgttatttttggtttcaaatgaagaaatgcataagcaaatactgatgactataggtttggagaacctgtgtgaaaatccatactttagcaatctaaggcaaaacatgaaagaccttatcctacttttggccacagtagcttccagtgtgccgaactttaaacacttcggattttaccgtagcaatccagaacagattaatgaaattcacaatcaaagtttgccacaggaaattgcaaggcactgcatggttcaggccaggttattggcatatcgaactgaggatcataaaacaggagttggggcagtcatttgggcagaagggaaatctagaagttgtgatggaacaggtgccatgtactttgtaggatgtggttacaatgcttttcctgttggatctgagtatgctgacttcccacacatggatgacaagcagaaagacagagaaataaggaaattcagatacatcatacatgcggaacagaatgccttgacatttaggtgtcaagaaataaaaccagaagaaagaagcatgatttttgtgacaaagtgcccatgtgatgagtgtgtacctttaattaaaggtgcaggcataaaacaaatctatgcaggagatgtagatgttggaaaaaagaaggcagacatctcttacatgaggttcggggagcttgaaggtgttagcaaatttacgtggcagctgaatccatcaggagcttatggtcttgaacaaaatgagcctgaaaggagagaaaatggtgtgttgagacctgtcccacagaaggaagagcagcaccaggacaagaagctgcgcctcggaatccactaagaaggcctgtctacactgcaggggaacctcaagaacttttcattgcacttctaaaattcagccttgttcattcagaaaataaggatggattttgtgaataattgaaaagattttttaaggaagctaatttatttctaggatacaaatggtgttaataagaatatttgtcttttagatttatgtgtgggttttccataatgtagtagtgtgttattttattacacgaaatgagggagcaataacttcaaccaatgtaatcaccaacagggactgatttctatttatcttgactttatattagccaatttgaaagggtctgcttcacaagaggtcatgcctctgcagggaatcacacaccttttgagaaatattaattcttttgaattacaagagtgacagttagtaaactgctccagggaaataagtgtcatcttttaagagtcagtgtatagcaaaccaaaagatcacatttatacccaaagctttctagtaatcagaatttacttaattagaattgactcataaaaataaagttagtggactttgtctccatttttaaagtatattttgtaaatgttaattctgtggtcctgtttatcacagactttgggtagcaataggaagagagtgttattctgagacagtgtcgctgcttgatatcactgactcttgaaatcactaacagtgaacctcaaatttggttatgatgttaacagagaagaaatatttgagtctggaatattgaaactagctttcctagaattccattaataaatgctgctcccccatatagtcttcccttctgtataattaacataggttgtctcatggctttgatcttcaaaaggaagagccttttaaaaacatttgccaacctcaagaataaatactgaaagtcttgaaagtatggtcatttcagctattccagattgctgtctgtgatttctcacatttttatttgctgagaaacattcagaaaattattccaaaaatgaaggtacattttctgttctctcctaggttagagaggggtggcctggggtgcttcatgagaaatgtcttcctggatctgcggtggtcaggtttgcctctgcttttgttccctgcctttccgccacatcacacggcctcactgggcttcctaccagtttctcagaattacacgcacgaccatccaaacattggctccatgccagggctgtgactgcagcctgtgtaggaccatggggagttcagagtcatcatacaaggcagccaagaactgccataaacactacacagatggagggcatgggataggacaggagaggaggtgatgtacacttagaggtaactaaggctagtttgaaaaccgtgaattaagatattcttatcagtataaaaacactgagattgcttacctcccaaattgctttattgtattaactctcatgcttcagctcttggatttgttgtttctaactaacatgtcatgtacaccaaacattttataaatcaatcagtaaatattttgtaagacccaaaatcctggcatattgccaggtctgtggatttgcctgttgggtgttgggatgggatatcagaggaagaagcatacaagtgggaaaaactgtgattagaaagggaaaaataggcatttccacagtactattaagagaggcatgataatgccattttttttcttctgtacaactggtcagatttcaataaataatcattgatggttta

SEQ ID NO: 278097 - DNA, 3332 bp, Homo sapiens
agtgggccgttgccttacagttgctgagaggaggcgagaggcgggggcgctagggccgagatcatgtctgactgggagaggtttccttggcagcagaggacgctaggtttgggatgaaagaagctgggcagatgcaaaatctggagagcgcgagggccgggcggtcagtcagcacccagactggcagcatgaccggtcagataccaaggctttctaaagtcaaccttttcactctgctcagcctctggatggagctctttccagcagaagcccagcggcaaaaatctcagaaaaatgaagagggaaagcatggacccttaggagataatgaagagaggaccagagtatctactgacaaaagacaggtaaagagaactggtcttgtggtggtgaaaaacatgaaaattgttggtctccactgttctagtgaagatttacatgccgggcagattgctcttattaaacatgggtcaaggctgaaaaactgtgatctttatttttccagaaaaccatgttctgcttgtttgaaaatgattgtaaatgctggagttaaccgaatttcatactggcctgctgatccagaaataagtttgcttacggaggcttctagttctgaagatgcaaagttagatgccaaagcagtggaaagattgaagtcaaacagtcgggcccatgtgtgtgtcttacttcaacctttggtgtgttatatggtgcagtttgtagaggagacctcttacaaatgtgactttattcaaaaaattacaaaaacattgccggatgctaacactgacttttattatgaatgtaaacaagaaagaataaaagaatatgaaatgttatttttggtttcaaatgaagaaatgcataagcaaatactgatgactataggtttggagaacctgtgtgaaaatccatactttagcaatctaaggcaaaacatgaaagaccttatcctacttttggccacagtagcttccagtgtgccgaactttaaacacttcggattttaccgtagcaatccagaacagattaatgaaattcacaatcaaagtttgccacaggaaattgcaaggcactgcatggttcaggccaggttattggcatatcgaactgaggatcataaaacaggagttggggcagtcatttgggcagaagggaaatctagaagttgtgatggaacaggtgccatgtactttgtaggatgtggttacaatgcttttcctgttggatctgagtatgctgacttcccacacatggatgacaagcagaaagacagagaaataaggaaattcagatacatcatacatgcggaacagaatgccttgacatttaggtgtcaagaaataaaaccagaagaaagaagcatgatttttgtgacaaagtgcccatgtgatgagtgtgtacctttaattaaaggtgcaggcataaaacaaatctatgcaggagatgtagatgttggaaaaaagaaggcagacatctcttacatgaggttcggggagcttgaaggtgttagcaaatttacgtggcagctgaatccatcaggagcttatggtcttgaacaaaatgagcctgaaaggagagaaaatggtgtgttgagacctgtcccacagaaggaagagcagcaccaggacaagaagctgcgcctcggaatccactaagaaggcctgtctacactgcaggggaacctcaagaacttttcattgcacttctaaaattcagccttgttcattcagaaaataaggatggattttgtgaataattgaaaagattttttaaggaagctaatttatttctaggatacaaatggtgttaataagaatatttgtcttttagatttatgtgtgggttttccataatgtagtagtgtgttattttattacacgaaatgagggagcaataacttcaaccaatgtaatcaccaacagggactgatttctatttatcttgactttatattagccaatttgaaagggtctgcttcacaagaggtcatgcctctgcagggaatcacacaccttttgagaaatattaattcttttgaattacaagagtgacagttagtaaactgctccagggaaataagtgtcatcttttaagagtcagtgtatagcaaaccaaaagatcacatttatacccaaagctttctagtaatcagaatttacttaattagaattgactcataaaaataaagttagtggactttgtctccatttttaaagtatattttgtaaatgttaattctgtggtcctgtttatcacagactttgggtagcaataggaagagagtgttattctgagacagtgtcgctgcttgatatcactgactcttgaaatcactaacagtgaacctcaaatttggttatgatgttaacagagaagaaatatttgagtctggaatattgaaactagctttcctagaattccattaataaatgctgctcccccatatagtcttcccttctgtataattaacataggttgtctcatggctttgatcttcaaaaggaagagccttttaaaaacatttgccaacctcaagaataaatactgaaagtcttgaaagtatggtcatttcagctattccagattgctgtctgtgatttctcacatttttatttgctgagaaacattcagaaaattattccaaaaatgaaggtacattttctgttctctcctaggttagagaggggtggcctggggtgcttcatgagaaatgtcttcctggatctgcggtggtcaggtttgcctctgcttttgttccctgcctttccgccacatcacacggcctcactgggcttcctaccagtttctcagaattacacgcacgaccatccaaacattggctccatgccagggctgtgactgcagcctgtgtaggaccatggggagttcagagtcatcatacaaggcagccaagaactgccataaacactacacagatggagggcatgggataggacaggagaggaggtgatgtacacttagaggtaactaaggctagtttgaaaaccgtgaattaagatattcttatcagtataaaaacactgagattgcttacctcccaaattgctttattgtattaactctcatgcttcagctcttggatttgttgtttctaactaacatgtcatgtacaccaaacattttataaatcaatcagtaaatattttgtaagacccaaaatcctggcatattgccaggtctgtggatttgcctgttgggtgttgggatgggatatcagaggaagaagcatacaagtgggaaaaactgtgattagaaagggatcttctgtacaactggtcagatttcaataaataatcattgatggttta

SEQ ID NO: 278098 - DNA, 421 bp, Homo sapiens
ataggtgacttggtaatagacatttattatattgagggttctagatatactgcaatgatagggtggattttataatgaaaaccctaaattcagcatgtatctcataattacctttcgtattttgtatttcagctggagttaaccgaatttcatactggcctgctgatccagaaataagtttgcttacggaggcttctagttctgaagatgcaaagttagatgccaaagcagtggaaagattgaagtcaaacagtcgggcccatgtgtgtgtcttacttcaacctttggtgtgttatatggtgcagtttgtagaggagacctcttacaaatgtgactttattcaaaaaattacaaaaacattgccggatgctaacactgacttttattatgaatgtaaacaagaaagaataaaagaatatga

SEQ ID NO: 278099 - DNA, 3333 bp, Homo sapiens
agtgggccgttgccttacagttgctgagaggaggcgagaggcgggggcgctagggccgagatcatgtctgactgggagaggtttccttggcagcagaggacgctaggtttgggatgaaagaagctgggcagatgcaaaatctggagagcgcgagggccgggcggtcagtcagcacccagactggcagcatgaccggtcagataccaaggctttctaaagtcaaccttttcactctgctcagcctctggatggagctctttccagcagaagcccagcggcaaaaatctcagaaaaatgaagagggaaagcatggacccttaggagataatgaagagaggaccagagtatctactgacaaaagacaggattactgggagcagctaagatgcctagatgaaaggtttaccatcactgctggttaggaaatggattatgagaactcgaacagagggaaggtgaaatgcaaccggaggaaacactctgatatgagctggagttaaccgaatttcatactggcctgctgatccagaaataagtttgcttacggaggcttctagttctgaagatgcaaagttagatgccaaagcagtggaaagattgaagtcaaacagtcgggcccatgtgtgtgtcttacttcaacctttggtgtgttatatggtgcagtttgtagaggagacctcttacaaatgtgactttattcaaaaaattacaaaaacattgccggatgctaacactgacttttattatgaatgtaaacaagaaagaataaaagaatatgaaatgttatttttggtttcaaatgaagaaatgcataagcaaatactgatgactataggtttggagaacctgtgtgaaaatccatactttagcaatctaaggcaaaacatgaaagaccttatcctacttttggccacagtagcttccagtgtgccgaactttaaacacttcggattttaccgtagcaatccagaacagattaatgaaattcacaatcaaagtttgccacaggaaattgcaaggcactgcatggttcaggccaggttattggcatatcgaactgaggatcataaaacaggagttggggcagtcatttgggcagaagggaaatctagaagttgtgatggaacaggtgccatgtactttgtaggatgtggttacaatgcttttcctgttggatctgagtatgctgacttcccacacatggatgacaagcagaaagacagagaaataaggaaattcagatacatcatacatgcggaacagaatgccttgacatttaggtgtcaagaaataaaaccagaagaaagaagcatgatttttgtgacaaagtgcccatgtgatgagtgtgtacctttaattaaaggtgcaggcataaaacaaatctatgcaggagatgtagatgttggaaaaaagaaggcagacatctcttacatgaggttcggggagcttgaaggtgttagcaaatttacgtggcagctgaatccatcaggagcttatggtcttgaacaaaatgagcctgaaaggagagaaaatggtgtgttgagacctgtcccacagaaggaagagcagcaccaggacaagaagctgcgcctcggaatccactaagaaggcctgtctacactgcaggggaacctcaagaacttttcattgcacttctaaaattcagccttgttcattcagaaaataaggatggattttgtgaataattgaaaagattttttaaggaagctaatttatttctaggatacaaatggtgttaataagaatatttgtcttttagatttatgtgtgggttttccataatgtagtagtgtgttattttattacacgaaatgagggagcaataacttcaaccaatgtaatcaccaacagggactgatttctatttatcttgactttatattagccaatttgaaagggtctgcttcacaagaggtcatgcctctgcagggaatcacacaccttttgagaaatattaattcttttgaattacaagagtgacagttagtaaactgctccagggaaataagtgtcatcttttaagagtcagtgtatagcaaaccaaaagatcacatttatacccaaagctttctagtaatcagaatttacttaattagaattgactcataaaaataaagttagtggactttgtctccatttttaaagtatattttgtaaatgttaattctgtggtcctgtttatcacagactttgggtagcaataggaagagagtgttattctgagacagtgtcgctgcttgatatcactgactcttgaaatcactaacagtgaacctcaaatttggttatgatgttaacagagaagaaatatttgagtctggaatattgaaactagctttcctagaattccattaataaatgctgctcccccatatagtcttcccttctgtataattaacataggttgtctcatggctttgatcttcaaaaggaagagccttttaaaaacatttgccaacctcaagaataaatactgaaagtcttgaaagtatggtcatttcagctattccagattgctgtctgtgatttctcacatttttatttgctgagaaacattcagaaaattattccaaaaatgaaggtacattttctgttctctcctaggttagagaggggtggcctggggtgcttcatgagaaatgtcttcctggatctgcggtggtcaggtttgcctctgcttttgttccctgcctttccgccacatcacacggcctcactgggcttcctaccagtttctcagaattacacgcacgaccatccaaacattggctccatgccagggctgtgactgcagcctgtgtaggaccatggggagttcagagtcatcatacaaggcagccaagaactgccataaacactacacagatggagggcatgggataggacaggagaggaggtgatgtacacttagaggtaactaaggctagtttgaaaaccgtgaattaagatattcttatcagtataaaaacactgagattgcttacctcccaaattgctttattgtattaactctcatgcttcagctcttggatttgttgtttctaactaacatgtcatgtacaccaaacattttataaatcaatcagtaaatattttgtaagacccaaaatcctggcatattgccaggtctgtggatttgcctgttgggtgttgggatgggatatcagaggaagaagcatacaagtgggaaaaactgtgattagaaagggaaaaataggcatttccacagtactattaagagaggcatgataatgccattttttttcttctgtacaactggtcagatttcaataaataatcattgatggttta

SEQ ID NO: 278100 - DNA, 3565 bp, Homo sapiens
  misc_feature (3392)..(3394): n is a, c, g, or t
  misc_feature (3396)..(3397): n is a, c, g, or t
  misc_feature (3402)..(3402): n is a, c, g, or t
  misc_feature (3418)..(3418): n is a, c, g, or t
  misc_feature (3430)..(3430): n is a, c, g, or t
  misc_feature (3464)..(3464): n is a, c, g, or t
  misc_feature (3469)..(3470): n is a, c, g, or t
  misc_feature (3479)..(3479): n is a, c, g, or t
  misc_feature (3484)..(3484): n is a, c, g, or t
  misc_feature (3487)..(3487): n is a, c, g, or t
  misc_feature (3489)..(3489): n is a, c, g, or t
agtgggccgttgccttacagttgctgagaggaggcgagaggcgggggcgctagggccgagatcatgtctgactgggagaggtttccttggcagcagaggacgctaggtttgggatgaaagaagctgggcagatgcaaaatctggagagcgcgagggccgggcggtcagtcagcacccagactggcagcatgaccggtcagataccaaggctttctaaagtcaaccttttcactctgctcagcctctggatggagctctttccagcagaagcccagcggcaaaaatctcagaaaaatgaagagggaaagcatggacccttaggagataatgaagagaggaccagagtatctactgacaaaagacaggtaaagagaactggtcttgtggtggtgaaaaacatgaaaattgttggtctccactgttctagtgaagatttacatgccgggcagattgctcttattaaacatgggtcaaggctgaaaaactgtgatctttatttttccagaaaaccatgttctgcttgtttgaaaatgattgtaaatgctggagttaaccgaatttcatactggcctgctgatccagaaataagtttgcttacggaggcttctagttctgaagatgcaaagttagatgccaaagcagtggaaagattgaagtcaaacagtcgggcccatgtgtgtgtcttacttcaacctttggtgtgttatatggtgcagtttgtagaggagacctcttacaaatgtgactttattcaaaaaattacaaaaacattgccggatgctaacactgacttttattatgaatgtaaacaagaaagaataaaagaatatgaaatgttatttttggtttcaaatgaagaaatgcataagcaaatactgatgactataggtttggagaacctgtgtgaaaatccatactttagcaatctaaggcaaaacatgaaagaccttatcctacttttggccacagtagcttccagtgtgccgaactttaaacacttcggattttaccgtagcaatccagaacagattaatgaaattcacaatcaaagtttgccacaggaaattgcaaggcactgcatggttcaggccaggttattggcatatcgaactgaggatcataaaacaggagttggggcagtcatttgggcagaagggaaatctagaagttgtgatggaacaggtgccatgtactttgtaggatgtggttacaatgcttttcctgttggatctgagtatgctgacttcccacacatggatgacaagcagaaagacagagaaataaggaaattcagatacatcatacatgcggaacagaatgccttgacatttaggtgtcaagaaataaaaccagaagaaagaagcatgatttttgtgacaaagtgcccatgtgatgagtgtgtacctttaattaaaggtgcaggcataaaacaaatctatgcaggagatgtagatgttggaaaaaagaaggcagacatctcttacatgaggttcggggagcttgaaggtgttagcaaatttacgtggcagctgaatccatcaggagcttatggtcttgaacaaaatgagcctgaaaggagagaaaatggtgtgttgagacctgtcccacagaaggaagagcagcaccaggacaagaagctgcgcctcggaatccactaagaaggcctgtctacactgcaggggaacctcaagaacttttcattgcacttctaaaattcagccttgttcattcagaaaataaggatggattttgtgaataattgaaaagattttttaaggaagctaatttatttctaggatacaaatggtgttaataagaatatttgtcttttagatttatgtgtgggttttccataatgtagtagtgtgttattttattacacgaaatgagggagcaataacttcaaccaatgtaatcaccaacagggactgatttctatttatcttgactttatattagccaatttgaaagggtctgcttcacaagaggtcatgcctctgcagggaatcacacaccttttgagaaatattaattcttttgaattacaagagtgacagttagtaaactgctccagggaaataagtgtcatcttttaagagtcagtgtatagcaaaccaaaagatcacatttatacccaaagctttctagtaatcagaatttacttaattagaattgactcataaaaataaagttagtggactttgtctccatttttaaagtatattttgtaaatgttaattctgtggtcctgtttatcacagactttgggtagcaataggaagagagtgttattctgagacagtgtcgctgcttgatatcactgactcttgaaatcactaacagtgaacctcaaatttggttatgatgttaacagagaagaaatatttgagtctggaatattgaaactagctttcctagaattccattaataaatgctgctcccccatatagtcttcccttctgtataattaacataggttgtctcatggctttgatcttcaaaaggaagagccttttaaaaacatttgccaacctcaagaataaatactgaaagtcttgaaagtatggtcatttcagctattccagattgctgtctgtgatttctcacatttttatttgctgagaaacattcagaaaattattccaaaaatgaaggtacattttctgttctctcctaggttagagaggggtggcctggggtgcttcatgagaaatgtcttcctggatctgcggtggtcaggtttgcctctgcttttgttccctgcctttccgccacatcacacggcctcactgggcttcctaccagtttctcagaattacacgcacgaccatccaaacattggctccatgccagggctgtgactgcagcctgtgtaggaccatggggagttcagagtcatcatacaaggcagccaagaactgccataaacactacacagatggagggcatgggataggacaggagaggaggtgatgtacacttagaggtaactaaggctagtttgaaaaccgtgaattaagatattcttatcagtataaaaacactgagattgcttacctcccaaattgctttattgtattaactctcatgcttcagctcttggatttgttgtttctaactaacatgtcatgtacaccaaacattttataaatcaatcagtaaatattttgtaagacccaaaatcctggcatattgccaggtctgtggatttgcctgttgggtgttgggatgggatatcagaggaagaagcatacaagtgggaaaaactgtgattagaaagggaaaaataggcatttccacagtactattaagagaggcatgataatgccattttttttcttctgtacaactggtcagatttcaataaataatcattgatggtttaaaaaannnanntcacntactaccagacaaccntagccaaaccanttacccaaataaagttaggcgatagaaattgaancctgnngcatagatntagtnccnangggaaagatgataaatttgaccatggcatactttgcaaggactaacccgtatacttgtgaataatgaataacttga

SEQ ID NO: 278101 - DNA, 3618 bp, Homo sapiens
  misc_feature (3445)..(3447): n is a, c, g, or t
  misc_feature (3449)..(3450): n is a, c, g, or t
  misc_feature (3455)..(3455): n is a, c, g, or t
  misc_feature (3471)..(3471): n is a, c, g, or t
  misc_feature (3483)..(3483): n is a, c, g, or t
  misc_feature (3517)..(3517): n is a, c, g, or t
  misc_feature (3522)..(3523): n is a, c, g, or t
  misc_feature (3532)..(3532): n is a, c, g, or t
  misc_feature (3537)..(3537): n is a, c, g, or t
  misc_feature (3540)..(3540): n is a, c, g, or t
  misc_feature (3542)..(3542): n is a, c, g, or t
agtgggccgttgccttacagttgctgagaggaggcgagaggcgggggcgctagggccgagatcatgtctgactgggagaggtttccttggcagcagaggacgctaggtttgggatgaaagaagctgggcagatgcaaaatctggagagcgcgagggccgggcggtcagtcagcacccagactggcagcatgaccggtcagataccaaggctttctaaagtcaaccttttcactctgctcagcctctggatggagctctttccagcagaagcccagcggcaaaaatctcagaaaaatgaagagggaaagcatggacccttaggagataatgaagagaggaccagagtatctactgacaaaagacaggtaaagagaactggtcttgtggtggtgaaaaacatgaaaattgttggtctccactgttctagtgaagatttacatgccgggcagattgctcttattaaacatgggtcaaggctgaaaaactgtgatctttatttttccagaaaaccatgttctgcttgtttgaaaatgattgtaaatgctggagttaaccgaatttcatactggcctgctgatccagaaataagtttgcttacggaggcttctagttctgaagatgcaaagttagatgccaaagcagtggaaagattgaagtcaaacagtcgggcccatgtgtgtgtcttacttcaacctttggtgtgttatatggtgcagtttgtagaggagacctcttacaaatgtgactttattcaaaaaattacaaaaacattgccggatgctaacactgacttttattatgaatgtaaacaagaaagaataaaagaatatgaaatgttatttttggtttcaaatgaagaaatgcataagcaaatactgatgactataggtttggagaacctgtgtgaaaatccatactttagcaatctaaggcaaaacatgaaagaccttatcctacttttggccacagtagcttccagtgtgccgaactttaaacacttcggattttaccgtagcaatccagaacagattaatgaaattcacaatcaaagtttgccacaggaaattgcaaggcactgcatggttcaggccaggttattggcatatcgaactgaggatcataaaacaggagttggggcagtcatttgggcagaagggaaatctagaagttgtgatggaacaggtgccatgtactttgtaggatgtggttacaatgcttttcctgttggatctgagtatgctgacttcccacacatggatgacaagcagaaagacagagaaataaggaaattcagatacatcatacatgcggaacagaatgccttgacatttaggtgtcaagaaataaaaccagaagaaagaagcatgatttttgtgacaaagtgcccatgtgatgagtgtgtacctttaattaaaggtgcaggcataaaacaaatctatgcaggagatgtagatgttggaaaaaagaaggcagacatctcttacatgaggttcggggagcttgaaggtgttagcaaatttacgtggcagctgaatccatcaggagcttatggtcttgaacaaaatgagcctgaaaggagagaaaatggtgtgttgagacctgtcccacagaaggaagagcagcaccaggacaagaagctgcgcctcggaatccactaagaaggcctgtctacactgcaggggaacctcaagaacttttcattgcacttctaaaattcagccttgttcattcagaaaataaggatggattttgtgaataattgaaaagattttttaaggaagctaatttatttctaggatacaaatggtgttaataagaatatttgtcttttagatttatgtgtgggttttccataatgtagtagtgtgttattttattacacgaaatgagggagcaataacttcaaccaatgtaatcaccaacagggactgatttctatttatcttgactttatattagccaatttgaaagggtctgcttcacaagaggtcatgcctctgcagggaatcacacaccttttgagaaatattaattcttttgaattacaagagtgacagttagtaaactgctccagggaaataagtgtcatcttttaagagtcagtgtatagcaaaccaaaagatcacatttatacccaaagctttctagtaatcagaatttacttaattagaattgactcataaaaataaagttagtggactttgtctccatttttaaagtatattttgtaaatgttaattctgtggtcctgtttatcacagactttgggtagcaataggaagagagtgttattctgagacagtgtcgctgcttgatatcactgactcttgaaatcactaacagtgaacctcaaatttggttatgatgttaacagagaagaaatatttgagtctggaatattgaaactagctttcctagaattccattaataaatgctgctcccccatatagtcttcccttctgtataattaacataggttgtctcatggctttgatcttcaaaaggaagagccttttaaaaacatttgccaacctcaagaataaatactgaaagtcttgaaagtatggtcatttcagctattccagattgctgtctgtgatttctcacatttttatttgctgagaaacattcagaaaattattccaaaaatgaaggtacattttctgttctctcctaggttagagaggggtggcctggggtgcttcatgagaaatgtcttcctggatctgcggtggtcaggtttgcctctgcttttgttccctgcctttccgccacatcacacggcctcactgggcttcctaccagtttctcagaattacacgcacgaccatccaaacattggctccatgccagggctgtgactgcagcctgtgtaggaccatggggagttcagagtcatcatacaaggcagccaagaactgccataaacactacacagatggagggcatgggataggacaggagaggaggtgatgtacacttagaggtaactaaggctagtttgaaaaccgtgaattaagatattcttatcagtataaaaacactgagattgcttacctcccaaattgctttattgtattaactctcatgcttcagctcttggatttgttgtttctaactaacatgtcatgtacaccaaacattttataaatcaatcagtaaatattttgtaagacccaaaatcctggcatattgccaggtctgtggatttgcctgttgggtgttgggatgggatatcagaggaagaagcatacaagtgggaaaaactgtgattagaaagggaaaaataggcatttccacagtactattaagagaggcatgataatgccattttttttcttctgtacaactggtcagatttcaataaataatcattgatggtttaagaagtggacaatagaactagcagcttgacctcgagccgaattcggtacgagcaaaaannnanntcacntactaccagacaaccntagccaaaccanttacccaaataaagttaggcgatagaaattgaancctgnngcatagatntagtnccnangggaaagatgataaatttgaccatggcatactttgcaaggactaacccgtatacttgtgaataatgaataacttga

SEQ ID NO: 278102 - DNA, 1506 bp, Homo sapiens
agccaggtgcaagagaaaccaagccgcatcacttatttattcacactcgaaaagacacctcgtggacatttcagttaagactttcctatcagttctttctcagattctgggcacatagatcgcatgacggtttgcatcataatggcgtcttcagttgtgttctttagacatgacattctatatttgcctaggagacacacaggatttttcttcccttttgtaaagcaatgagctctttctgaatgatcttgaaaacacacggctccttccctctctgtttcccccacttttgggtagagctgtgacttgggagaaacacttctgtattagaagagtggtgagagggagcataaatggagttggtcaactctgggtccagaagacatcgtgggtggagaggactcgaaacctcagtgccactctgccccatcgaggccaagtcagattggaagccccattttgccagtgtctgaattcttaagcgatgctagaaatctagatttctaagaattgtcttggggctgcagttgataaaggaatctacaatcaactttttaacccagtccagagttgttgtatgtacactcgagacccaaaggaaggacagagaattttcctcacctcagcccaaaaggaggctggaatgcatgcttgcctgccacagtttccacttacttaccaccatcagtcagcaggcttttaggagagaattgcacgtgtgatttatttgcaaatcctttcaggtcctggaggagagatacttggtacacaatgcactttgtcatcacgtgtcaacatcccctcaatgcagggagcagcactacacgatgtaaaggtggaactggattgtgctgggatccttcaatcagcatttcatttagagctgcagcatttgcagagccatttgcaattgatgccagccccttggagggggtcagcgtgtagaagacaaaggacagccataaagccactgaatgcaaactttatatttacagtcagtaagtttataaatatatattacattcttacaatctacagtacattctacacgcagatggatttggaagcgggcagcggctgcagtattcaacagaacatgacacaggtaagaatggaaagaaatatgaggacgttactgaaagcaaaggattctcattgaaaaggggtgacagcttaatcacccaaccaaacaaggtaggtaagcttgcggacaggagcaggtgacttactggctgcagaaacctcagtctcaagagcaccacagttgcaggggagagggctaaggttgggagggtaaactggtgaaatttacacacacatgatctaaagagaattcaattctatggagaggaagaaggagtaaagacacacactcaaaattacagagatgagatggagaggaagcagggagaagataggttcaaaggaggagagagatacagagacagacacacagagagactggaaaacagacaactgaagagcagagagagagagaaaatgacc

SEQ ID NO: 278103 - DNA, 348 bp, Homo sapiens
caaaacccccttcttcccataggatatcttatgagattattgttccagagtactcactttgggaaatgttgctttggaccctggggagccattgaagtgttttaagcatgggagaaatatgaacaggtttgagtataagggatataatttgtgacagggatcctggagagaggtgggcccaaatcatcatggtcagtttatagaagtgttcatcgaggtcctccagcatcatagtccatgactccccagggctccatttgactggaataggattatgaggaaaacttatttggaacccctctgagaatcagtccaggtagccaagattttttgatttggttgagatct

SEQ ID NO: 278104 - DNA, 547 bp, Homo sapiens
gcgatgaggacgcgctcgggacactcacgttttctgcaccggcttccgccgcttgcgactggcgtaggtgatgttggcgctgctgctgttcatggtgcccagccgacggcggcggctactccccgggcactggcggccgggtccccggaacccggtgtaggctgggaccactgcggcggccggcgccgggttccgcgaagccgcgcccgctccacctgcgtcctctcgggacagtggcgtgggcgccgcgcctcaacgcctcggcgtcacgcaggcttccgcagcccgcgccagtacagtgttgtgaaccacttgtcatgggataaccaaaattaaacctggaatcgcagaagaaacaaattttttgaagaaattggatgtacttttttaaaatttttcattcaactaaaactttgttaactgtttcttggttgtggtcttctctaaattgtaatctttggcattcacttccaaagtatccaccactaaacttcataacatttattgtgtctcttcatcattaaactttgatgaatttacaaagtgt

SEQ ID NO: 278105 - DNA, 554 bp, Homo sapiens
ttttagcttgcaacaccatgaaaaaattactgagacactaggaatgctgtgaactgagaaagtttgggacctttggcataactaaatccttcatttaacagatggagtctcagtctgtcactaaggctggagtgcagtggcgcgatctcggctcactgcaacctccacctcccgggttcacgcgattctccagcctcagccttccacgtagctgggactacaggtgcatgccaccacacccagttttcctcaataggtgaactcagaaaacaggagaattacactaagtgctcattactttcctagtgttgtgaaccacttgtcatgggataaccaaaattaaacctggaatcgcagaagaaacaaattttttgaagaaattggatgtacttttttaaaatttttcattcaactaaaactttgttaactgtttcttggttgtggtcttctctaaattgtaatctttggcattcacttccaaagtatccaccactaaacttcataacatttattgtgtctcttcatcattaaactttgatgaatttacaaagtgt

SEQ ID NO: 278106 - DNA, 560 bp, Homo sapiens
gaagacgacagaaggggcctccttcctgccaccttgtgaagaagataaaaataaaaatgaagtcaccagccctcaggggtctgtcaaggcaacacacaaaatctccagttaccttctggtggatgacgtttggagacacatcgcgtccgtcacaggacacacttccgatggatttacagcaactcctgggggtcacgaaggtgtgttccaaggccacatctccaacctcacagagaggacaggaagtgatcagtaccccaactagcaagagtggcccgttcattggccgaggttcttgaggatagagtgggaggtgggagcgtccctcgtgctgccttcatttttcctaccctcagctcaggggtctgtgctagaggaagacacacgaaggctactgtgcccccaccacaagagagggaaacagggagacgcgtgggtctggagccaagcgtatctctctgtacccatcgcacacgaatttgaatcatctgctctttggaatcgcctacaccctgctgcacccacgatgtggctgtaactccattaaagaattgaatacc

SEQ ID NO: 278107 - DNA, 472 bp, Homo sapiens
tgaaggttgagtttcactggggacctacctctatctgcctagtaatctgtgtctcctgtagctatcatcatcactgattttctacgtacagatttcaattccaaacaaaaatatatgagaacgttcatttctccatacaactggctgggtcattggccttatcccgcaccgaagttgaaacttacaccatctgttcacatcatcagttcttctggttctcatgcttttgaacttcaactggcacaattccactggctctccttagtctccaggttgcagatggcagattataaatctccttagcctccacctttataatcctaactattactgacacctctttgaggacaaaggaagtagctttctgcaagccaaaaagacctcagaaaaacaacaaatcttccaaactcttgattttgactttttgcctccagaattgtgaagaaataaatatctgttatttaaaaaaaaa

SEQ ID NO: 278108 - DNA, 448 bp, Homo sapiens
gacacaaacagcagaacaacagacaccaggagctacttgaagggaccggcgtgagagtatggaggctgaagccatagaaaggagaaattattccagctgaggccaaaacatgaaccaaggctgggtcattggccttatcccgcaccgaagttgaaacttacaccatctgttcacatcatcagttcttctggttctcatgcttttgaacttcaactggcacaattccactggctctccttagtctccaggttgcagatggcagattataaatctccttagcctccacctttataatcctaactattactgacacctctttgaggacaaaggaagtagctttctgcaagccaaaaagacctcagaaaaacaacaaatcttccaaactcttgattttgactttttgcctccagaattgtgaagaaataaatatctgttatttaaaaaaaaa

SEQ ID NO: 278109 - DNA, 410 bp, Homo sapiens
gtgtgttcttccgccaatgtgttcctctcgacgtccagccacttctgtgcctgcctgcctgtcttggggtttttacaggcacaggataggggacgtggcaggccaggtggtcttggaaaatgcaaacttgggcatgaaaacaggagcgcttgtcctcccctatatgcgtgtgcacaggacctgaggtgaagccctagccagggacctgcccttctctacccagcgctttccttctctcatcccgagtcagtactaatcctaactattactgacacctctttgaggacaaaggaagtagctttctgcaagccaaaaagacctcagaaaaacaacaaatcttccaaactcttgattttgactttttgcctccagaattgtgaagaaataaatatctgttatttaaaaaaaaa

SEQ ID NO: 278110 - DNA, 81 bp, Homo sapiens
aatgaactgtttatattatctccgttgagtcaatacattataatgtattaaaatggaaaggtacaaaattgaaataaatac

SEQ ID NO: 278111 - DNA, 380 bp, Homo sapiens
tctggtaagtaaccagaaaatctttgccagttcgagtggttggaaggtgagatgtatgaaaatattcctaaggtcagcagtcactacataggcttaacttttcaattacttaattattacaatatcttaagcagaatcactatgactctgacttttgtttttaatcttatgagttcagtgatgtaagactaattttactgaaatatgctcacaaaagtcacaacagtagtgaccattttgggaatgattattaacatcaaatctcaatttctgttgatttctaaggcaccattatacatctaagaaaaaaagtaaagctgtcaatttaattgtaaaatgtcactgattgtaagacacaccttgatttaaaaaacctcaaa

SEQ ID NO: 278112 - DNA, 337 bp, Homo sapiens
aacttccttttttagaaactgattcagcagtacagaaagaacttagaaaccagacacctgctccatctgcagctcaaacttctgctccctctaagtaccaccgaactcgatctgggggagccagggatgaacgatatcgatcagatatccacacagaagcagttcaggctgcactggcaaagcataaagaacagaagatggctttgcccatgccaaccaaaaggcgatccacatttgttcagtctcctgcagatgcctgcacacctcctgacacatcttcggcctctgaggatgagggctctctgagacgccaagctgcgctctctgctgccttgca

SEQ ID NO: 278113 - DNA, 828 bp, Homo sapiens
ggctctaggtggcgggtcttggtttgcggaaggggctggagtcgctgcttctcggtgaccggcgcgtggcccggccaatcctgccgccgccacccacccgcaaccgcgtccgttgacggtcgggtccttggtcgccgggtccttgcgggcaccacagagcggggtggcgtccgctccctcgagtcctcggtgccagggaattcaccgctcaccaccccctgccccgccttgggtcctgctcggggaccaaaccactggaaggcagtggcgggaaacgggcgcctgtgccggaggtcctgatgaggggggtccaaggcttggggacttgtgcgggaaatgtgggtttaagtgccttcaaggtgtttttagtccattgggatgttgatcagcgttcatagctggcgctgatgcaggtcaccgggaagggaatgtgtgggtttatggccacgcataatctcttttagtcgtgtttaacttagcagggtagctctccatcctggctgggttttgttttgttttattttttattttacagagtttttctcagtgtgtaatgtttgtttttaaatcgcagataatcctgatgtaaaccattgacatagccagaaaatcaccaggctgtgattttccaaactcagcttcataacctattctgtgtgagctgtgatttttctatgattctgttttcctctttgggtactggtgggccctgaatgatggaccaccgttttcaccctgtaccttttcaaagtacacttgctgatcttagaactgtctgcagtgtcttaaggacatttgtattcacatgccttttaaaagctagccaga

SEQ ID NO: 278114 - DNA, 1200 bp, Homo sapiens
ggctctaggtggcgggtcttggtttgcggaaggggctggagtcgctgcttctcggtgaccggcgcgtggcccggccaatcctgccgccgccacccacccgcaaccgcgtccgttgacggtcgggtccttggtcgccgggtccttgcgggcaccacagagcggggtggcgtccgctccctcgagtcctcggtgccagggaattcaccgctcaccaccccctgccccgccttgggtcctgctcggggaccaaaccactggaaggcagtggcgggaaacgggcgcctgtgccggagagttgagggaacatgagccatttgcagagcttattgttagacaccctcttgggaaccaagcatgtggacagtgcagccctcatcaaaatccaggagcggagcttgtgtgtagcatcaccaggtttcaatgtaacgcccagtgatgtccgaacactggtgaatggatttgccaagaaccctttgcaagcccgaagagaaggactgtatttcaagggaaaagattacagatgtgtccgggcagatgaatattctctttatgccaaaaatgagaacactggtgtggttgttgtgaagacccatctgtatcttctggtagcaacttacactgagggcatgtatcctagcatctgtgtggaagccacagagagcctgggagactacctaagaaaaaaaggaagttaagtcatcagaggcccatgaaagacacttttattattttagaagaaaattgaagagcctaaagaaaaaatattttatggttgaaaaaacactagacagaaggcactaaaaaagaagaatgaattaagggagcaatttttattacttccagagatcctcttctttcactggaattacttgatcaactgttttttaataagtgttggtcatcggcatggaatgagagagcactgatcatttcacagagcatatctattgggaggctcctttctgtgaggctcttgtactcctacacaccttgctaagtatgccaagaatgcaaggctctcaccactctttatccaagacatttctcagggttaggttgcagcaagcaaccttgaaaaatgaagggatgtctcccatcaggacagagagcaagcttgcttactgtttgctataaaagcagtggagtccctgagctcagtgttacccctcctgtaatacaactccctgcatgtgtgaaatc

SEQ ID NO: 278115 - DNA, 478 bp, Homo sapiens
cggaaggccagggcgggcgagcccccgaggcccgagggagagggaagagcgccgggcccgggtcgcggaggcgggcgccgccggaacgcgaagcgcggggctactgcgggcaggcgcgagttcgcgcagcaccgcccccggcgtgacctgctggtcgcttccggcgcgggaggagaatgtggccgccttgcgggacgctccggaccctggccttggcgcggtcgcggggagcccgggcgagcagcagcgccgtgagttctgaggccaagaaccttctccacttgagaagccttcctgggggaggctgagtgggccaggcctggagccacgtaccaacactttatacccaggggaatggatcccaagggcccagataacgcccccaacttcttggggttcacacgcgtcctgagacatctgggaactgcctctgcctgggccaaagctattccattaaaactttattgctgtgcttact

SEQ ID NO: 278116 - DNA, 1955 bp, Homo sapiens
cggaaggccagggcgggcgagcccccgaggcccgagggagagggaagagcgccgggcccgggtcgcggaggcgggcgccgccggaacgcgaagcgcggggctactgcgggcaggcgcgagttcgcgcagcaccgcccccggcgtgacctgctggtcgcttccggcgcgggaggagaatgtggccgccttgcgggacgctccggaccctggccttggcgcggtcgcggggagcccgggcctgcagcggggatgggggcgtttcctacacgcagggccagagtccggagccgcggacccgcgagtatttctactacgtggaccaccagggccagcttttcctggatgattccaaaatgaagaatttcatcacctgcttcaaagacccgcagttcctggtcaccttcttctcccgcctgagacccaaccgcagcgggcgctacgaggccgctttccccttcctctcgccctgcggcagagagcgcaacttcctgcgctgcgaggaccggccggtggtcttcacgcacctgctgaccgcggaccacgggcctccgcgcctctcctactgcggcggtggcgaggccctggccgtgcccttcgagccggcgcgcctgctgcccctggccgccaacgggcgcctgtaccacccggcgccggagcgtgcgggcggcgtgggcctggtgcgctccgccctggccttcgagctcagcgcctgcttcgagtacgggcccggcgcgcctgcgctgccctcgcacgtgcgctggcagggccgccgcctcgccctcaccatggacctggccccgctgctgctcgcggctcggtcgccctgagcggggccaagggaaaggcgggaggccgcgggcgcctctcgccccgctcccccgggactccacgccccggaaagcccgcgccacccgcgctcgcggcagcctagtgcgcctgcgcgctcggccccgcccccacccggcgctgtccttggtgctgccgcggcccggccctcccggacaccccggctccgccacggcgcgcgccccccgcgcacccgactccggcgccctccgggattggcctgcgctcgagacgtcaggcacaggcggcgggcgcggggctctggtgcgcgtgcgcgagcgtcccccgccccctcccagcccggcgactgctcgggcccggccgccacctgcacggcgggggagccgctcgccgcgggagcgtcaggtgaggggacgcccgacccaaggtcaccaggcgtgggggcgctgggggatcggggaccatcccggctctgaccctggtgcgctccgagaagggcgtgggtcctggagggggatggggaacgcggaggccacgccctccctgagcccggccgaaaatcaaccggctctcgtgggtagcagaggaggccgtgggggatacaggcaccaggtcgcagcgctgcagaggtgcgcaagggccgcccaaagaccagcttgggcctcgcactgcgcccgaggcagacacagggcgttccatcctcttccctccccgctcccgcacagaggggcgcccaggaggcagtgacagtcgtcgcggaatcctgcgtgtgacaccccgcccctgcccagcggattagggagttgtcctctggtaaaaggatttctgggctgcttccagcttggggccctcatccctgccctggcaggcctttctacaccgatctgcatctagtggggggtcagcgtgagcagcagcgccgtgagttctgaggccaagaaccttctccacttgagaagccttcctgggggaggctgagtgggccaggcctggagccacgtaccaacactttatacccaggggaatggatcccaagggcccagataacgcccccaacttcttggggttcacacgcgtcctgagacatctgggaactgcctctgcctgggccaaagctattccattaaaactttattgctgtgcttact

SEQ ID NO: 278117 - DNA, 2604 bp, Homo sapiens
  misc_feature (1968)..(1968): n is a, c, g, or t
  misc_feature (2603)..(2604): n is a, c, g, or t
cggaaggccagggcgggcgagcccccgaggcccgagggagagggaagagcgccgggcccgggtcgcggaggcgggcgccgccggaacgcgaagcgcggggctactgcgggcaggcgcgagttcgcgcagcaccgcccccggcgtgacctgctggtcgcttccggcgcgggaggagaatgtggccgccttgcgggacgctccggaccctggccttggcgcggtcgcggggagcccgggcctgcagcggggatgggggcgtttcctacacgcagggccagagtccggagccgcggacccgcgagtatttctactacgtggaccaccagggccagcttttcctggatgattccaaaatgaagaatttcatcacctgcttcaaagacccgcagttcctggtcaccttcttctcccgcctgagacccaaccgcagcgggcgctacgaggccgctttccccttcctctcgccctgcggcagagagcgcaacttcctgcgctgcgaggaccggccggtggtcttcacgcacctgctgaccgcggaccacgggcctccgcgcctctcctactgcggcggtggcgaggccctggccgtgcccttcgagccggcgcgcctgctgcccctggccgccaacgggcgcctgtaccacccggcgccggagcgtgcgggcggcgtgggcctggtgcgctccgccctggccttcgagctcagcgcctgcttcgagtacgggcccggcgcgcctgcgctgccctcgcacgtgcgctggcagggccgccgcctcgccctcaccatggacctggccccgctgctgctcgcggctcggtcgccctgagcggggccaagggaaaggcgggaggccgcgggcgcctctcgccccgctcccccgggactccacgccccggaaagcccgcgccacccgcgctcgcggcagcctagtgcgcctgcgcgctcggccccgcccccacccggcgctgtccttggtgctgccgcggcccggccctcccggacaccccggctccgccacggcgcgcgccccccgcgcacccgactccggcgccctccgggattggcctgcgctcgagacgtcaggcacaggcggcgggcgcggggctctggtgcgcgtgcgcgagcgtcccccgccccctcccagcccggcgactgctcgggcccggccgccacctgcacggcgggggagccgctcgccgcgggagcgtcaggtgaggggacgcccgacccaaggtcaccaggcgtgggggcgctgggggatcggggaccatcccggctctgaccctggtgcgctccgagaagggcgtgggtcctggagggggatggggaacgcggaggccacgccctccctgagcccggccgaaaatcaaccggctctcgtgggtagcagaggaggccgtgggggatacaggcaccaggtcgcagcgctgcagaggtgcgcaagggccgcccaaagaccagcttgggcctcgcactgcgcccgaggcagacacagggcgttccatcctcttccctccccgctcccgcacagaggggcgcccaggaggcagtgacagtcgtcgcggaatcctgcgtgtgacaccccgcccctgcccagcggattagggagttgtcctctggtaaaaggatttctgggctgcttccagcttggggccctcatccctgccctggcaggcctttctacaccgatctgcatctagtggggggtcagcgtgagcagcagcgccgtgagttctgaggccaagaaccttctccacttgagaagccttcctgggggaggctgagtgggccaggcctggagccacgtaccaacactttatacccaggggaatggatcccaagggcccagataacgcccccaacttcttggggttcacacgcgtcctgagacatctgggaactgcctctgcctgggccaaagctattccattaaaactttattgctgtgcttactaaaaaaaaaaaanaaaaaaaaaaaaaaaaaaaaaaaaaaaaaaaaaaaaaaaaaaggggggggggcgcaaaaaaattcccccgggggggcccatttataacgcgcgaccgccagtttttgcgggaccaagaggggcccccccaaaaggagaggcgcgcaataaataagcacaggagcgcggcgcgggccgttacacccgcgcgggggagcggaacaaaggcccaggacggcgcacacgtgcggaaaggcacccatctccgcggcgggggggccatctcggggcccaaccaccgaggaggataaacgcccccaagggaaaataacctttcaacggggcctagtcgggccacccacgcgccaaggcgcgcggggaaaaaagtggcacccgcgactagaattggcacaactctgccgggcgcggcaaaaaaagggcacaccacaggaaagaagcacagaagagaagagcgacgacacgcagaagaaagagcagagaaagcgacaacgagaagaggaacacaagacaagagaaagcaagaacaaacaagaaacaaaggagcgacagcagacgaggaagagagacagacgaagacgagcaccagacagcaacgccgacaccaacaaagacaggaagaagagacgcagcgacann

SEQ ID NO: 278118 - DNA, 1871 bp, Homo sapiens
cggaaggccagggcgggcgagcccccgaggcccgagggagagggaagagcgccgggcccgggtcgcggaggcgggcgccgccggaacgcgaagcgcggggctactgcgggcaggcgcgagttcgcgcagcaccgcccccggcgtgacctgctggtcgcttccggcgcgggaggagaatgtggccgccttgcgggacgctccggaccctggccttggcgcggtcgcggggagcccgggcctgcagcggggatgggggcgtttcctacacgcagggccagagtccggagccgcggacccgcgagtatttctactacgtggaccaccagggccagcttttcctggatgattccaaaatgaagaatttcatcacctgcttcaaaggtaatgctgtgcctccctctccagccccttctttctcccttccgggcagcccctgatgggctccccgactctgccgacgggcccagcgcaccaaggagtgggcgtcctgcgctcaggagccccgctgagtgaggccgggcgaacctcttaccgtcggcgcctgccctcggtatggtcctgggcccggaggccttgggagcccagcgcgctgagtacacgcacccttcatcccccagacccgcagttcctggtcaccttcttctcccgcctgagacccaaccgcagcgggcgctacgaggccgctttccccttcctctcgccctgcggcagagagcgcaacttcctgcgctgcgaggaccggccggtggtcttcacgcacctgctgaccgcggaccacgggcctccgcgcctctcctactgcggcggtggcgaggccctggccgtgcccttcgagccggcgcgcctgctgcccctggccgccaacgggcgcctgtaccacccggcgccggagcgtgcgggcggcgtgggcctggtgcgctccgccctggccttcgagctcagcgcctgcttcgagtacgggcccggcgcgcctgcgctgccctcgcacgtgcgctggcagggccgccgcctcgccctcaccatggacctggccccgctgctgctcgcggctcggtcgccctgagcggggccaagggaaaggcgggaggccgcgggcgcctctcgccccgctcccccgggactccacgccccggaaagcccgcgccacccgcgctcgcggcagcctagtgcgcctgcgcgctcggccccgcccccacccggcgctgtccttggtgctgccgcggcccggccctcccggacaccccggctccgccacggcgcgcgccccccgcgcacccgactccggcgccctccgggattggcctgcgctcgagacgtcaggcacaggcggcgggcgcggggctctggtgcgcgtgcgcgagcgtcccccgccccctcccagcccggcgactgctcgggcccggccgccacctgcacggcgggggagccgctcgccgcgggagcgtcagaggggcgcccaggaggcagtgacagtcgtcgcggaatcctgcgtgtgacaccccgcccctgcccagcggattagggagttgtcctctggtaaaaggatttctgggctgcttccagcttggggccctcatccctgccctggcaggcctttctacaccgatctgcatctagtggggggtcagcgtgagcagcagcgccgtgagttctgaggccaagaaccttctccacttgagaagccttcctgggggaggctgagtgggccaggcctggagccacgtaccaacactttatacccaggggaatggatcccaagggcccagataacgcccccaacttcttggggttcacacgcgtcctgagacatctgggaactgcctctgcctgggccaaagctattccattaaaactttattgctgtgcttact

SEQ ID NO: 278119 - DNA, 1752 bp, Homo sapiens
cggaaggccagggcgggcgagcccccgaggcccgagggagagggaagagcgccgggcccgggtcgcggaggcgggcgccgccggaacgcgaagcgcggggctactgcgggcaggcgcgagttcgcgcagcaccgcccccggcgtgacctgctggtcgcttccggcgcgggaggagaatgtggccgccttgcgggacgctccggaccctggccttggcgcggtcgcggggagcccgggcctgcagcggggatgggggcgtttcctacacgcagggccagagtccggagccgcggacccgcgagtatttctactacgtggaccaccagggccagcttttcctggatgattccaaaatgaagaatttcatcacctgcttcaaagacccgcagttcctggtcaccttcttctcccgcctgagacccaaccgcagcgggcgctacgaggccgctttccccttcctctcgccctgcggcagagagcgcaacttcctgcgctgcgaggaccggccggtggtcttcacgcacctgctgaccgcggaccacgggcctccgcgcctctcctactgcggcggtggcgaggccctggccgtgcccttcgagccggcgcgcctgctgcccctggccgccaacgggcgcctgtaccacccggcgccggagcgtgcgggcggcgtgggcctggtgcgctccgccctggccttcgagctcaggagcagcagcgccgtgagttctgaggccaagaaccttctccacttgagaagccttcctgggggaggctgagtgggccaggcctggagccacgtaccaacactttatacccaggggaatggatcccaagggcccagataacgcccccaacttcttggggttcacacgcgtcctgagacatctgggaactgcctctgcctgggccaaagctattccattaaaactttattgctgtgcttacttatttctagtgactttaaataatcatgtgagttacaatttagggcaagatttaaacaccaaggccacttggtcctgtccctttccacatgactcgaaaggaggaagagctgatggacaggcaaatgtttggggaggccggccagatgaggctgggagacaggacacctgcagccctgttttccctggcttcgggtgggctggctggcttagcccagatccctacttttaaaactgggctccttgttcctgaaaccagaccccagccttcccatttctttacgacaagtacatgtatatggtcccccagcaaactccctgctccttgctgatctcagaggtcacactgctcccagagcccacttgggaagccacaccagaaacccagttggtggcccaaggcgtcccctgtcccaccccagctttcccagggccccatctatccccaaagacaggacacctttctggggaccggcatgggaagcacagacccatggctcctgaaccgaatttcctattatttttctcatcccccaattctctgacaggttacctgagaaaaaggcccaattctagttaagctggtcccacccctaggccagcaggagcaggtgctggacaaagctgtgccttgacttccctggggctcgtagctcctctgaggccagctctgcccaggcccccacaggataacaaggaggcgtgtctgcccagggcctgctctccccctcctagccatgcttgggtaatgggaccccgggctttgtcacctaagcaaagttctcaagccataccctgtacttccagc

SEQ ID NO: 278120 - DNA, 1635 bp, Homo sapiens
cggaaggccagggcgggcgagcccccgaggcccgagggagagggaagagcgccgggcccgggtcgcggaggcgggcgccgccggaacgcgaagcgcggggctactgcgggcaggcgcgagttcgcgcagcaccgcccccggcgtgacctgctggtcgcttccggcgcgggaggagaatgtggccgccttgcgggacgctccggaccctggccttggcgcggtcgcggggagcccgggcctgcagcggggatgggggcgtttcctacacgcagggccagagtccggagccgcggacccgcgagtatttctactacgtggaccaccagggccagcttttcctggatgattccaaaatgaagaatttcatcacctgcttcaaagacccgcagttcctggtcaccttcttctcccgcctgagacccaaccgcagcgggcgctacgaggccgctttccccttcctctcgccctgcggcagagagcgcaacttcctgcgctgcgaggaccggccggtggtcttcacgcacctgctgaccgcggaccacgggcctccgcgcctctcctactgcggcggtggcgaggccctggccgtgcccttcgagccggcgcgcctgctgcccctggccgccaacgggcgcctgtaccacccggcgccggagcgtgcgggcggcgtgggcctggtgcgctccgccctggccttcgagctcagcgcctgcttcgagtacgggcccggcgcgcctgcgctgccctcgcacgtgcgctggcagggccgccgcctcgccctcaccatggacctggccccgctgctgctcgcggctcggtcgccctgagcggggccaagggaaaggcgggaggccgcgggcgcctctcgccccgctcccccgggactccacgccccggaaagcccgcgccacccgcgctcgcggcagcctagtgcgcctgcgcgctcggccccgcccccacccggcgctgtccttggtgctgccgcggcccggccctcccggacaccccggctccgccacggcgcgcgccccccgcgcacccgactccggcgccctccgggattggcctgcgctcgagacgtcaggcacaggcggcgggcgcggggctctggtgcgcgtgcgcgagcgtcccccgccccctcccagcccggcgactgctcgggcccggccgccacctgcacggcgggggagccgctcgccgcgggagcgtcagaggggcgcccaggaggcagtgacagtcgtcgcggaatcctgcgtgtgacaccccgcccctgcccagcggattagggagttgtcctctggtaaaaggatttctgggctgcttccagcttggggccctcatccctgccctggcaggcctttctacaccgatctgcatctagtggggggtcagcgtgagcagcagcgccgtgagttctgaggccaagaaccttctccacttgagaagccttcctgggggaggctgagtgggccaggcctggagccacgtaccaacactttatacccaggggaatggatcccaagggcccagataacgcccccaacttcttggggttcacacgcgtcctgagacatctgggaactgcctctgcctgggccaaagctattccattaaaactttattgctgtgcttact

SEQ ID NO: 278121 - DNA, 2441 bp, Homo sapiens
cggaaggccagggcgggcgagcccccgaggcccgagggagagggaagagcgccgggcccgggtcgcggaggcgggcgccgccggaacgcgaagcgcggggctactgcgggcaggcgcgagttcgcgcagcaccgcccccggcgtgacctgctggtcgcttccggcgcgggaggagaatgtggccgccttgcgggacgctccggaccctggccttggcgcggtcgcggggagcccgggcctgcagcggggatgggggcgtttcctacacgcagggccagagtccggagccgcggacccgcgagtatttctactacgtggaccaccagggccagcttttcctggatgattccaaaatgaagaatttcatcacctgcttcaaagacccgcagttcctggtcaccttcttctcccgcctgagacccaaccgcagcgggcgctacgaggccgctttccccttcctctcgccctgcggcagagagcgcaacttcctgcgctgcgaggaccggccggtggtcttcacgcacctgctgaccgcggaccacgggcctccgcgcctctcctactgcggcggtggcgaggccctggccgtgcccttcgagccggcgcgcctgctgcccctggccgccaacgggcgcctgtaccacccggcgccggagcgtgcgggcggcgtgggcctggtgcgctccgccctggccttcgagctcagcgcctgcttcgagtacgggcccggcgcgcctgcgctgccctcgcacgtgcgctggcagggccgccgcctcgccctcaccatggacctggccccgctgctgctcgcggctcggtcgccctgagcggggccaagggaaaggcgggaggccgcgggcgcctctcgccccgctcccccgggactccacgccccggaaagcccgcgccacccgcgctcgcggcagcctagtgcgcctgcgcgctcggccccgcccccacccggcgctgtccttggtgctgccgcggcccggccctcccggacaccccggctccgccacggcgcgcgccccccgcgcacccgactccggcgccctccgggattggcctgcgctcgagacgtcaggcacaggcggcgggcgcggggctctggtgcgcgtgcgcgagcgtcccccgccccctcccagcccggcgactgctcgggcccggccgccacctgcacggcgggggagccgctcgccgcgggagcgtcagaggggcgcccaggaggcagtgacagtcgtcgcggaatcctgcgtgtgacaccccgcccctgcccagcggattagggagttgtcctctggtaaaaggatttctgggctgcttccagcttggggccctcatccctgccctggcaggcctttctacaccgatctgcatctagtggggggtcagcgtgagcagcagcgccgtgagttctgaggccaagaaccttctccacttgagaagccttcctgggggaggctgagtgggccaggcctggagccacgtaccaacactttatacccaggggaatggatcccaagggcccagataacgcccccaacttcttggggttcacacgcgtcctgagacatctgggaactgcctctgcctgggccaaagctattccattaaaactttattgctgtgcttacttatttctagtgactttaaataatcatgtgagttacaatttagggcaagatttaaacaccaaggccacttggtcctgtccctttccacatgactcgaaaggaggaagagctgatggacaggcaaatgtttggggaggccggccagatgaggctgggagacaggacacctgcagccctgttttccctggcttcgggtgggctggctggcttagcccagatccctacttttaaaactgggctccttgttcctgaaaccagaccccagccttcccatttctttacgacaagtacatgtatatggtcccccagcaaactccctgctccttgctgatctcagaggtcacactgctcccagagcccacttgggaagccacaccagaaacccagttggtggcccaaggcgtcccctgtcccaccccagctttcccagggccccatctatccccaaagacaggacacctttctggggaccggcatgggaagcacagacccatggctcctgaaccgaatttcctattatttttctcatcccccaattctctgacaggttacctgagaaaaaggcccaattctagttaagctggtcccacccctaggccagcaggagcaggtgctggacaaagctgtgccttgacttccctggggctcgtagctcctctgaggccagctctgcccaggcccccacaggataacaaggaggcgtgtctgcccagggcctgctctccccctcctagccatgcttgggtaatgggaccccgggctttgtcacctaagcaaagttctcaagccataccctgtacttccagc

SEQ ID NO: 278122 - DNA, 2284 bp, Homo sapiens
  misc_feature (1648)..(1648): n is a, c, g, or t
  misc_feature (2283)..(2284): n is a, c, g, or t
cggaaggccagggcgggcgagcccccgaggcccgagggagagggaagagcgccgggcccgggtcgcggaggcgggcgccgccggaacgcgaagcgcggggctactgcgggcaggcgcgagttcgcgcagcaccgcccccggcgtgacctgctggtcgcttccggcgcgggaggagaatgtggccgccttgcgggacgctccggaccctggccttggcgcggtcgcggggagcccgggcctgcagcggggatgggggcgtttcctacacgcagggccagagtccggagccgcggacccgcgagtatttctactacgtggaccaccagggccagcttttcctggatgattccaaaatgaagaatttcatcacctgcttcaaagacccgcagttcctggtcaccttcttctcccgcctgagacccaaccgcagcgggcgctacgaggccgctttccccttcctctcgccctgcggcagagagcgcaacttcctgcgctgcgaggaccggccggtggtcttcacgcacctgctgaccgcggaccacgggcctccgcgcctctcctactgcggcggtggcgaggccctggccgtgcccttcgagccggcgcgcctgctgcccctggccgccaacgggcgcctgtaccacccggcgccggagcgtgcgggcggcgtgggcctggtgcgctccgccctggccttcgagctcagcgcctgcttcgagtacgggcccggcgcgcctgcgctgccctcgcacgtgcgctggcagggccgccgcctcgccctcaccatggacctggccccgctgctgctcgcggctcggtcgccctgagcggggccaagggaaaggcgggaggccgcgggcgcctctcgccccgctcccccgggactccacgccccggaaagcccgcgccacccgcgctcgcggcagcctagtgcgcctgcgcgctcggccccgcccccacccggcgctgtccttggtgctgccgcggcccggccctcccggacaccccggctccgccacggcgcgcgccccccgcgcacccgactccggcgccctccgggattggcctgcgctcgagacgtcaggcacaggcggcgggcgcggggctctggtgcgcgtgcgcgagcgtcccccgccccctcccagcccggcgactgctcgggcccggccgccacctgcacggcgggggagccgctcgccgcgggagcgtcagaggggcgcccaggaggcagtgacagtcgtcgcggaatcctgcgtgtgacaccccgcccctgcccagcggattagggagttgtcctctggtaaaaggatttctgggctgcttccagcttggggccctcatccctgccctggcaggcctttctacaccgatctgcatctagtggggggtcagcgtgagcagcagcgccgtgagttctgaggccaagaaccttctccacttgagaagccttcctgggggaggctgagtgggccaggcctggagccacgtaccaacactttatacccaggggaatggatcccaagggcccagataacgcccccaacttcttggggttcacacgcgtcctgagacatctgggaactgcctctgcctgggccaaagctattccattaaaactttattgctgtgcttactaaaaaaaaaaaanaaaaaaaaaaaaaaaaaaaaaaaaaaaaaaaaaaaaaaaaaaggggggggggcgcaaaaaaattcccccgggggggcccatttataacgcgcgaccgccagtttttgcgggaccaagaggggcccccccaaaaggagaggcgcgcaataaataagcacaggagcgcggcgcgggccgttacacccgcgcgggggagcggaacaaaggcccaggacggcgcacacgtgcggaaaggcacccatctccgcggcgggggggccatctcggggcccaaccaccgaggaggataaacgcccccaagggaaaataacctttcaacggggcctagtcgggccacccacgcgccaaggcgcgcggggaaaaaagtggcacccgcgactagaattggcacaactctgccgggcgcggcaaaaaaagggcacaccacaggaaagaagcacagaagagaagagcgacgacacgcagaagaaagagcagagaaagcgacaacgagaagaggaacacaagacaagagaaagcaagaacaaacaagaaacaaaggagcgacagcagacgaggaagagagacagacgaagacgagcaccagacagcaacgccgacaccaacaaagacaggaagaagagacgcagcgacann

SEQ ID NO: 278123 - DNA, 1591 bp, Homo sapiens
cggggagttgggtcggtccgggccgaggctcctacatgggccgcgtccctgctgcgttgtgcagcttcggactctgtcctacaagtccccagccccggcgctgacttctcgccgctgccagggagacacccgggccgccctgcctttttttggaagccctgtcaaaaggcagctgcatgtccgggaggcagcaggccaggtagtctccgcggaggaggtggtacaactgattacaaacttgaaaagagggaaaaggtgcggaaagaattggctgaccagggagcagagcttttcctggatgattccaaaatgaagaatttcatcacctgcttcaaagacccgcagttcctggtcaccttcttctcccgcctgagacccaaccgcagcgggcgctacgaggccgctttccccttcctctcgccctgcggcagagagcgcaacttcctgcgctgcgaggaccggccggtggtcttcacgcacctgctgaccgcggaccacgggcctccgcgcctctcctactgcggcggtggcgaggccctggccgtgcccttcgagccggcgcgcctgctgcccctggccgccaacgggcgcctgtaccacccggcgccggagcgtgcgggcggcgtgggcctggtgcgctccgccctggccttcgagctcagcgcctgcttcgagtacgggcccggcgcgcctgcgctgccctcgcacgtgcgctggcagggccgccgcctcgccctcaccatggacctggccccgctgctgctcgcggctcggtcgccctgagcggggccaagggaaaggcgggaggccgcgggcgcctctcgccccgctcccccgggactccacgccccggaaagcccgcgccacccgcgctcgcggcagcctagtgcgcctgcgcgctcggccccgcccccacccggcgctgtccttggtgctgccgcggcccggccctcccggacaccccggctccgccacggcgcgcgccccccgcgcacccgactccggcgccctccgggattggcctgcgctcgagacgtcaggcacaggcggcgggcgcggggctctggtgcgcgtgcgcgagcgtcccccgccccctcccagcccggcgactgctcgggcccggccgccacctgcacggcgggggagccgctcgccgcgggagcgtcagaggggcgcccaggaggcagtgacagtcgtcgcggaatcctgcgtgtgacaccccgcccctgcccagcggattagggagttgtcctctggtaaaaggatttctgggctgcttccagcttggggccctcatccctgccctggcaggcctttctacaccgatctgcatctagtggggggtcagcgtgagcagcagcgccgtgagttctgaggccaagaaccttctccacttgagaagccttcctgggggaggctgagtgggccaggcctggagccacgtaccaacactttatacccaggggaatggatcccaagggcccagataacgcccccaacttcttggggttcacacgcgtcctgagacatctgggaactgcctctgcctgggccaaagctattccattaaaactttattgctgtgcttact

SEQ ID NO: 278124 - DNA, 2006 bp, Homo sapiens
cggaaggccagggcgggcgagcccccgaggcccgagggagagggaagagcgccgggcccgggtcgcggaggcgggcgccgccggaacgcgaagcgcggggctactgcgggcaggcgcgagttcgcgcagcaccgcccccggcgtgacctgctggtcgcttccggcgcgggaggagaatgtggccgccttgcgggacgctccggaccctggccttggcgcggtcgcggggagcccgggcctgcagcggggatgggggcgtttcctacacgcagggccagagtccggagccgcggacccgcgagtatttctactacgtggaccaccagggccagcttttcctggatgattccaaaatgaagaatttcatcacctgcttcaaagacccgcagttcctggtcaccttcttctcccgcctgagacccaaccgcagcgggcgctacgaggccgctttccccttcctctcgccctgcggcagagagcgcaacttcctgcgctgcgaggaccggccggtggtcttcacgcacctgctgaccgcggaccacgggcctccgcgcctctcctactgcggcggtggcgaggccctggccgtgcccttcgagccggcgcgcctgctgcccctggccgccaacgggcgcctgtaccacccggcgccggagcgtgcgggcggcgtgggcctggtgcgctccgccctggccttcgagctcagcgcctgcttcgagtacgggcccggcgcgcctgcgctgccctcgcacgtgcgctggcagggccgccgcctcgccctcaccatggacctggccccgctgctgctcgcggctcggtcgccctgagcggggccaagggaaaggcgggaggccgcgggcgcctctcgccccgctcccccgggactccacgccccggaaagcccgcgccacccgcgctcgcggcagcctagtgcgcctgcgcgctcggccccgcccccacccggcgctgtccttggtgctgccgcggcccggccctcccggacaccccggctccgccacggcgcgcgccccccgcgcacccgactccggcgccctccgggattggcctgcgctcgagacgtcaggcacaggcggcgggcgcggggctctggtgcgcgtgcgcgagcgtcccccgccccctcccagcccggcgactgctcgggcccggccgccacctgcacggcgggggagccgctcgccgcgggagcgtcaggagggcacgcgtctgcggctgaaccgcggaagggccggtgaggaaccgggcctcgggagatggccctgagggcccccgcactgctgccgctgctgctgctactactgccgctccgcgccgccggctgcccagcagcctgccgctgctacagcgccacggtggagtgtggcgccctgcggttgcgcgtcgtcccgctgggaatcccgccagggacgcagacactgttcctgcaggacaacaacatcgcccgcctagagccgggagccctggcgccactcgccgctctgcgccggctctacctgcacaacaacagcctgcgcgccctggaggccggcgccttccgcgcgcagccgcgcctgctggagctggcgctcactagcaaccggctgcgcggcttgcgcagcggcgccttcgtaggcctggcccagctgcgcgtgctctacctggcgggcaaccagctggcgcggctgctggatttcaccttcttgcacctgccgcgactgcaggagcttcacctgcaagaaaacagcattgagctgctggaggaccaggctctagcggggctgtcctccctagcactgctggacctcagcaggaaccagctgggcaccatcagccgagaggccctgcagcccctggccagtctgcaagtcctgcgcctcacagagaacccatggcgctgtgactgcgccctgcactggctgggtgcctggatcaaggagggcggccagcggctgctcacctccagggacaggaagatcatgtgtgcagagcccccgcgcctggcgctccag

SEQ ID NO: 278125 - DNA, 778 bp, Homo sapiens
tcacaactaaaggtcgtcatctgggcaaatgaaccactctgacttggagattaggggctcagacagccgtggatgagagtccagctctactacttattagccttgattagactgtgagagggatgggaaagactggtgcttggggtggccatctgacccctgatggacaggagaccaggacaagcccactggatgagccggaggggtccaggaggagggagttgagagctcctgctagggttgacacattctggtaaggagttcatctgctgtccaccaggggagacaataaaaaggtcaacacagctcccacctcgaagcagctgccagtttattacatgaagtgtcaggctgtggactgcaggcatgccattttgtcttgcaaattcccgggcacacgaatgattccagggttcctccagcactttggtattacttgaaagcaatcttaagggatctagaatgaaccaacgcccaaaaaggatcccttagcagcggtgatatcaaagaaacacttttgaagaactaattttccacccagatttccccaattttaaaagcaatgggcaaagccttctccactcctaaacttcctggaactgtcttttggctatatcaggcccctgaagttagagtctttgaaagactccaaactccaaattctatgcttttattctcaggctcctcataattctacagcacaccagactgctgaccactctccgtaccacttttaaattatttcttcccacagctttcttaacaatgaacctttgaa

SEQ ID NO: 278126 - DNA, 1690 bp, Homo sapiens
gtgttctcaacttagaaatcatattttgcaacaatgggaaagaacatgtagtgtgtgcaaaattcttgcaaaacatccctctttctccgtaaatcatgcttgcttgtactgaaatgcttgtattagggaacagagaggcacctgccccttagagcctaaatgaagtaagttttgattagaagttaccactgaatctcccttaaagagagttgtgactgggactccgtttgttccctaggggagacaataaaaaggtcaacacagctcccacctcgaagcagctgccagtttattacatgaagtgtcaggctgtggactgcaggcatgccattttgtcttgcaagaacaggtgggatcagaggtccttgactgatcagaatacactgctttcaaccaaaacattattagcattgatttcttaaaaaataatagcaaagtagaaaacctttagctggtctgtttcttcgtgtcctgaaacttccttattagtgtaattaaaagtactaagttaagaattagcctgggaaaggaccctacttatggcaaagtcttcagaaaagtaaagagcaaaaccagatatgtgccttgttctcatggtgctgacagtatagcgaagaggaaatactttaatcatacgaataaataaatgtaaagttagaactgtgcaactgctacgaagagaggatatagcactaaaaagccctagaatgggagatttgacctggccagggatgtcaagaaatgcttccaagaggaagtggttcttgagctgagattggaattaactgggcaaagggctccgggtagagaaaacagcatgctcaggtactatgttggaggacatatggggagttcgagaaactccaaaactgccagtgtgactgaagcaaagggagctagagtgttaggagcttataatccccactaaaggattttgtcttagcccaagagcaaagagataccagtggagactgctaagcaggaggacaacatgacacatttgtgcttttaaaggtttactctagctttagtgtggagagtggctgggagaagtcagaacagatacaagtgcacagtttgggtgccagaacagtcttccaggatgtgaagatgtgatactgaacttggacagtggtagtagaaatggagagatgtggatagactcagatatttaaatacatatacaaatgatgagagcattataaaaagaggatcgtggaagccaagattctgtgctgcaatggatcaaagtattttctgtggtttgagattttctaagatactctctctttacagaattcccgggcacacgaatgattccagggttcctccagcactttggtattacttgaaagcaatcttaagggatctagaatgaaccaacgcccaaaaaggatcccttagcagcggtgatatcaaagaaacacttttgaagaactaattttccacccagatttccccaattttaaaagcaatgggcaaagccttctccactcctaaacttcctggaactgtcttttggctatatcaggcccctgaagttagagtctttgaaagactccaaactccaaattctatgcttttattctcaggctcctcataattctacagcacaccagactgctgaccactctccgtaccacttttaaattatttcttcccacagctttcttaacaatgaacctttgaa

SEQ ID NO: 278127 - DNA, 1629 bp, Homo sapiens
gtgttctcaacttagaaatcatattttgcaacaatgggaaagaacatgtagtgtgtgcaaaattcttgcaaaacatccctctttctccgtaaatcatgcttgcttgtactgaaatgcttgtattagggaacagagaggcacctgccccttagagcctaaatgaagtaagttttgattagaagttaccactgaatctcccttaaagagagttgtgactgggactccgtttgttccctaggggagacaataaaaaggtcaacacagctcccacctcgaagcagagaacaggtgggatcagaggtccttgactgatcagaatacactgctttcaaccaaaacattattagcattgatttcttaaaaaataatagcaaagtagaaaacctttagctggtctgtttcttcgtgtcctgaaacttccttattagtgtaattaaaagtactaagttaagaattagcctgggaaaggaccctacttatggcaaagtcttcagaaaagtaaagagcaaaaccagatatgtgccttgttctcatggtgctgacagtatagcgaagaggaaatactttaatcatacgaataaataaatgtaaagttagaactgtgcaactgctacgaagagaggatatagcactaaaaagccctagaatgggagatttgacctggccagggatgtcaagaaatgcttccaagaggaagtggttcttgagctgagattggaattaactgggcaaagggctccgggtagagaaaacagcatgctcaggtactatgttggaggacatatggggagttcgagaaactccaaaactgccagtgtgactgaagcaaagggagctagagtgttaggagcttataatccccactaaaggattttgtcttagcccaagagcaaagagataccagtggagactgctaagcaggaggacaacatgacacatttgtgcttttaaaggtttactctagctttagtgtggagagtggctgggagaagtcagaacagatacaagtgcacagtttgggtgccagaacagtcttccaggatgtgaagatgtgatactgaacttggacagtggtagtagaaatggagagatgtggatagactcagatatttaaatacatatacaaatgatgagagcattataaaaagaggatcgtggaagccaagattctgtgctgcaatggatcaaagtattttctgtggtttgagattttctaagatactctctctttacagaattcccgggcacacgaatgattccagggttcctccagcactttggtattacttgaaagcaatcttaagggatctagaatgaaccaacgcccaaaaaggatcccttagcagcggtgatatcaaagaaacacttttgaagaactaattttccacccagatttccccaattttaaaagcaatgggcaaagccttctccactcctaaacttcctggaactgtcttttggctatatcaggcccctgaagttagagtctttgaaagactccaaactccaaattctatgcttttattctcaggctcctcataattctacagcacaccagactgctgaccactctccgtaccacttttaaattatttcttcccacagctttcttaacaatgaacctttgaa

SEQ ID NO: 278128 - DNA, 3040 bp, Homo sapiens
gcgggtggtgccggtggcggcggcgggggagcgcgggacaggaggcttcggggaagatggacccggcgccctcgctgggctgcagcctcaaggatgtgaagtggagctcggtggccgtgccgctcgacctcctggtcagcacttaccggctgccccagatcgcgcgcctggacaacggagagtgcgtagaagggctgcgggaaaatgactatctgctgattcattcctgccgccagtggaccaccatcactgcccacagcttggaggagggtcactatgtcattgggccaaagatagagattccggtacattatgcagggcaattcaagctgctggaacaagaccgagatataaaggagccagtgcaatatttcaacagtgtggaggaggtggctaaggcatttcctgaacgcgtgtacgtcatggaggatatcacattcaacgtgaaggttgcttcaggtgaatgcaatgaagacactgaagtttacaacatcaccctgtgtactggggatgaactcactctaatggggcaggcagaaatcctttatgcaaagacattcaaggaaaagtcacgactcaacacaatcttcaaaaagattgggaagctcaattccatcagcaagctgggaaaaggcaaaatgccgtgcctcatttgtatgaatcaccggaccaacgaaagcattagccttccattccagtgcaagggcagatttagcacccgaagtcccctggaacttcagatgcaagagggcgaacacaccatccgcaacattgtggagaaaaccaggcttcctgtgaatgtgactgtgccaagccctccaccgagaaacccatacgacctccacttcatccgtgaggggcaccgctataagtttgtgaacatccagaccaagacggtggtggtttgctgtgtgctgcggaacaacaagatcctccccatgcactttcctttgcacttgactgtccccaagttcagcctcccagaacacctggtgaagggagagagctggcccgaaaccctggtccatcactggctaggtatctgccaagaacagttcgacatcgatgagtattcacgggctgtccgtgatgtgaaaaccgactggaatgaagaatgcaagagccccaagaagggtcggtgctctggccacaaccacgtgcccaattcgctcagctacgcccgcgatgagctcacccagtccttccaccgactctcggtctgtgtgtatggcaacaatctccatggcaacagtgaggtgaaccttcatggttgcagggacctggggggagattgggctccctttcctcatgacatcctgccctatcaggactctggagatagtgggagcgactaccttttcccagaagctagtgaagaatcagcaggcatcccgggaaagtcagaacttccctacgaagagctgtggctggaggaaggcaagcccagccatcagcctctcactcgctctctgagcgagaagaacagatgtgatcagtttagaggttctgtccgatccaaatgtgcgacttctcctcttcccatccctgggactctgggagcagcagtgaagtcttcagatactgccctacctccacctccagtgcctcccaaatctgaagccgtcagagaagaatgccggctcctgaacgccccacctgttccaccccgaagcgcaaagcctttgtccaccagtccctccatccctcctcgcacagtcaagccagcgcggcaacagactcgctctcccagccccaccttgtcctactattcttcagggctacacaacatcgtcactaaaactgacacaaatccttctgaaagcactcctgtttcctgctatccatgtaaccgagtgaaaactgattctgtggacctgaaatccccgtttggaagtccttctgctgaagctgtgtcctctcggctctcatggcctaaccattattcaggagcatcagaaagccagaccaggagtgacttcctgctggatccaagcaggagttatagttaccctagacaaaagacgccaggcacaccaaagagaaactgcccagcaccttttgattttgatggctgtgagctcctggccagccccactagcccagtcactgcagaattcagtagcagcgtctctggttgtcccaagtcagccagctactctctggagagcacagatgtgaaatctcttgcagctggtgtgacaaagcagagtacgtcatgccctgccttaccccccagggctccaaaactagtggaagagaaggtcgcctccgaaacatctcctttgcctctgaaaattgatggtgctgaggaagaccccaagtctgggtcaccagatctctcggaggaccagtattttgttaaaaagggcatgcaggacatcttctctgcctcctaccctttctcatctccgctccatctccagctggcccccagatcctgtggcgacggttccccatggcagccacctgctgacctatcaggactctctatagaggaagtgtccaagtcactacggttcattggtttgtccgaagatgtcatatcattctttgttactgaaaagattgatgggaacctgcttgttcagctaacggaagaaatcctctcagaggatttcaaattgagcaaattgcaggtgaagaagataatgcaattcattaatggctggaggcccaaaatatagccaaataacccccggccagcatggaacaaaactgatcaatgcgtgtgctagaaggggtgggctgggacacaatttcatgtttttgcactaaaaaccttctctgtaaatagggataagagaaactcttactatgcagattacgtttttgaatggtgaacaggctattttgtacatcaataaaaatgctgtacagaacacttggaggtgtgccttgtacgtcactcaacaaacactcagcagctgctaaaagaaaaaaaggcatgtgcagagaaatcattcttacccaagtaggtttatgtgagaaggtatgatatttattacaaaatagccaaagctgaaagacataaaaatcttta

SEQ ID NO: 278129 - DNA, 2880 bp, Homo sapiens
gcgggtggtgccggtggcggcggcgggggagcgcgggacaggaggcttcggggaagatggacccggcgccctcgctgggctgcagcctcaaggatgtgaagtggagctcggtggccgtgccgctcgacctcctggtcagcacttaccggctgccccagatcgcgcgcctggacaacggagagtgcgtagaagggctgcgggaaaatgactatctgctgattcattcctgccgccagtggaccaccatcactgcccacagcttggaggagggtcactatgtcattgggccaaagatagagattccggtacattatgcagggcaattcaagctgctggaacaagaccgagatataaaggagccagtgcaatatttcaacagtgtggaggaggtggctaaggcatttcctgaacgcgtgtacgtcatggaggatatcacattcaacgtgaaggttgcttcaggtgaatgcaatgaagacactgaagtttacaacatcaccctgtgtactggggatgaactcactctaatggggcaggcagaaatcctttatgcaaagacattcaaggaaaagtcacgactcaacacaatcttcaaaaagattgggaagctcaattccatcagcaagctgggaaaaggcaaaatgccgtgcctcatttgtatgaatcaccggaccaacgaaagcattagccttccattccagtgcaagggcagatttagcacccgaagtcccctggaacttcagatgcaagagggcgaacacaccatccgcaacattgtggagaaaaccaggcttcctgtgaatgtgactgtgccaagccctccaccgagaaacccatacgacctccacttcatccgtgaggggcaccgctataagtttgtgaacatccagaccaagacggtggtggtttgctgtgtgctgcggaacaacaagatcctccccatgcactttcctttgcacttgactgtccccaagttcagcctcccagaacacctggtgaagggagagagctggcccgaaaccctggtccatcactggctaggtatctgccaagaacagttcgacatcgatgagtattcacgggctgtccgtgatgtgaaaaccgactggaatgaagaatgcaagagccccaagaagggtcggtgctctggccacaaccacgtgcccaattcgctcagctacgcccgcgatgagctcacccagtccttccaccgactctcggtctgtgtgtatggcaacaatctccatggcaacagtgaggtgaaccttcatggttgcagggacctggggggagattgggctccctttcctcatgacatcctgccctatcaggactctggagatagtgggagcgactaccttttcccagaagctagtgaagaatcagcaggcatcccgggaaagtcagaacttccctacgaagagctgtggctggaggaaggcaagcccagccatcagcctctcactcgctctctgagcgagaagaacagatgtgatcagtttagaggttctgtccgatccaaatgtgcgacttctcctcttcccatccctgggactctgggagcagcagtgaagtcttcagatactgccctacctccacctccagtgcctcccaaatctgaagccgtcagagaagaatgccggctcctgaacgccccacctgttccaccccgaagcgcaaagcctttgtccaccagtccctccatccctcctcgcacagtcaagccagcgcggcaacagactcgctctcccagccccaccttgtcctactattcttcagggctacacaacatcgtcactaaaactgacacaaatccttctgaaagcactcctgtttcctgctatccatgtaaccgagtgaaaactgattctgtggacctgaaatccccgtttggaagtccttctgctgaagctgtgtcctctcggctctcatggcctaaccattattcaggagcatcagaaagccagaccaggagtgacttcctgctggatccaagcaggagttatagttaccctagacaaaagacgccaggcacaccaaagagaaactgcccagcaccttttgattttgatggctgtgagctcctggccagccccactagcccagtcactgcagaattcagtagcagcgtctctggttgtcccaagtcagccagctactctctggagagcacagatgtgaaatctcttgcagctggtgtgacaaagcagagtacgtcatgccctgccttaccccccagggctccaaaactagtggaagagaaggtcgcctccgaaacatctcctttgcctctgaaaattgatggtgctgaggaagaccccaagtctgggtcaccagatctctcggaggaccagtattttgttaaaaagggcatgcaggacatcttctctgcctcctaccctttctcatctccgctccatctccagctggcccccagatcctgtggcgacggttccccatggcagccacctgctgacctatcaggactctctatagaggaagtgtccaagtcactacggttcattggtttgtccgaagatgtcatatcattctttgttactgaaaagattgatgggaacctgcttgttcagctaacggaagaaatcctctcagaggatttcaaattgagcaaattgcaggtgaagaagataatgcaattcattaatggctggaggcccaaaatatagccaaataacccccggccagcatggaacaaaactgatcaatgcgtgtgctagaaggggtgggctgggacacaatttcatgtttttgcactaaaaaccttctctgtaaatagggataagagaaactcttactatgcagattacgtttttgaatggtgaacaggctattttgtacatcaataaaaatgctgtacagaac

SEQ ID NO: 278130 - DNA, 2807 bp, Homo sapiens
aagaggccgggcatggtgactcaagccagtaatcccagcactttgggaggctgaggcgggtggatcacgaggtcaggagaccgagactatcctgggctaacacggagagtgcgtagaagggctgcgggaaaatgactatctgctgattcattcctgccgccagtggaccaccatcactgcccacagcttggaggagggtcactatgtcattgggccaaagatagagattccggtacattatgcagggcaattcaagctgctggaacaagaccgagatataaaggagccagtgcaatatttcaacagtgtggaggaggtggctaaggcatttcctgaacgcgtgtacgtcatggaggatatcacattcaacgtgaaggttgcttcaggtgaatgcaatgaagacactgaagtttacaacatcaccctgtgtactggggatgaactcactctaatggggcaggcagaaatcctttatgcaaagacattcaaggaaaagtcacgactcaacacaatcttcaaaaagattgggaagctcaattccatcagcaagctgggaaaaggcaaaatgccgtgcctcatttgtatgaatcaccggaccaacgaaagcattagccttccattccagtgcaagggcagatttagcacccgaagtcccctggaacttcagatgcaagagggcgaacacaccatccgcaacattgtggagaaaaccaggcttcctgtgaatgtgactgtgccaagccctccaccgagaaacccatacgacctccacttcatccgtgaggggcaccgctataagtttgtgaacatccagaccaagacggtggtggtttgctgtgtgctgcggaacaacaagatcctccccatgcactttcctttgcacttgactgtccccaagttcagcctcccagaacacctggtgaagggagagagctggcccgaaaccctggtccatcactggctaggtatctgccaagaacagttcgacatcgatgagtattcacgggctgtccgtgatgtgaaaaccgactggaatgaagaatgcaagagccccaagaagggtcggtgctctggccacaaccacgtgcccaattcgctcagctacgcccgcgatgagctcacccagtccttccaccgactctcggtctgtgtgtatggcaacaatctccatggcaacagtgaggtgaaccttcatggttgcagggacctggggggagattgggctccctttcctcatgacatcctgccctatcaggactctggagatagtgggagcgactaccttttcccagaagctagtgaagaatcagcaggcatcccgggaaagtcagaacttccctacgaagagctgtggctggaggaaggcaagcccagccatcagcctctcactcgctctctgagcgagaagaacagatgtgatcagtttagaggttctgtccgatccaaatgtgcgacttctcctcttcccatccctgggactctgggagcagcagtgaagtcttcagatactgccctacctccacctccagtgcctcccaaatctgaagccgtcagagaagaatgccggctcctgaacgccccacctgttccaccccgaagcgcaaagcctttgtccaccagtccctccatccctcctcgcacagtcaagccagcgcggcaacagactcgctctcccagccccaccttgtcctactattcttcagggctacacaacatcgtcactaaaactgacacaaatccttctgaaagcactcctgtttcctgctatccatgtaaccgagtgaaaactgattctgtggacctgaaatccccgtttggaagtccttctgctgaagctgtgtcctctcggctctcatggcctaaccattattcaggagcatcagaaagccagaccaggagtgacttcctgctggatccaagcaggagttatagttaccctagacaaaagacgccaggcacaccaaagagaaactgcccagcaccttttgattttgatggctgtgagctcctggccagccccactagcccagtcactgcagaattcagtagcagcgtctctggttgtcccaagtcagccagctactctctggagagcacagatgtgaaatctcttgcagctggtgtgacaaagcagagtacgtcatgccctgccttaccccccagggctccaaaactagtggaagagaaggtcgcctccgaaacatctcctttgcctctgaaaattgatggtgctgaggaagaccccaagtctgggtcaccagatctctcggaggaccagtattttgttaaaaagggcatgcaggacatcttctctgcctcctaccctttctcatctccgctccatctccagctggcccccagatcctgtggcgacggttccccatggcagccacctgctgacctatcaggactctctatagaggaagtgtccaagtcactacggttcattggtttgtccgaagatgtcatatcattctttgttactgaaaagattgatgggaacctgcttgttcagctaacggaagaaatcctctcagaggatttcaaattgagcaaattgcaggtgaagaagataatgcaattcattaatggctggaggcccaaaatatagccaaataacccccggccagcatggaacaaaactgatcaatgcgtgtgctagaaggggtgggctgggacacaatttcatgtttttgcactaaaaaccttctctgtaaatagggataagagaaactcttactatgcagattacgtttttgaatggtgaacaggctattttgtacatcaataaaaatgctgtacagaac

SEQ ID NO: 278131 - DNA, 2069 bp, Homo sapiens
gcgggtggtgccggtggcggcggcgggggagcgcgggacaggaggcttcggggaagatggacccggcgccctcgctgggctgcagcctcaaggatgtgaagtggagctcggtggccgtgccgctcgacctcctggtcagcacttaccggctgccccagatcgcgcgcctggacaacggagagtgcgtagaagggctgcgggaaaatgactatctgctgattcattcctgccgccagtggaccaccatcactgcccacagcttggaggagggtcactatgtcattgggccaaagatagagattccggtacattatgcagggcaattcaagctgctggaacaagaccgagatataaaggagccagtgcaatatttcaacagtgtggaggaggtggctaaggcatttcctgaacgcgtgtacgtcatggaggatatcacattcaacgtgaaggttgcttcaggtgaatgcaatgaagacactgaagtttacaacatcaccctgtgtactggggatgaactcactctaatggggcaggcagaaatcctttatgcaaagacattcaaggaaaagtcacgactcaacacaatcttcaaaaagattgggaagctcaattccatcagcaagctgggaaaaggcaaaatgccgtgcctcatttgtatgaatcaccggaccaacgaaagcattagccttccattccagtgcaagggcagatttagcacccgaagtcccctggaacttcagatgcaagagggcgaacacaccatccgcaacattgtggagaaaaccaggcttcctgtgaatgtgactgtgccaagccctccaccgagaaacccatacgacctccacttcatccgtgaggggcaccgctataagtttgtgaacatccagaccaagacggtggtggtttgctgtgtgctgcggaacaacaagatcctccccatgcactttcctttgcacttgactgtccccaagttcagcctcccagaacacctggtgaagggagagagctggcccgaaaccctggtccatcactggctaggtatctgccaagaacagttcgacatcgatgagtattcacgggctgtccgtgatgtgaaaaccgactggaatgaagaatgcaagagccccaagaagggtcggtgctctggccacaaccacgtgcccaattcgctcagctacgcccgcgatgagctcacccagtccttccaccgactctcggtctgtgtgtatggcaacaatctccatggcaacagtgaggtgaaccttcatggttgcagggacctggggggagattgggctccctttcctcatgacatcctgccctatcaggactctggagatagtgggagcgactaccttttcccagaagctagtgaagaatcagcaggcatcccgggaaagtcagaacttccctacgaagagctgtggctggaggaaggcaagcccagccatcagcctctcactcgctctctgagcgagaagaacagatgtgatcagtttagaggttctgtccgatccaaatgtgcgacttctcctcttcccatccctgggactctgggagcagcagtgaagtcttcagatactgccctacctccacctccagtgcctcccaaatctgaagccagacagggttttatcacattgcccagactggtctcaaagtcctgagctcaagccatccgctcgcctcggcctcccaaagtgctgagattacaggtattttcacctacagcaatctacctgactagatctacttgtctgccatctacagagcaagtaactgaggcctcaatagacaggttgtgctactgcgcaggaatgagttcccggttcatctttcattacttcactcttctccagactgtgctatattacctcacactatgcatctccctttttataatgagagttactgcaattttaaatatctcattttgcttcacagtcatcaatcctttgttgacaaaaatctaccttactgataatgccccaaccaaatataaatcaactactttctcttgcatacatgaagtgaaataaatagaacagcatgttttattctaagcagaa

SEQ ID NO: 278132 - DNA, 2188 bp, Homo sapiens
  misc_feature (2135)..(2135): n is a, c, g, or t
  misc_feature (2138)..(2139): n is a, c, g, or t
gcgggtggtgccggtggcggcggcgggggagcgcgggacaggaggcttcggggaagatggacccggcgccctcgctgggctgcagcctcaaggatgtgaagtggagctcggtggccgtgccgctcgacctcctggtcagcacttaccggctgccccagatcgcgcgcctggacaacggagagtgcgtagaagggctgcgggaaaatgactatctgctgattcattcctgccgccagtggaccaccatcactgcccacagcttggaggagggtcactatgtcattgggccaaagatagagattccggtacattatgcagggcaattcaagctgctggaacaagaccgagatataaaggagccagtgcaatatttcaacagtgtggaggaggtggctaaggcatttcctgaacgcgtgtacgtcatggaggatatcacattcaacgtgaaggttgcttcaggtgaatgcaatgaagacactgaagtttacaacatcaccctgtgtactggggatgaactcactctaatggggcaggcagaaatcctttatgcaaagacattcaaggaaaagtcacgactcaacacaatcttcaaaaagattgggaagctcaattccatcagcaagctgggaaaaggcaaaatgccgtgcctcatttgtatgaatcaccggaccaacgaaagcattagccttccattccagtgcaagggcagatttagcacccgaagtcccctggaacttcagatgcaagagggcgaacacaccatccgcaacattgtggagaaaaccaggcttcctgtgaatgtgactgtgccaagccctccaccgagaaacccatacgacctccacttcatccgtgaggggcaccgctataagtttgtgaacatccagaccaagacggtggtggtttgctgtgtgctgcggaacaacaagatcctccccatgcactttcctttgcacttgactgtccccaagttcagcctcccagaacacctggtgaagggagagagctggcccgaaaccctggtccatcactggctaggtatctgccaagaacagttcgacatcgatgagtattcacgggctgtccgtgatgtgaaaaccgactggaatgaagaatgcaagagccccaagaagggtcggtgctctggccacaaccacgtgcccaattcgctcagctacgcccgcgatgagctcacccagtccttccaccgactctcggtctgtgtgtatggcaacaatctccatggcaacagtgaggtgaaccttcatggttgcagggacctggggggagattgggctccctttcctcatgacatcctgccctatcaggactctggagatagtgggagcgactaccttttcccagaagctagtgaagaatcagcaggcatcccgggaaagtcagaacttccctacgaagagctgtggctggaggaaggcaagcccagccatcagcctctcactcgctctctgagcgagaagaacagatgtgatcagtttagaggttctgtccgatccaaatgtgcgacttctcctcttcccatccctgggactctgggagcagcagtgaagtcttcagatactgccctacctccacctccagtgcctcccaaatctgaagccgtcagagaagaatgccggctcctgaacgccccacctgttccaccccgaagcgcaaagcctttgtccaccagtccctccatccctcctcgcacagtcaagccagcgcggcaacagactcgctctcccagccccaccttgtcctactattcttcagggctacacaacataatggaagagccaatgtcttgggaagaaaagatgccacaccagtctgagaaattcagaggtaaaggccaactagattctcctggaaacaacccgggggctgccatcagttctcacaagtcagcatctggttctttccactttgacacgagcagacagcaccttcaagcagacaacaccttcgaccaggactaaaatggaaagggtcccattggtatctacactgaatttccatccagacaggagtccccttttgaccatcactgttgagtggtcatttccttttgtctggatacttccagggctctgagatcattcttctggaacacagtcattccattgttgcgnggnncttaaatgggacaaatcttttgaaagcactctgtgtccgggatccacgc

SEQ ID NO: 278133 - DNA, 2205 bp, Homo sapiens
tggcgcgcggcggcggcgacccctacagcgatctcagcaagggcgtgctgcgctgccggaccgtggaggacgtgctcacgcccctcgaagactgcttcatgctggacgccagcaccgtgctggacttcggcgtcctggccagcataatggaaagcggctatactcgcatcccggtgttcgaagacgagcagtccaatattgtagatattctctacgtcaaagacttggcctttgtggaccccgatgactgcacccccctcaagactatcactcgcttctataaccacccggtgcactttgtcttccatgacaccaagttggatgccatgctggaggagttcaagaaggggaagtcccacctggccatcgtgcagaaggtaaacaacgagggtgagggtgaccccttctacgaggtcctgggcctggtcaccctggaggacgtgatcgaggagatcatcaagtcggagatcctggacgagtccgacatgtacaccgagacaccgtggtgaagaggaagcctgcttctctgatggcccctctgaagcggaaggaggagttctccttgttcaaggtgtctgatgatgaatataaagtaacaatctcgcctcagctgctcttggccacccagcgcttcctgtcccgagaagtggatgtattcagcccgctgcgcatctctgagaaggtcctgctgcacctgttgaagcatcccagtgtcaaccaggaagtgaggtttgacgagagcaaccggctggccacacaccactacctgtaccagcgcagccagccggtggattacttcattctcatcctgcagggcagggttgaagtggagatcgggaaagagggtctgaagtttgagaatggggccttcacgtactatggagtgtcggccctaactgtgccatcctcggttcaccagtccccggtgtcctcgctccagcccatccgccatgacctgcagcccgacccaggtgacggcacgcattcatctgcgtattgtcccgactacaccgtgagggcgctctctgatctgcagctcatcaaggttacgcgactgcagtacctcaatgcactcctggctacccgagcccagaacctgccacagtcccctgagaacaccgacctgcaggttattccaggcagcagaccaggctccttggtgagaagaccaccacagcggcagggtccagccacagcaggcccggcgtcccggtggaaggcagccctgggcggaacccaggcgtttaacggctcactaggcagccccagatctggggaacagatgagcacgtggggagctggagtgagctgagcagaagttttgtgcccgcctgcccccatcccctccaggccacgttttagatggcccttgtagttgcgggtcctgggtgtcctcagaactagacatcaatgcctggatccttcagccggccctgccctcctttaggagacaggagtcaccagggcacagccctccaggcccgcctcaggaaggaatgaaaggaatgccatcatctctagttcccagggcccagccttccccttctcccccggggcagggacagtgcggcatattcagattcagacctctttgggctgagccaccttgtgagtgcagttactgcctttgtgtggccgtgacctctatttgtttgcttttaatttgccaacctatcgctgctggcagcactttttgagcaagccgagagcacccattttggctgggggttcagatcgatggccttgtccatgttgtcctttctggcttccctgatggtgtcatgtttcagcgcatgcgccccagcctttcccatgtgccaaaccagaagctccactgcccgtaggctgtccctgtagccctgctccctccctggaggctgctcttctgattctgagagctggcctagtggtgctgagggcccctttctgcttctctgcccacctgctgagttgccactcgcagtgttgtcagttcccgtgttctgagaagaggtcatgcctgggaggaagggatcgtcatgctgcatcgaatcctctctccgccgtgtggcccccaggagagtagctgcctgttgcacctgctccacacctccccacagcctccctgcaggtgctgtgtggccgtgatgtgcagagagcagtgagggagggttcatgaaccaggtggatcctctttaaaaaaaaaaaagtttttgttatatctct

SEQ ID NO: 278134 - DNA, 3545 bp, Homo sapiens
tgaccgagttccaacatgccagaggctgttcacattggagacctgctgcggctactcaagtacccagatgtcattcaggaactcaagtttgacgagcactataagtactacgcccgccattacctgtacacccgaaataagccggccgactacttcatcctcatcctgcaggggaaggtggaggtggaggcagggaaggagaacatgaagtttgagacgggcgccttctcctactatgggactatggccctgacctcggtcccctccgggaagtcccacctggccatcgtgcagaaggtaaacaacgagggtgagggtgaccccttctacgaggtcctgggcctggtcaccctggaggacgtgatcgaggagatcatcaagtcggagatcctggacgagtccgacatgtacactgacaaccgaagccggaagcgggtgtctgagaagaacaagcgtgacttctctgccttcaaggatgcggacaatgagctcaaagtgaaaatctccccgcagctcctcctggccgctcatcgcttcctagccacagaggtctctcagtttagcccctccctgatatcagagaagatcctgctgcggctactcaagtacccagatgtcattcaggaactcaagtttgacgagcacaataagtactacgcccgccattacctgtacacccgaaataagccggccgactacttcatcctcatcctgcaggggaaggtggaggtggaggcagggaaggagaacatgaagtttgagacgggcgccttctcctactatgggactatggccctgacctcggtcccctccgaccgttccccagcacaccccaccccactcagccgctcagcctccctcagttacccagaccgcacagacgtctcaactgcagcaaccttggcaggcagcagcaaccagtttggcagctctgtcctgggccagtacatctctgacttcagcgtccgggcactcgtggacttgcagtacatcaagatcactcggcagcagtaccagaacgggctgctggcttctcgcatggagaacagccctcagtttcccatagacgggtgcaccacccacatggagaacttggccgagaagtctgagctgcctgtggtggacgagaccacaactcttctcaacgagcgtaactccttgctgcacaaagcctcccacgagaatgccatctgacaggagggcccggggccccctgcccaccctgcgggggcctccccagtgggcccacatgaagagagggaacctgttagtccagaaaggatacggatagatagcctgtctgactgaacagccagatggcccccagcctatgggggatctggcctctgccagggacctctgagtagctctgaggtggcactgtccagccctggatagggggggcagtgggccagctaccgtaagcaaaggctgttttttactgagagaatttctaaagtaggctcatcacttttttttaaatatcattttgggaagggaagacagggttaaggaactttatttaaaaaaaaaatatttttttcctaaaaactataaaagaggaagggtttcttgtcccgggaagcaacggacataatctgttcccagccatggccttccagcttgtgtccctgattcagggagctctcccttcctcctcctcctcctcctccggaggtgggatcccagagcctgccagtggaggcttatctgttgggaggaagacagctcttcacagaagcaaagaacaaaatggcatggagatcagctgcctgagcacctgcgctgtagcttatctgacaacgctgaggccacgagctcctgggtagctgtgatcagggacatgataatctgagctatgcagaggagcacatctgttgtcaactgctgtacccagaaatctagaactctgccgacagcctctcctggtgagtcgggactcagctgaggacacatccccaccctgcctcccatctggccctttggacaactggccctttgtgacagggctgactcaagtgttaggcagggtctcaggcctttgattgctcacccctgctccccaggccctgccctcacttttaccaaaggttctccctcggcgggagggcatctgtgttggaggtgatttgtctgggttcttccttttggttccagaaggaactgtcagtcatcagcatctgcgttgttagcagtcagtaccacccccgccccacaatgacagtcaaggctgacttgttgactgaagcctttttcccagaccccttatttcgaatccccaagcttcagtccctcttgggggtggagacaagaggacatgtgggaagccacggaagcaggttctttatgtcctctcctctgtggctggcaaggctcacctggccttatccacccacttatggaacctcaggagaggagggctcctcctaaaggcatgcagcttgcagcccctctttctcacacgtgtgatcctagcgtgagaggtcatcctgcccttgctgaagttagtagtactgtactaagagctctgccctcatgtgaattcctgccctggcgcctcttccctggggctgaatcaggccctgctgcaaaactccaggcttcccagggttggggaggctgtgggaccaaggtccatgttggtccttccactgggtgcagcaggagctgggtcccgagagcctggcaggtgaaactctgcaggccttccgcctgattattatttattcactcctttcctcaccccaagtgccctgctctccaggtgcctagagtatcctaactcttaggaccagggattgtcttgcaccaagtatgcctacccctggccagtctgaggtctcctagccatagaactgactcctggaagcctggagagaaggtggtgacacccatgggttctcaactgtaaggaaaaaagacaccagacttttgttccctagtgggggaaagcccttagtcttgtacaggagcagcttgctcccaagtccttttggaagctggcagagctatattcctgacagccctgactgccaggtagagcaaaagacattggtgggggtatgtgaagcaaaaggggcaggtgcacacacctccacagtgacctctgtgcacacggttaccaccaactggctggccctcctcctcttccctggcccattgatcatcccttctcacagagggtcatcattatttccaaatattgtttgtctgatgacttcctcttcccagtgcaatttttcccttcctatttcaacctctggttcctgggatgagccataccctggaactggcccacccactgtgtcttccacgtaagggagacctttgcaaagggcatccaaatgggtaggcaggtgacagccgccgtatttattttgcataatattttaatttgtatatttttgtgatttattttggcgttatgagtttgactctcggggagttttgttgttatgactcttgtgtcttttgtcacaaaacaatgatatttgctaaacgatatatggaatttatttttgattggtaataaaaaatcaaatatg

SEQ ID NO: 278135 - DNA, 4938 bp, Homo sapiens
  misc_feature (124)..(124): n is a, c, g, or t
catgaggctggcgagctgcaacaagtcgtgtgggacgaacccggatggcatcatcttcgtgtccgagggcagcaccgtgaacctgaggctgtacggctacagcctgggcaacatctccagcaanctgatctccttcaccgaggtggacgatgccgagaccctccacaagtccaccagcttgcctcgagctcaccaaggacctggtcgtccagcagctggtcaacgtgagccgcgggaacacgtccggcgtgctggtggtgctcaccaagttcctccggaggagcgagagcatgaagctgtatgcactgtgcacccgggcccagcccgacgggccctggctgaagtggacggacaaggactcactgctcttcatggtggaggagcctgggaggttcctgcctctctggctgcacattctcctaattacggtgctgctggtgctgtcgggcatattttctggcctcaacctcgggcttatggccctggaccccatggagctgcgcatcgtgcagaactgtggcaccgagaaggagaggcgctatgcccgcaagattgagcccatccggcgcaagggcaactaccttctctgctcgttgctcctagggaacgtgctggtcaacacctccctcacaatccttctagacaacctcatcgggtccggcctcatggcggtggcctcctccaccattggcattgtcatctttggggagatcctacctcaggccctgtgctcccgacatgggctggctgtgggtgccaacaccatccttctcaccaaattctttatgctactcaccttccccctcagttttcccattagcaagctcctggacttttttctgggccaggagattcgcactgtttacaaccgggagaagctgatggagatgttgaaggtgacggagccctataatgacctcgtgaaagaggagctcaatatgatccagggtgccctggaactacggaccaaaactgtagaggatatcatgacccagctccaggactgcttcatgatccgcagcgatgccatcctggacttcaacaccatgtcggagataatggaaagcggctatactcgcatcccggtgttcgaagacgagcagtccaatattgtagatattctctacgtcaaagacttggcctttgtggaccccgatgactgcacccccctcaagactatcactcgcttctataaccacccggtgcactttgtcttccatgacaccaagttggatgccatgctggaggagttcaagaaggggaagtcccacctggccatcgtgcagaaggtaaacaacgagggtgagggtgaccccttctacgaggtcctgggcctggtcaccctggaggacgtgatcgaggagatcatcaagtcggagatcctggacgagtccgacatgtacactgacaaccgaagccggaagcgggtgtctgagaagaacaagcgtgacttctctgccttcaaggatgcggacaatgagctcaaagtgaaaatctccccgcagctcctcctggccgctcatcgcttcctagccacagaggtctctcagtttagcccctccctgatatcagagaagatcctgctgcggctactcaagtacccagatgtcattcaggaactcaagtttgacgagcacaataagtactacgcccgccattacctgtacacccgaaataagccggccgactacttcatcctcatcctgcaggggaaggtggaggtggaggcagggaaggagaacatgaagtttgagacgggcgccttctcctactatgggactatggccctgacctcggtcccctccgaccgttccccagcacaccccaccccactcagccgctcagcctccctcagttacccagaccgcacagacgtctcaactgcagcaaccttggcaggcagcagcaaccagtttggcagctctgtcctgggccagtacatctctgacttcagcgtccgggcactcgtggacttgcagtacatcaagatcactcggcagcagtaccagaacgggctgctggcttctcgcatggagaacagccctcagtttcccatagacgggtgcaccacccacatggagaacttggccgagaagtctgagctgcctgtggtggacgagaccacaactcttctcaacgagcgtaactccttgctgcacaaagcctcccacgagaatgccatctgacaggagggcccggggccccctgcccaccctgcgggggcctccccagtgggcccacatgaagagagggaacctgttagtccagaaaggatacggatagatagcctgtctgactgaacagccagatggcccccagcctatgggggatctggcctctgccagggacctctgagtagctctgaggtggcactgtccagccctggatagggggggcagtgggccagctaccgtaagcaaaggctgttttttactgagagaatttctaaagtaggctcatcacttttttttaaatatcattttgggaagggaagacagggttaaggaactttatttaaaaaaaaaatatttttttcctaaaaactataaaagaggaagggtttcttgtcccgggaagcaacggacataatctgttcccagccatggccttccagcttgtgtccctgattcagggagctctcccttcctcctcctcctcctcctccggaggtgggatcccagagcctgccagtggaggcttatctgttgggaggaagacagctcttcacagaagcaaagaacaaaatggcatggagatcagctgcctgagcacctgcgctgtagcttatctgacaacgctgaggccacgagctcctgggtagctgtgatcagggacatgataatctgagctatgcagaggagcacatctgttgtcaactgctgtacccagaaatctagaactctgccgacagcctctcctggtgagtcgggactcagctgaggacacatccccaccctgcctcccatctggccctttggacaactggccctttgtgacagggctgactcaagtgttaggcagggtctcaggcctttgattgctcacccctgctccccaggccctgccctcacttttaccaaaggttctccctcggcgggagggcatctgtgttggaggtgatttgtctgggttcttccttttggttccagaaggaactgtcagtcatcagcatctgcgttgttagcagtcagtaccacccccgccccacaatgacagtcaaggctgacttgttgactgaagcctttttcccagaccccttatttcgaatccccaagcttcagtccctcttgggggtggagacaagaggacatgtgggaagccacggaagcaggttctttatgtcctctcctctgtggctggcaaggctcacctggccttatccacccacttatggaacctcaggagaggagggctcctcctaaaggcatgcagcttgcagcccctctttctcacacgtgtgatcctagcgtgagaggtcatcctgcccttgctgaagttagtagtactgtactaagagctctgccctcatgtgaattcctgccctggcgcctcttccctggggctgaatcaggccctgctgcaaaactccaggcttcccagggttggggaggctgtgggaccaaggtccatgttggtccttccactgggtgcagcaggagctgggtcccgagagcctggcaggtgaaactctgcaggccttccgcctgattattatttattcactcctttcctcaccccaagtgccctgctctccaggtgcctagagtatcctaactcttaggaccagggattgtcttgcaccaagtatgcctacccctggccagtctgaggtctcctagccatagaactgactcctggaagcctggagagaaggtggtgacacccatgggttctcaactgtaaggaaaaaagacaccagacttttgttccctagtgggggaaagcccttagtcttgtacaggagcagcttgctcccaagtccttttggaagctggcagagctatattcctgacagccctgactgccaggtagagcaaaagacattggtgggggtatgtgaagcaaaaggggcaggtgcacacacctccacagtgacctctgtgcacacggttaccaccaactggctggccctcctcctcttccctggcccattgatcatcccttctcacagagggtcatcattatttccaaatattgtttgtctgatgacttcctcttcccagtgcaatttttcccttcctatttcaacctctggttcctgggatgagccataccctggaactggcccacccactgtgtcttccacgtaagggagacctttgcaaagggcatccaaatgggtaggcaggtgacagccgccgtatttattttgcataatattttaatttgtatatttttgtgatttattttggcgttatgagtttgactctcggggagttttgttgttatgactcttgtgtcttttgtcacaaaacaatgatatttgctaaacgatatatggaatttatttttgattggtaataaaaaatcaaatatgtataaatcctggtgaatctacaacttgcctgtttgttctgtcagtattcagtatgttgttgagataaaagtggctgtggctggctgtctcttgtgatgggacaagggcaataaaggattctaggaccattcagcagtgaaatgcaatcagaaatggaatttctaaatatagtcaaggctgtcgtcacaggagtgagagggacgtggctgctggcagacatacaggacagatgtgctcagctgccataagcatgagtcctgtgaaacagatcccatagggcccttggcttgtgagtactggaagggcagtgggcttcagcaaattgcccctcctccctacccatgggactgaaagaagcttgatccaaaagtatgagtaatattgttttataacatgcagct

SEQ ID NO: 278136 - DNA, 4537 bp, Homo sapiens
  misc_feature (124)..(124): n is a, c, g, or t
catgaggctggcgagctgcaacaagtcgtgtgggacgaacccggatggcatcatcttcgtgtccgagggcagcaccgtgaacctgaggctgtacggctacagcctgggcaacatctccagcaanctgatctccttcaccgaggtggacgatgccgagaccctccacaagtccaccagcttgcctcgagctcaccaaggacctggtcgtccagcagctggtcaacgtgagccgcgggaacacgtccggcgtgctggtggtgctcaccaagttcctccggaggagcgagagcatgaagctgtatgcactgtgcacccgggcccagcccgacgggccctggctgaagtggacggacaaggactcactgctcttcatggtggaggagcctgggaggttcctgcctctctggctgcacattctcctaattacggtgctgctggtgctgtcgggcatattttctggcctcaacctcgggcttatggccctggaccccatggagctgcgcatcgtgcagaactgtggcaccgagaaggagaggcgctatgcccgcaagattgagcccatccggcgcaagggcaactaccttctctgctcgttgctcctagggaacgtgctggtcaacacctccctcacaatccttctagacaacctcatcgggtccggcctcatggcggtggcctcctccaccattggcattgtcatctttggggagatcctacctcaggccctgtgctcccgacatgggctggctgtgggtgccaacaccatccttctcaccaaattctttatgctactcaccttccccctcagttttcccattagcaagctcctggacttttttctgggccaggagattcgcactgtttacaaccgggagaagctgatggagatgttgaaggtgacggagccctataatgacctcgtgaaagaggagctcaatatgatccagggtgccctggaactacggaccaaaactgtagaggatatcatgacccagctccaggactgcttcatgatccgcagcgatgccatcctggacttcaacaccatgtcggagataatggaaagcggctatactcgcatcccggtgttcgaagacgagcagtccaatattgtagatattctctacgtcaaagacttggcctttgtggaccccgatgactgcacccccctcaagactatcactcgcttctataaccacccggtgcactttgtcttccatgacaccaagttggatgccatgctggaggagttcaagaaggggaagtcccacctggccatcgtgcagaaggtaaacaacgagggtgagggtgaccccttctacgaggtcctgggcctggtcaccctggaggacgtgatcgaggagatcatcaagtcggagatcctggacgagtccgacatgtacactgacaaccgaagccggaagcgggtgtctgagaagaacaagcgtgacttctctgccttcaaggatgcggacaatgagctcaaagtgaaaatctccccgcagctcctcctggccgctcatcgcttcctagccacagaggtctctcagtttagcccctccctgatatcagagaagatcctgctgcggctactcaagtacccagatgtcattcaggaactcaagtttgacgagcacaataagtactacgcccgccattacctgtacacccgaaataagccggccgactacttcatcctcatcctgcaggggaaggtggaggtggaggcagggaaggagaacatgaagtttgagacgggcgccttctcctactatgggactatggccctgacctcggtcccctccgaccgttccccagcacaccccaccccactcagccgctcagcctccctcagttacccagaccgcacagacgtctcaactgcagcaaccttggcaggcagcagcaaccagtttggcagctctgtcctgggccagtacatctctgacttcagcgtccgggcactcgtggacttgcagtacatcaagatcactcggcagcagtaccagaacgggctgctggcttctcgcatggagaacagccctcagtttcccatagacgggtgcaccacccacatggagaacttggccgagaagtctgagctgcctgtggtggacgagaccacaactcttctcaacgagcgtaactccttgctgcacaaagcctcccacgagaatgccatctgacaggagggcccggggccccctgcccaccctgcgggggcctccccagtgggcccacatgaagagagggaacctgttagtccagaaaggatacggatagatagcctgtctgactgaacagccagatggcccccagcctatgggggatctggcctctgccagggacctctgagtagctctgaggtggcactgtccagccctggatagggggggcagtgggccagctaccgtaagcaaaggctgttttttactgagagaatttctaaagtaggctcatcacttttttttaaatatcattttgggaagggaagacagggttaaggaactttatttaaaaaaaaaatatttttttcctaaaaactataaaagaggaagggtttcttgtcccgggaagcaacggacataatctgttcccagccatggccttccagcttgtgtccctgattcagggagctctcccttcctcctcctcctcctcctccggaggtgggatcccagagcctgccagtggaggcttatctgttgggaggaagacagctcttcacagaagcaaagaacaaaatggcatggagatcagctgcctgagcacctgcgctgtagcttatctgacaacgctgaggccacgagctcctgggtagctgtgatcagggacatgataatctgagctatgcagaggagcacatctgttgtcaactgctgtacccagaaatctagaactctgccgacagcctctcctggtgagtcgggactcagctgaggacacatccccaccctgcctcccatctggccctttggacaactggccctttgtgacagggctgactcaagtgttaggcagggtctcaggcctttgattgctcacccctgctccccaggccctgccctcacttttaccaaaggttctccctcggcgggagggcatctgtgttggaggtgatttgtctgggttcttccttttggttccagaaggaactgtcagtcatcagcatctgcgttgttagcagtcagtaccacccccgccccacaatgacagtcaaggctgacttgttgactgaagcctttttcccagaccccttatttcgaatccccaagcttcagtccctcttgggggtggagacaagaggacatgtgggaagccacggaagcaggttctttatgtcctctcctctgtggctggcaaggctcacctggccttatccacccacttatggaacctcaggagaggagggctcctcctaaaggcatgcagcttgcagcccctctttctcacacgtgtgatcctagcgtgagaggtcatcctgcccttgctgaagttagtagtactgtactaagagctctgccctcatgtgaattcctgccctggcgcctcttccctggggctgaatcaggccctgctgcaaaactccaggcttcccagggttggggaggctgtgggaccaaggtccatgttggtccttccactgggtgcagcaggagctgggtcccgagagcctggcaggtgaaactctgcaggccttccgcctgattattatttattcactcctttcctcaccccaagtgccctgctctccaggtgcctagagtatcctaactcttaggaccagggattgtcttgcaccaagtatgcctacccctggccagtctgaggtctcctagccatagaactgactcctggaagcctggagagaaggtggtgacacccatgggttctcaactgtaaggaaaaaagacaccagacttttgttccctagtgggggaaagcccttagtcttgtacaggagcagcttgctcccaagtccttttggaagctggcagagctatattcctgacagccctgactgccaggtagagcaaaagacattggtgggggtatgtgaagcaaaaggggcaggtgcacacacctccacagtgacctctgtgcacacggttaccaccaactggctggccctcctcctcttccctggcccattgatcatcccttctcacagagggtcatcattatttccaaatattgtttgtctgatgacttcctcttcccagtgcaatttttcccttcctatttcaacctctggttcctgggatgagccataccctggaactggcccacccactgtgtcttccacgtaagggagacctttgcaaagggcatccaaatgggtaggcaggtgacagccgccgtatttattttgcataatattttaatttgtatatttttgtgatttattttggcgttatgagtttgactctcggggagttttgttgttatgactcttgtgtcttttgtcacaaaacaatgatatttgctaaacgatatatggaatttatttttgattggtaataaaaaatcaaatatg

SEQ ID NO: 278137 - DNA, 595 bp, Homo sapiens
ttttaagtctgtggtttttattttctgtttggttgatttgttttggtagactttttaatacttgttgcacaatagttctaaacaaactaattcatttgctttaacgaagtcagaccttatgcagtcagaccttctacatgcttctgtttgtccctaagaatgacttcctgttcctgggtggggtgtccctgggcttccatgggatgaggtgagacatgagggtgagagtgggcatcggagtggcctttggcatgacaacctctgctctccctgcagaccgttccccagcacaccccaccccactcagccgctcagcctccctcagttacccagaccgcacagacgtctcaactgcagcaaccttggcaggcagcagcaaccagtttggcagctctgtcctgggccagtacatctctgacttcagcgtccgggcactcgtggacttgcagtacatcaaggtgagtgcctcactgccctgtctgggcagtgctatcttctgctcaggaatcagctactactttcatccaccaaacccagcatggtgggcccaaacccgagatgcctttttcttctggagatggggtcttgctctgtc

SEQ ID NO: 278138 - DNA, 2582 bp, Homo sapiens
gctccaggagccggctgagcgcgccccgcggggggctccgcagcccttacaaggaatttggtggcgcttggggtggccccgcccgccaggctccaccggcccctcctccccgcggggtggcagcccgctggacgcggggccgagggcgcggacgccgacgggtccggggccgcgcgctccagggaagcctgcatcccgctcccctgggccccgacgggcgggcgcactgcgcggggcccaccggccgcagacctgcgtggccgtccagggcgtcgccatgtcctcggtgtttggaaaaccccgcgcgggcagcgggcctcagagcgcgcccctcgaggtcaacctggccatcctggggcgccgcggggctggcaagtctgaggacacctacagctccgaggagactgtggaccaccagcctgtccacctgagggtcatggacactgcagacctggacacccccaggaactgcgagcgctacctgaactgggcccatgccttcctggtggtgtacagcgtcgacagccgccagagctttgatagcagcagcagctacctggagctgcttgccttgcacgcgaaggagacacagcgcagcatccctgccctgctgctgggcaacaagctggacatggctcagtacaggcaagtcaccaaggcagagggtgtggctttggcaggcaggtttgggtgcctgtttttcgaggtctctgcctgtctggactttgagcacgtgcagcatgtcttccacgaggcagtgcgagaggcacggcgggagctggagaagagccccctgacccggcccctcttcatctccgaggagagggccctgccccaccaggccccgctcactgcgcggcatgggctggccagctgcaccttcaacacgctctccaccatcaacctgaaggagatgcccactgtggcccaggccaagctggtcaccgtgaagtcatcccgggcccagagcaagcgcaaggcgcctaccctgactctcctgaagggcttcaagatcttctgaggccccctccccaggaagcctaggctcggtggctggacaggactgcagcaggacagggactggcttctcaccaccagcctttccgtctgatggacagcagaccccgcctccagcaccaagcagtgtccctacactcaattcactgtgtgagctggagtggcaggcagggatgctgcttctgttccctccaggccttggtcttcatggtaaccaccgcgtctgtggccgtagagggaaacagccactgtgacaacccagagacctggggtcagccttaagtaggaagaaattgcagtgtctatcctgctgccatcagcccttcctgctccagctacagttgggccagctgtggccttagtggatggtctgggtggatggctctgtcaatgtcaggcccgagaacagcctgcggaatgacagcctggggtccttgtgccacctggtggacgggaaaggcagggcggctgcagtttcagaggccagagcctggccctcctgtcatctgctgacttcacagaaggcccaggctacaaaccccacagtttatccaaggaaaatctagttaaaataatccaatggacagaagccccaggaaggggtatttccaacacttggcgtctcaatgaggataaaagggagggactgtaggttgtccagcataaggagccccagagttctttcaccagcagacagattctccatgtgttttcccactgttaaggactctgtccaaagaacctcagcatcagctccctcaagcttaatgatccaggctgcagaagaaagttgtcactccagtgagttacccagggctccagggagcccacagcagcatcagacccatccaggggctacagggcctgcccccctgcaggtagaaacacagtatacccgtttgtcatctggtttggcaggacccaggaccctcagcaatgagtctgagtgttcaaagcccactttagaacctaaagcattttgggttaataaagcaaaattttgcttatgttatttggtggtgtcaccgcagcttataccaagacaccatggctcagacatgggatcaggacacacctttgagatcccactgttagcaagaaaaggctgtccaaggcaggcagtgtggtagttgtctgattttgtttaccacacgccaggtcccagggaagtcttgcacagactcttagcagacaagcagggaaaagagagggtcctggtgggtggaaggattgggaaggggattctgggcctggaagcctgctccttcccctctcagcagtctcaggactactgttggattgcaaacagcatctctgacccagtcttcggactcattctgtaaatggaggagctgaggtcagaggggggctgtgaactactcaagaccacatgcttgcagtcctacaggcttcccgacccacaggccagctacggattttgcacttttgctccaggccacttgtgtgtgtatgtgtgtgtgtaccactgccatctgaacaaactatgcaataccacctgctcccttccaggagcattttaataaaagattttttttaataacaga

SEQ ID NO: 278139 - DNA, 2690 bp, Homo sapiens
gctccaggagccggctgagcgcgccccgcggggggctccgcagcccttacaaggaatttggtggcgcttggggtggccccgcccgccaggctccaccggcccctcctccccgcggggtggcagcccgctggacgcggggccgagggcgcggacgccgacgggtccggggccgcgcgctccagggaagcctgcatcccgctcccctgggccccgacgggcgggcgcactgcgcggggcccaccggccgcagacctgcgtggccgtccagggcgtcgccatgtcctcggtgtttggaaaaccccgcgcgggcagcgggcctcagagcgcgcccctcgaggtcaacctggccatcctggggcgccgcggggctggcaagtctgccctgaccgtgaagtttctgaccaagaggtttatcagtgaatatgaccccaacttggaggacacctacagctccgaggagactgtggaccaccagcctgtccacctgagggtcatggacactgcagacctggacacccccaggaactgcgagcgctacctgaactgggcccatgccttcctggtggtgtacagcgtcgacagccgccagagctttgatagcagcagcagctacctggagctgcttgccttgcacgcgaaggagacacagcgcagcatccctgccctgctgctgggcaacaagctggacatggctcagtacaggcaagtcaccaaggcagagggtgtggctttggcaggcaggtttgggtgcctgtttttcgaggtctctgcctgtctggactttgagcacgtgcagcatgtcttccacgaggcagtgcgagaggcacggcgggagctggagaagagccccctgacccggcccctcttcatctccgaggagagggccctgccccaccaggccccgctcactgcgcggcatgggctggccagctgcaccttcaacacgctctccaccatcaacctgaaggagatgcccactgtggcccaggccaagctggtcaccgtgaagtcatcccgggcccagagcaagcgcaaggcgcctaccctgactctcctgaagggcttcaagatcttctgaggccccctccccaggaagcctaggctcggtggctggacaggactgcagcaggacagggactggcttctcaccaccagcctttccgtctgatggacagcagaccccgcctccagcaccaagcagtgtccctacactcaattcactgtgtgagctggagtggcaggcagggatgctgcttctgttccctccaggccttggtcttcatggtaaccaccgcgtctgtggccgtagagggaaacagccactgtgacaacccagagacctggggtcagccttaagtaggaagaaattgcagtgtctatcctgctgccatcagcccttcctgctccagctacagttgggccagctgtggccttagtggatggtctgggtggatggctctgtcaatgtcaggcccgagaacagcctgcggaatgacagcctggggtccttgtgccacctggtggacgggaaaggcagggcggctgcagtttcagaggccagagcctggccctcctgtcatctgctgacttcacagaaggcccaggctacaaaccccacagtttatccaaggaaaatctagttaaaataatccaatggacagaagccccaggaaggggtatttccaacacttggcgtctcaatgaggataaaagggagggactgtaggttgtccagcataaggagccccagagttctttcaccagcagacagattctccatgtgttttcccactgttaaggactctgtccaaagaacctcagcatcagctccctcaagcttaatgatccaggctgcagaagaaagttgtcactccagtgagttacccagggctccagggagcccacagcagcatcagacccatccaggggctacagggcctgcccccctgcaggtagaaacacagtatacccgtttgtcatctggtttggcaggacccaggaccctcagcaatgagtctgagtgttcaaagcccactttagaacctaaagcattttgggttaataaagcaaaattttgcttatgttatttggtggtgtcaccgcagcttataccaagacaccatggctcagacatgggatcaggacacacctttgagatcccactgttagcaagaaaaggctgtccaaggcaggcagtgtggtagttgtctgattttgtttaccacacgccaggtcccagggaagtcttgcacagactcttagcagacaagcagggaaaagagagggtcctggtgggtggaaggattgggaaggggattctgggcctggaagcctgctccttcccctctcagcagtctcaggactactgttggattgcaaacagcatctctgacccagtcttcggactcattctgtaaatggaggagctgaggtcagaggggggctgtgaactactcaagaccacatgcttgcagtcctacaggcttcccgacccacaggccagctacggattttgcacttttgctccaggccacttgtgtgtgtatgtgtgtgtgtaccactgccatctgaacaaactatgcaataccacctgctcccttccaggagcattttaataaaagattttttttaataacagaattttagtttgcttgcagttcattcattgtgtctgctaagaaaaaaaaaaa

SEQ ID NO: 278140 - DNA, 2639 bp, Homo sapiens
gctccaggagccggctgagcgcgccccgcggggggctccgcagcccttacaaggaatttggtggcgcttggggtggccccgcccgccaggctccaccggcccctcctccccgcggggtggcagcccgctggacgcggggccgagggcgcggacgccgacgggtccggggccgcgcgctccagggaagcctgcatcccgctcccctgggccccgacgggcgggcgcactgcgcggggcccaccggccgcagacctgcgtggccgtccagggcgtcgccatgtcctcggtgtttggaaaaccccgcgcgggcagcgggcctcagagcgcgcccctcgaggtcaacctggccatcctggggcgccgcggggctggcaagtctgccctgaccgtgaagtttctgaccaagaggtttatcagtgaatatgaccccaacttggaggacacctacagctccgaggagactgtggaccaccagcctgtccacctgagggtcatggacactgcagacctggacacccccaggaactgcgagcgctacctgaactgggcccatgccttcctggtggtgtacagcgtcgacagccgccagagctttgatagcagcagcagctacctggagctgcttgccttgcacgcgaaggagacacagcgcagcatccctgccctgctgctgggcaacaagctggacatggctcagtacaggcaagtcaccaaggcagagggtgtggctttggcaggcaggtttgggtgcctgtttttcgaggtctctgcctgtctggactttgagcacgtgcagcatgtcttccacgaggcagtgcgagaggcacggcgggagctggagaagagccccctgacccggcccctcttcatctccgaggagagggccctgccccaccaggccccgctcactgcgcggcatgggctggccagctgcaccttcaacacgctctccaccatcaacctgaaggagatgcccactgtggcccaggccaagctggtcaccgtgaagtcatcccgggcccagagcaagcgcaaggcgcctaccctgactctcctgaagggcttcaagatcttctgaggccccctccccaggaagcctaggctcggtggctggacaggactgcagcaggacagggactggcttctcaccaccagcctttccgtctgatggacagcagaccccgcctccagcaccaagcagtgtccctacactcaattcactgtgtgagctggagtggcaggcagggatgctgcttctgttccctccaggccttggtcttcatggtaaccaccgcgtctgtggccgtagagggaaacagccactgtgacaacccagagacctggggtcagccttaagtaggaagaaattgcagtgtctatcctgctgccatcagcccttcctgctccagctacagttgggccagctgtggccttagtggatggtctgggtggatggctctgtcaatgtcaggcccgagaacagcctgcggaatgacagcctggggtccttgtgccacctggtggacgggaaaggcagggcggctgcagtttcagaggccagagcctggccctcctgtcatctgctgacttcacagaaggcccaggctacaaaccccacagtttatccaaggaaaatctagttaaaataatccaatggacagaagccccaggaaggggtatttccaacacttggcgtctcaatgaggataaaagggagggactgtaggttgtccagcataaggagccccagagttctttcaccagcagacagattctccatgtgttttcccactgttaaggactctgtccaaagaacctcagcatcagctccctcaagcttaatgatccaggctgcagaagaaagttgtcactccagtgagttacccagggctccagggagcccacagcagcatcagacccatccaggggctacagggcctgcccccctgcaggtagaaacacagtatacccgtttgtcatctggtttggcaggacccaggaccctcagcaatgagtctgagtgttcaaagcccactttagaacctaaagcattttgggttaataaagcaaaattttgcttatgttatttggtggtgtcaccgcagcttataccaagacaccatggctcagacatgggatcaggacacacctttgagatcccactgttagcaagaaaaggctgtccaaggcaggcagtgtggtagttgtctgattttgtttaccacacgccaggtcccagggaagtcttgcacagactcttagcagacaagcagggaaaagagagggtcctggtgggtggaaggattgggaaggggattctgggcctggaagcctgctccttcccctctcagcagtctcaggactactgttggattgcaaacagcatctctgacccagtcttcggactcattctgtaaatggaggagctgaggtcagaggggggctgtgaactactcaagaccacatgcttgcagtcctacaggcttcccgacccacaggccagctacggattttgcacttttgctccaggccacttgtgtgtgtatgtgtgtgtgtaccactgccatctgaacaaactatgcaataccacctgctcccttccaggagcattttaataaaagattttttttaataacaga

SEQ ID NO: 278141 - DNA, 1527 bp, Homo sapiens
ccagactgcgcgtacggtggcactgacagatgctagcattcttgtccacttccgggccgttgatcgtcactggtgtgaaatcggtgtttgctgagacgtgccagggtgaagtaggaaatgtgagcaacatgaagagatgatgtactctgtgtgagtactggaagagcttggagcgactatccctggagccaatcgtgccttgcgtggtcctagcctgactacgttcgtgacccacgtctcgctgggcccatatagatggctcctcgtggagctttcatgggtcgtgggtcggatggtcgtgagcccagataagagccatggtgaaggacaagcactgagcggtctttgcttccgaaactggtgagaccgtccataggaaggtgagggatggaagctattccaggagcgccaggaacctgggccagcttggatctattctggtctgacgttgctctagcacagtgtgcactagagacgtagggaagacgcgcagcattgtataattccaagtgttagatactttacctcttaaaataatccaatggacagaagccccaggaaggggtatttccaacacttggcgtctcaatgaggataaaagggagggactgtaggttgtccagcataaggagccccagagttctttcaccagcagacagattctccatgtgttttcccactgttaaggactctgtccaaagaacctcagcatcagctccctcaagcttaatgatccaggctgcagaagaaagttgtcactccagtgagttacccagggctccagggagcccacagcagcatcagacccatccaggggctacagggcctgcccccctgcaggtagaaacacagtatacccgtttgtcatctggtttggcaggacccaggaccctcagcaatgagtctgagtgttcaaagcccactttagaacctaaagcattttgggttaataaagcaaaattttgcttatgttatttggtggtgtcaccgcagcttataccaagacaccatggctcagacatgggatcaggacacacctttgagatcccactgttagcaagaaaaggctgtccaaggcaggcagtgtggtagttgtctgattttgtttaccacacgccaggtcccagggaagtcttgcacagactcttagcagacaagcagggaaaagagagggtcctggtgggtggaaggattgggaaggggattctgggcctggaagcctgctccttcccctctcagcagtctcaggactactgttggattgcaaacagcatctctgacccagtcttcggactcattctgtaaatggaggagctgaggtcagaggggggctgtgaactactcaagaccacatgcttgcagtcctacaggcttcccgacccacaggccagctacggattttgcacttttgctccaggccacttgtgtgtgtatgtgtgtgtgtaccactgccatctgaacaaactatgcaataccacctgctcccttccaggagcattttaataaaagattttttttaataacaga

SEQ ID NO: 278142 - DNA, 394 bp, Homo sapiens
gaacccgacgttgtgcagcccttcagacaaacctggccgcacccaaaaagaacatgcatggatggaaaagcaaagcctgcaacctgaaacgagccaccccatccctcatcacttgtcttttcaaagttggcattcaacagttcttgcacaggtgtcgcctagacagtttctctgtatgaagtctgcactgaaggagtggggaagaccttgaggatcttctgatggagttcatctttctgcagccccggagactgtaattcagacaccgcccccaaaagaagtctggaaactttgagtctcgccacgtgcaggccagaggagtccaacaccattatcaccctctatgcacagactgctggctgccaaactaacatatctaaggcacgtgctcaag

SEQ ID NO: 278143 - DNA, 546 bp, Homo sapiens
agcgggggcggggcccggagggagtctgggagggcccgaaagtttgcccaagtcgctggggcggccggccggggtgcaagcagtcgggccgggctcccacgacccccgcgcggggcgggcccaggcaggaagtgggcgcacttactggccccctcgatcttgtcggcgccccggctccacgtgatctggcgcgtctccagcttgacctggaaggtcttccgctcgggtcgctgcgacttcttggagtagaacaaagtcatgacggtgcccacctcgaggctgcggcagagcaccgccaaaattgaggacacccacggtcgcggtggagcctgtctgacatgttgagccaggcagtgggtcggctgccaggcacagcaggacaacttactgcatttcagaggaatgatggtccacaatttactgatgaggaaacagagattcagagaagttctacaatttgccccaaagccacataacatgactaggtgggaactagaacccaagtcggcctgactccatgagttttctgcctcacaggagatccac

SEQ ID NO: 278144 - DNA, 343 bp, Homo sapiens
ttgtcccggcccctgaggcgcaggcctatcagcctcctgtgtcttaagcagagtggagacgggggtggatccaggcgcaccagttccacgccacaggcttctgcagttcctgcaaactgttcccatcccgccccgcgttgcacgtcgggatttggagttcgcgatgctgagagctgtttccacgtggcgattccgacttgacccgtcgtgctccggcgcccgcctagggggaccgaggagtttgtcatttcttgcctcgttagggtgcggaacgaaaaccatttgatttatcctagaaaaggaaaggctgaagccaactaagtaaaagttttccattaaatga

SEQ ID NO: 278145 - DNA, 363 bp, Homo sapiens
agcccacaggggtctgaggttgatcccggaggcgcgaggagtcgcctatcagcctcctgtgtcttaagcagagtggagacgggggtggatccaggcgcaccagttccacgccacaggcttctgcagttcctgcaaactgttcccatcccgccccgcgttgcacgtcgggatttggagttcgcgatgctgagagctgtttccacgtggcgattccgacttgacccgtcgtgctccggcgcccgcctagggggaccgaggagtttgtcatttcttgcctcgttagggtgcggaacgaaaaccatttgatttatcctagaaaaggaaaggctgaagccaactaagtaaaagttttccattaaatga

SEQ ID NO: 278146 - DNA, 954 bp, Homo sapiens
taccttttttttactgtacaaatgctttatttctattcaatatttagaagacagttataaacaagatgcattcaatagcatggtggcagatgaacatcaggaaggaacatccatgagcttccatccacggaacctcaccatggatacgcttgtgatcaagggcctggtctcccctcaagacacggtcacagatcagaggccacaccatcctagcagtggagcaggaccagctgggacagggtccttctgtgacacctgctgcatcaccaggctgggtgaacggacacaattgccagaactcacagaatagaagtatcagcaccgaaacctcacaggaaaaatgtaactgaaataaaatctggcctttgtgaaaccctggaaataccacaaccctcaactagaaacaccaataccagctcctccacgagtttccagctccacaacctaagacatcagaggcagcattggttcctcacgtagagtccagctccgggaccctcatatttgaactgcagggccatctcatccctggatctccagctgcaccacactcaaattagaacaacatcagctcctccccaggtctccacctgcacagccctcgaatgggaacgtcagctcctccccgggtctccagctgcagggccctaaaactagaacatcagctcccgcctgggtcgccagcagcaccaccctcaaactggaacatcagatccccacgggtctccagctgcagggccctcaaactggaacatcagctccccaccagatctccagctgcacggacctcaaactggaacatcagctccccgccgggtctccagctgcactgcctgcaaactggaacatgagctccctgccgggtctccagctgcatggccctcaaactggaacatcagctccccaccagattgccagctgcacggccctcaaactggaatatcagctccaccc

SEQ ID NO: 278147 - DNA, 1149 bp, Homo sapiens
taccttttttttactgtacaaatgctttatttctattcaatatttagaagacagttataaacaagatgcattcaatagcatggtggcagatgaacatcaggaaggaacatccatgagcttccatccacggaacctcaccatggatacgcttgtgatcaagggcctggtctcccctcaagacacggtcacagatcagaggccacaccatcctagcagtggagcaggaccagctgggacagggtccttctgtgacacctgctgcatcaccaggctgggtgaacggacacaattgccagaactcacagaatagaagtatcagcaccgaaacctcacaggaaaaatggtaagttctaagtttctccattaatagtaactctcagattaatctctgtcatccatcgcttctccaagaaatgactttttagggtgatgtgccaggcgccatgttggagggctggtggtagcggcttggggaggtgctcactctgtcggtctcactctctcacacgcttcccctggctcccttcgttcccccccaccccacttggcctgcgtgctggagggtgtgcgagggagtgggaggatgtcggggggtggggggaggcgttccggtccccaagagacccgcggagggagacggaggctgtgagggactctgggaagccatggacgtcgacaggctccaggaggcgctggaagattttgagaagaggcaaaaaagaaagtctgtcctgtcctggatcagttcctttgtcatgtagccaagactggagaaacagattcagtggtcccaatttaaaggctattttattttcaaactggagaaagtgatagatgatttcagaacttcagctcctgcgccaagaggtcctcccaaccctaaagtcgaatatattccctttgatgaaacaaagggaagaatactgaaaactgtcactggatttaaccgtatcccttttactattcagcgactatgtgaattgttaacagatccaaggagaaactatacaggaacagacaaatttctcagaggagtagaaaagaacgtgatggttgttagctgtgtttatccttcttcagagaaaaacaattccaatagtttaaatcgaatgaatggtgtgatgtttcctggaaatgcaccaagctata

SEQ ID NO: 278148 - DNA, 1179 bp, Homo sapiens
tacttgtcactccctgaaaaggaccttttctttgactcacaggcccaagacacaggacagggctgctgggcatccagggtgacactgactttggtgatcagcctgtttttgatggcccctggcctcgccccagacccggtcacaggctgcccatgttgccgatacatgctcgggcagggatggactgctcctcagcatggcagaagatggcaaccaggtttcactttacatcatatctgttggcagtggctgtgctgatcatttgaaaattccactcagatttggaagaaaaacattccagattgattactgatgtctgccattcagaggggaaagggaaatgatggcatctgtgctgtgcattgtcatcctgggccacccaatgcaaccacatgcttgctcagcaaagggaaaactccacagagctgagctcctggtggggcaacatggtggcagatagatgggtcaattggaagccccaagatttttctgtttctccaaagtaaaatgtccatgctcttacatgtctttcctagatggcagaggcaaatgcaaagcaggaagacaagggaagataaatgccattggctttagccctaaatcatgctgttcactcagctttttcttgagttgactccacatgtctacctgtgaccagtggatcagtgcttcagatccatgaatatacaatacttcaggggttatccagttttataccccaccttgcacctcgggcaggcaatggggagccaaccagaccctgactacacacaccacaccctgtgatggatggtgaagagctcaaggtggccaacagtgggctccaggtgcctctcaggtcattccacatctatctcacgacctgagccagtaaggggcatggataggacctcagacaggacttctgtgccaaccccaaagaaccagccaggacatgcctccgggagaggcgtttgcatttgggtagaacactgcctgatgattgagaccacctgggctggaaacaggacagtcacacaaatgcctggcagggcaaggggagcataggagcctggcatgaaggagaaagggtcatgtacgtggttgtgagggtcctccctggcatgccccggcctggggtctggctgggtttgagggtttcctgcttctgaggggcccgatccagatgagaagggtggc

SEQ ID NO: 278149 - DNA, 812 bp, Homo sapiens
ccaccatgcctggccaggttccatgttatgtgccaactctgcttcgtgacagccaccagagccccacattcagggttatgaggctgcttctggctcactatgaggagttggtagacagattctttggctgaaggttgtttggagatcaaaaagtgcagatagaaaatggaggcgcagataaggaagccacctacaaggcaggtctcttcacctccaggccagagctgagatccctgtgctgatagggaattctccaacttccagacagcctggggctgccctttgcgtacatgggagggtctcttcctctgcgcttgcacatggaggccctccctggtccagttttataccccaccttgcacctcgggcaggcaatggggagccaaccagaccctgactacacacaccacaccctgtgatggatggtgaagagctcaaggtggccaacagtgggctccaggtgcctctcaggtcattccacatctatctcacgacctgagccagtaaggggcatggataggacctcagacaggacttctgtgccaaccccaaagaaccagccaggacatgcctccgggagaggcgtttgcatttgggtagaacactgcctgatgattgagaccacctgggctggaaacaggacagtcacacaaatgcctggcagggcaaggggagcataggagcctggcatgaaggagaaagggtcatgtacgtggttgtgagggtcctccctggcatgccccggcctggggtctggctgggtttgagggtttcctgcttctgaggggcccgatccagatgagaagggtggc

SEQ ID NO: 278150 - DNA, 532 bp, Homo sapiens
ggagcggctctgccttcccgagcgcgggacgcggcgccctgggggaggagggcgaagcgacgcggcgatggctccgcgggcactcccggggtccgccgtcctagccgctgctgtcttcgtgggaggcgccgtgagttcgccgctggtggctccggacaatgggagcagccgcacattgcactccagaacagagacgaccccgtcgcccagcaacgatactgggaatggacacccagaatatattgcatacgcgcttgtccctgtgttctttatcatgggtctctttggcgtcctcatttgccacctgcttaagaagaaaggctatcgttgtacaacagaagcagagcaagatatcgaagaggaaaaggttgaaaagatagaattgaatgacagtgtgaatgaaaacagtgacactgttgggcaaatcgtccactacatcatgaaaaatgaaggtgtgaacattttagtgttccaaaacaattcagtattcctatcctttattaaaaacctgcttcgaagagtcaagatttat

SEQ ID NO: 278151 - DNA, 882 bp, Homo sapiens
ggagcggctctgccttcccgagcgcgggacgcggcgccctgggggaggagggcgaagcgacgcggcgatggctccgcgggcactcccggggtccgccgtcctagccgctgctgtcttcgtgggaggcgccgtgagttcgccgctggtggctccggacaatgggagcagccgcacattgcactccagaacagagacgaccccgtcgcccagcaacgatactgggaatggacacccagaatatattgcatacgcgcttgtccctgtgttctttatcatgggtctctttggcgtcctcatttgccacctgcttaagaagaaaggctatcgttgtacaacagaagcagagcaagatatcgaagaggaaaaggttgaaaagatagaattgaatgacagtgtgaatgaaaacagtgacactgttgggcaaatcgtccactacatcatgaaaaatgaagcgaatgctgatgtcttaaaggcgatggtagcagataacagcctgtatgatcctgaaagccaccgtgcccggcctgtgaatgaatgtctttaatacataaagagccttcacaaaatcaatatacaaagattggccgggtgcagtggctcatgcctgtaatcattgcagtttgggaagccaaggtggaaggatcgctggaatccaggagttcaagaccagcctgggcaatagagtgagaccctgtctctataaaaataattaaaacaaagctgaaggagaccttgctatgcagccccctgccgcttgtgcacccttgtcgacccacacgcagcttcaggagggcggcgcacacctggggtagtcacagtgcaggactctggctcaatagcgcctttggctgggtttggaccttcgggagggcggtacacgtc

SEQ ID NO: 278152 - DNA, 398 bp, Homo sapiens
ggctggtctcaaactcctggccacaagcaatcctcccactttggcctctcaaaatgctgggattataggcatgagctgttgtgcctgaccgtgaatcatattattattgcttaagataaactgtcatcgcatggtcatgagaactgagtacctgctgtctgaggtctgttcacaaagtccatttgtacaattggaagacgcttttttttttctttcaatttaaactgcttctgtcatcacagggagagagatcaccttcgctgatatttcctttaaccagttgctctttttgttttcctccccacattagccccgtgacccccagcacaccagggagcccgccagtgagtcctgggcctttgtcaccaggggggacgccagggaagcacgtctgtggc

SEQ ID NO: 278153 - DNA, 667 bp, Homo sapiens
atcacatgggaaaagcaggagcaagagagagaaagggggaggggcacatacatttaaacagccagatctcgagagaactcttggaattaattatattttacttaaatttctttagcctgaattctagaaaaaaatgtacagtggtagaaggaatggggtgggatgggatgggacagggtaagaatagattataattcttctgtgtttttaaatattcaggcagattaatatgtgatatgatgcttacccttggttaaagatctacattttttgttttctcttgcagcaatgacttgacttgaagagctctaagagactgaaaacttatatgaagttgccttgggaatatttttatatattttatacagtttctatcatggagtcagcaggcacgtggataaaacctaaaagggaatattattgctgtgccatatacagaattcagtttgctttgaaacaagttttggttgaaagagtctgttgaaaattttattatacttccagggaaggaaagagctgtttttatcttcttaaccactcccagcctctactcttcccagcccctaatcccaggccttggtgtccacactgtagtttttccattatgatgagtatgtgcagtgatactattcatgtacagtctgagcttatgctcaggggtgtgtgt

SEQ ID NO: 278154 - DNA, 1191 bp, Homo sapiens
ggagcggctctgccttcccgagcgcgggacgcggcgccctgggggaggagggcgaagcgacgcggcgatggctccgcgggcactcccggggtccgccgtcctagccgctgctgtcttcgtgggaggcgccgtgagttcgccgctggtggctccggacaatgggagcagccgcacattgcactccagaacagagacgaccccgtcgcccagcaacgatactgggaatggacacccagaatatattgcatacgcgcttgtccctgtgttctttatcatgggtctctttggcgtcctcatttgccacctgcttaagaagaaaggctatcgttgtacaacagaagcagagcaagatatcgaagaggaaaaggttgaaaagatagaattgaatgacagtgtgaatgaaaacagtgacactgttgggcaaatcgtccactacatcatgaaaaatgaagcgaatgctgatgtcttaaaggcgatggtagcagataacagcctgtatgatcctgaaagccccgtgacccccagcacaccagggagcccgccagtgagtcctgggcctttgtcaccaggggggacgccagggaagcacgtctgtggccatcatctgcatacggtgggcggtgttgtcgagagggatgtgtgtcatcggtgtaggcacaagcggtggcactttataaagcccactaacaagtccagagagagcagaccacggcgccaaggcgaggtcacggtcctttctgttggcagatttagagttacaaaagtggagcacaagtcaaaccagaaggaacggagaagcctgatgtctgttagtggggctgaaaccgtcaatggggaggtgccggcaacacctgtgaagagagaacgcagtggcacagagtagcagcaatgacttgacttgaagagctctaagagactgaaaacttatatgaagttgccttgggaatatttttatatattttatacagtttctatcatggagtcagcaggcacgtggataaaacctaaaagggaatattattgctgtgccatatacagaattcagtttgctttgaaacaagttttggttgaaagagtctgttgaaaattttattatacttccagggaaggaaagagctgtttttatcttcttaaccactcccagcctctactcttcccagcccctaatcccaggccttggtgtccacactg

SEQ ID NO: 278155 - DNA, 1266 bp, Homo sapiens
ggaaatcctcatctttcccagtgggaagttagtaagaatataaaacagaaaaattaagaagtagcaatataaacatattactaagataaataaaggcaaatatcaaaagaatcaactaaaagagctaaaagtggtttccttcggagagcaggcaataggagtaaaggtgaggaactggagaactagctgagtgcagaagcgtatgcctgtaatccagcactgaggctgaggcaggaggatctcttgagcctagaagtttgagaccagcctgggcaacaaagcgagaccctgcctctacaaaaaattaaaaaattagctgggcacagtggcatgtgcctgtagtctcagctacttgggaggctgaggtgggagaactgtcagagcccaggaggtcaatgctacagtgagccatgttcatgccactgtattccaccctgggtgacagagaacctgtctcaaacaaaccaacaaaaaattgcagagctactggttttgtaacaagctttgtagaactgtttgacttttctaaacaatgtgcatggataattttaataaaaacaaaaactgtatttgaaagagacagaacacttaccaatatacttttcttgctttttgaatagaggtaacagtctgaacttcttttaatgtttgctttgttttcttttctgctgacttgaatgcctatttatagaaaagagttttaaaaacaatttgttaagaatgtatttaaataacaccaaagtaaataatggggcaagaatttttttaaatgtcacaaaatggcacaatctacacacacacacacaaacacacacacacacaaatacgcatacttgaaagtaatgaagaaatgaaaatatttttgcctgaagtattaaaataatctaaactaaagaattactacatgaaaatatttgcccaagacctacaaagtaataaataccttgtcattttctagatactgagtacctatcatatgcttggttctaggctagatgccattagagatataagagtgaacaagatggacaaagcccccactcccaccccactaggtctagaagagacaactattaatcatataatcctttaaataaatatataatggtgagtgcttctaaagatgctacaggaatataacaaggaaacccgatttacactgggttatggtcaaagaaggtatctctaaggaaatgacatttaagctgaatcctcaacgactaacggggttatcaggcaaagaataggaaaaagggcattacaagc

SEQ ID NO: 278156 - DNA, 1482 bp, Homo sapiens
agaaagagagcgatagagtgcgagagcgagtgcccggagcatcctggccctgagacagctgggccagccccgcagggctctgcagcatgtgggagctccgctccatagccttctccagggctgtgttcgcagagttcctggccacactcctcttcgtcttctttggcctcggctctgccctcaactggccacaggccctgccctctgtgctacagattgccatggcgtttggcttgggtattggcaccctggtacaggctctgggccacataagcggggcccacatcaaccctgccgtgactgtggcctgcctggtgggctgccacgtctccgttctccgagccgccttctacgtggctgcccagctgctgggggctgtggccggagccgctctgctccatgagatcacgccagcagacatccgcggggacctggctgtcaatgctctcagcaacagcacgacggctggccaggcggtgactgtggagctcttcctgacactgcagctggtgctctgcatcttcgcctccaccgatgagcgccgcggagagaacccgggcacccctgctctctccataggcttctctgtggccctgggccacctccttgggatccattacaccggctgctctatgaatcctgcccgctccctggctccagctgtcgtcactggcaaatttgatgaccactgggtcttctggatcggacccctggtgggcgccatcctgggctccctcctctacaactacgtgctgtttccgccagccaagagcctgtcggagcgcctggcagtgctgaagggcctggagccggacaccgattgggaggagcgcgaggtgcgacggcggcagtcggtggagctgcactcgccgcagagcctgccacggggtaccaaggcctgagggccgccagcggcctctaaggccccgacggacgcttgtgaggcccgaggcagaagggcccaccccgtccctcctctcccgcaggtctgaagttggccccccagcgcagagtagctgcttcctggacgtgcgcgcccaggccagtgctgtgagcaggcggggaggaggctgccggagggagccctgagcctggcaggtcccctgccctgaggctgtgagcagctagtggtggcttctccagcctttttcagggaactgggaacttaggggactgagctggggagggaggcaggtgggtggtaagagggaaactctggagagcctgcacccaggtactgagtggggagtgtacagacccctgccttgggggttctgggaatgatgcaactggttttactagtgtgcaagtgtgttcatccccaagttctcttttgtcctcacatgcagagttgtgcatgcccctgagtgtgaacaggtttgcctacgttggtgcaagtgtgcatggctggggacttctcacttccccttgcaccccttcctccccaacctgcaataaatccgcttctcctgcaaaaaatga

SEQ ID NO: 278157 - DNA, 2318 bp, Homo sapiens
agactagcgcgcaagcgccgcggcctcaggcgaacgaacgggcggtgtagtgcaggtccgccatggctgaggcgtcacggtggcaccgaggcggggcttcgaaacataagttgcattacagaaaggaagtagaaattacaaccacacttcaggaattgttactctactttatttttttaataaacctatgtatattgacttttgggatggtaaacccacatatgtattacttaaacaaggttatgtcatctctatttttggacacttctgtgcctggtgaagaaagaaccaactttaagtccattcgcagcataactgatttttggaagtttatggaaggaccccttttggaaggtctgtactgggattcatggtacaataaccagcagctgtataatttaaagaacagcagtcgcatctactatgaaaatatacttctaggagttcccagagttcgtcaactaaaagtccgcaacaacacatgcaaagtctattcatcttttcagtctttgatgagtgaatgttatggcaaatatacttctgcaaatgaagacctctctaattttggccttcaaattaatactgaatggagatattctacttctaataccaactccccttggcactggggatttcttggtgtttaccgaaatgggggatacattttcactttatcaaaatcgaaatctgaaaccaaaaacaagttcattgaccttcgactgaacagctggatcacaagagggactagagttatttttattgatttttccttatataatgctaatgtaaatctattttgtattatcagattggtggcagaattccctgcaactggaggaatacttacttcatggcagttttactctgtgaagctcctcagatatgttagctactatgactattttattgcttcctgtgaaatcacattctgtatttttctttttgtcttcacaacacaagaagtcaaaaaaataaaagaatttaagtctgcctatttcaaaagtatttggaactggctagaattgctacttttgctgttgtgttttgtggctgtttccttcaacacatactataatgtacaaatttttctcttacttggacagctgttgaaaagtactgaaaaatattcagatttctattttcttgcatgctggcacatttattacaataatataattgctattaccatcttttttgcatggataaagatattcaaattcataagctttaacaagacaatgtctcagctgtcatcaaccttgtcccgttgtgttaaagacatagtaggatttgccatcatgttttttataatattctttgcttatgcccagttaggatttcttgtttttggatcacaagttgatgacttttccacttttcagaattccatatttgcacaatttcgaattgttcttggagattttaattttgctggtattcagcaagccaatcctatcttgggacccatttacttcatcactttcatcttttttgtgttctttgtcctgctgaatatgttcttggcaattattaatgatacctattctgaagtgaaagctgactattcaataggcagaaggccagattttgaacttggcaaaatgattaaacagagttacaaaaatgttctcgagaaattcagactgaagaaagctcaaaaagatgaagacaagaaaaccaaaggcagcggagatttggctgaacaagccagaagagaaggctttgacgaaaatgagattcaaaacgcagagcagatgaaaaaatggaaagagaggcttgagaaaaagtattattctatggaaattcaagatgactaccagcctgtcactcaagaagaatttcgagaactttttttatatgctgtggagctggagaaggaattacactacatcaatttgaagctaaatcaagtggtgagaaaggtttcagctctatagtattgagacaagtggagagacagagtctcactctgtcgcccaggctggaacagcggtgcgacagtggcctcaacatcctccaaacagagaatcaagtgatcctcttgcctcagcctcccaagtatctgggactacacgcgaacaccaccacccctggctaatttaaacaaaatttttatacagtctgggtcccactatattgcccaggctggtcttgaactcctggcctcaagggatcctcctgcctcagcttcaaaaactgctgggattataggcatgagccactgtgcctggctagatttttttttaatttttgaaatacagtaatgttttatttaaaaatgggaatgacaataaatatttgcaaatcacacttgaaaa

SEQ ID NO: 278158 - DNA, 1412 bp, Homo sapiens
gatacggatctcgctctaacgcccaggctggagtgagactgtcacacacacacacaaaagaaaaaaaaatgttggtttaaagaaaggcactctctaagatagtttctctgaccagaagagtacacacttatcaagcaaccacagagtgtatggcactaggcatcaccatcctctctgaggaaggtaatcataacccttataaaggatccactttgtctacctagcattattgctggagcaggaagtatcatacaaatttactgtagaggttttgaatcacatctgggtgcatgtctcctctttaacctttttctagtgctaaggttattttccacaacacacaggccctttttatctgtagctgggaaaagggtatttggacactgtaaggaaagcaggtggtagtgagaacagtgcacaggaaggttcagcaatacaaattttgtggtacaaagggcttgtttttggatacgtagacagactggagtacacacattgactaaccaatgcagtaattacaaagagggggttttgaagtcatctgactgagaagctgctgggaaggccaaaaatacccacagatacactttgaatctaattactagttacatttgctaaataacagaggtacagaaagaacatcttagctttgatcacaagaaagagaaaataatttagatggagatgctaaagggaaaaggcagtgaaatgtaatttataatttgtttacaaagcttccctaactatgctagacagcaattacaccaatcaagtcctctgaagtgactttgctgatgcacagatctaaaatctaggcagggcaaaaagtcagcagggctcaaaatctgagggctggagaggagaacagcttaagatcctcaatcctgtgatgcttgtgtgccaaagacttgaaatagagaactaaagattgcagcctttacttgtcctctaccctgacaggagattcaaaacgcagagcagatgaaaaaatggaaagagaggcttgagaaaaagtattattctatggaaattcaagatgactaccagcctgtcactcaagaagaatttcgagagtaagcttatgttctaaccagactattatgggatatcatgacatgcgcattaaggacatgagttaaacacattattttcctgaacccaaaactttactctattaggatgcctttatttactttctatccagttttaaagttgcatatgactccatttgcttacaaggtgagaagcttttgattacatccctgttatctctaaataacagaaactgccatctatatttgatttgcataacagatcttgttctccacatagctttagaatattagatctataactggccacaagaggcatgttttaggagcttacaattctatcttcccaaagcatttcgc

SEQ ID NO: 278159 - DNA, 2290 bp, Homo sapiens
agactagcgcgcaagcgccgcggcctcaggcgaacgaacgggcggtgtagtgcaggtccgccatggctgaggcgtcacggtggcaccgaggcggggcttcgaaacataagttgcattacagaaaggaagtagaaattacaaccacacttcaggaattgttactctactttatttttttaataaacctatgtatatgttatgtcatctctatttttggacacttctgtgcctggtgaagaaagaaccaactttaagtccattcgcagcataactgatttttggaagtttatggaaggaccccttttggaaggtctgtactgggattcatggtacaataaccagcagctgtataatttaaagaacagcagtcgcatctactatgaaaatatacttctaggagttcccagagttcgtcaactaaaagtccgcaacaacacatgcaaagtctattcatcttttcagtctttgatgagtgaatgttatggcaaatatacttctgcaaatgaagacctctctaattttggccttcaaattaatactgaatggagatattctacttctaataccaactccccttggcactggggatttcttggtgtttaccgaaatgggggatacattttcactttatcaaaatcgaaatctgaaaccaaaaacaagttcattgaccttcgactgaacagctggatcacaagagggactagagttatttttattgatttttccttatataatgctaatgtaaatctattttgtattatcagattggtggcagaattccctgcaactggaggaatacttacttcatggcagttttactctgtgaagctcctcagatatgttagctactatgactattttattgcttcctgtgaaatcacattctgtatttttctttttgtcttcacaacacaagaagtcaaaaaaataaaagaatttaagtctgcctatttcaaaagtatttggaactggctagaattgctacttttgctgttgtgttttgtggctgtttccttcaacacatactataatgtacaaatttttctcttacttggacagctgttgaaaagtactgaaaaatattcagatttctattttcttgcatgctggcacatttattacaataatataattgctattaccatcttttttgcatggataaagatattcaaattcataagctttaacaagacaatgtctcagctgtcatcaaccttgtcccgttgtgttaaagacatagtaggatttgccatcatgttttttataatattctttgcttatgcccagttaggatttcttgtttttggatcacaagttgatgacttttccacttttcagaattccatatttgcacaatttcgaattgttcttggagattttaattttgctggtattcagcaagccaatcctatcttgggacccatttacttcatcactttcatcttttttgtgttctttgtcctgctgaatatgttcttggcaattattaatgatacctattctgaagtgaaagctgactattcaataggcagaaggccagattttgaacttggcaaaatgattaaacagagttacaaaaatgttctcgagaaattcagactgaagaaagctcaaaaagatgaagacaagaaaaccaaaggcagcggagatttggctgaacaagccagaagagaaggctttgacgaaaatgagattcaaaacgcagagcagatgaaaaaatggaaagagaggcttgagaaaaagtattattctatggaaattcaagatgactaccagcctgtcactcaagaagaatttcgagaactttttttatatgctgtggagctggagaaggaattacactacatcaatttgaagctaaatcaagtggtgagaaaggtttcagctctatagtattgagacaagtggagtggcaccacaaccaagtacaaaatgagattctctctgagtgcctgacaaaacgaatttaagtaccagccaagtacacacgatgatagcttcaaggaatacaactgactttatgatatgaattttcaaggaacgtatcttatatggattttgaagaatcttgtttgcttataagaacttcaagaagcctaagcttggctttaattttcttgtactctctgtactcctcaagcactggaacacgatcctctttctgggcattcctaggggagaaaataaaatttgtaatgttctagagatcatttggaaaaaaagatccaaaagttgtcttaatatgagacatactgttactaaacataagttcaaataaaaagttgttctg

SEQ ID NO: 278160 - DNA, 2226 bp, Homo sapiens
agactagcgcgcaagcgccgcggcctcaggcgaacgaacgggcggtgtagtgcaggtccgccatggctgaggcgtcacggtggcaccgaggcggggcttcgaaacataagttgcattacagaaaggaagtagaaattacaaccacacttcaggaattgttactctactttatttttttaataaacctatgtatattgacttttgggatggtaaacccacatatgtattacttaaacaaggttatgtcatctctatttttggacacttctgtgcctggtgaagaaagaaccaactttaagtccattcgcagcataactgatttttggaagtttatggaaggaccccttttggaaggtctgtactgggattcatggtacaataaccagcagctgtataatttaaagaacagcagtcgcatctactatgaaaatatacttctaggagttcccagagttcgtcaactaaaagtccgcaacaacacatgcaaagtctattcatcttttcagtctttgatgagtgaatgttatggcaaatatacttctgcaaatgaagacctctctaattttggccttcaaattaatactgaatggagatattctacttctaataccaactccccttggcactggggatttcttggtgtttaccgaaatgggggatacattttcactttatcaaaatcgaaatctgaaaccaaaaacaagttcattgaccttcgactgaacagctggatcacaagagggactagagttatttttattgatttttccttatataatgctaatgtaaatctattttgtattatcagattggtggcagaattccctgcaactggaggaatacttacttcatggcagttttactctgtgaagctcctcagatatgttagctactatgactattttattgcttcctgtgaaatcacattctgtatttttctttttgtcttcacaacacaagaagtcaaaaaaataaaagaatttaagtctgcctatttcaaaagtatttggaactggctagaattgctacttttgctgttgtgttttgtggctgtttccttcaacacatactataatgtacaaatttttctcttacttggacagctgttgaaaagtactgaaaaatattcagatttctattttcttgcatgctggcacatttattacaataatataattgctattaccatcttttttgcatggataaagatattcaaattcataagctttaacaagacaatgtctcagctgtcatcaaccttgtcccgttgtgttaaagacatagtaggatttgccatcatgttttttataatattctttgcttatgcccagttaggatttcttgtttttggatcacaagttgatgacttttccacttttcagaattccatatttgcacaatttcgaattgttcttggagattttaattttgctggtattcagcaagccaatcctatcttgggacccatttacttcatcactttcatcttttttgtgttctttgtcctgctgaatatgttcttggcaattattaatgatacctattctgaagtgaaagctgactattcaataggcagaaggccagattttgaacttggcaaaatgattaaacagagttacaaaaatgttctcgagaaattcagactgaagaaagctcaaaaagatgaagacaagaaaaccaaaggcagcggagatttggctgaacaagccagaagagaaggctttgacgaaaatgagattcaaaacgcagagcagatgaaaaaatggaaagagaggcttgagaaaaagtattattctatggaaattcaagatgactaccagcctgtcactcaagaagaatttcgagatggcaccacaaccaagtacaaaatgagattctctctgagtgcctgacaaaacgaatttaagtaccagccaagtacacacgatgatagcttcaaggaatacaactgactttatgatatgaattttcaaggaacgtatcttatatggattttgaagaatcttgtttgcttataagaacttcaagaagcctaagcttggctttaattttcttgtactctctgtactcctcaagcactggaacacgatcctctttctgggcattcctaggggagaaaataaaatttgtaatgttctagagatcatttggaaaaaaagatccaaaagttgtcttaatatgagacatactgttactaaacataagttcaaataaaaagttgttctg

SEQ ID NO: 278161 - DNA, 2334 bp, Homo sapiens
agactagcgcgcaagcgccgcggcctcaggcgaacgaacgggcggtgtagtgcaggtccgccatggctgaggcgtcacggtggcaccgaggcggggcttcgaaacataagttgcattacagaaaggaagtagaaattacaaccacacttcaggaattgttactctactttatttttttaataaacctatgtatattgacttttgggatggtaaacccacatatgtattacttaaacaaggttatgtcatctctatttttggacacttctgtgcctggtgaagaaagaaccaactttaagtccattcgcagcataactgatttttggaagtttatggaaggaccccttttggaaggtctgtactgggattcatggtacaataaccagcagctgtataatttaaagaacagcagtcgcatctactatgaaaatatacttctaggagttcccagagttcgtcaactaaaagtccgcaacaacacatgcaaagtctattcatcttttcagtctttgatgagtgaatgttatggcaaatatacttctgcaaatgaagacctctctaattttggccttcaaattaatactgaatggagatattctacttctaataccaactccccttggcactggggatttcttggtgtttaccgaaatgggggatacattttcactttatcaaaatcgaaatctgaaaccaaaaacaagttcattgaccttcgactgaacagctggatcacaagagggactagagttatttttattgatttttccttatataatgctaatgtaaatctattttgtattatcagattggtggcagaattccctgcaactggaggaatacttacttcatggcagttttactctgtgaagctcctcagatatgttagctactatgactattttattgcttcctgtgaaatcacattctgtatttttctttttgtcttcacaacacaagaagtcaaaaaaataaaagaatttaagtctgcctatttcaaaagtatttggaactggctagaattgctacttttgctgttgtgttttgtggctgtttccttcaacacatactataatgtacaaatttttctcttacttggacagctgttgaaaagtactgaaaaatattcagatttctattttcttgcatgctggcacatttattacaataatataattgctattaccatcttttttgcatggataaagatattcaaattcataagctttaacaagacaatgtctcagctgtcatcaaccttgtcccgttgtgttaaagacatagtaggatttgccatcatgttttttataatattctttgcttatgcccagttaggatttcttgtttttggatcacaagttgatgacttttccacttttcagaattccatatttgcacaatttcgaattgttcttggagattttaattttgctggtattcagcaagccaatcctatcttgggacccatttacttcatcactttcatcttttttgtgttctttgtcctgctgaatatgttcttggcaattattaatgatacctattctgaagtgaaagctgactattcaataggcagaaggccagattttgaacttggcaaaatgattaaacagagttacaaaaatgttctcgagaaattcagactgaagaaagctcaaaaagatgaagacaagaaaaccaaaggcagcggagatttggctgaacaagccagaagagaaggctttgacgaaaatgagattcaaaacgcagagcagatgaaaaaatggaaagagaggcttgagaaaaagtattattctatggaaattcaagatgactaccagcctgtcactcaagaagaatttcgagaactttttttatatgctgtggagctggagaaggaattacactacatcaatttgaagctaaatcaagtggtgagaaaggtttcagctctatagtattgagacaagtggagtggcaccacaaccaagtacaaaatgagattctctctgagtgcctgacaaaacgaatttaagtaccagccaagtacacacgatgatagcttcaaggaatacaactgactttatgatatgaattttcaaggaacgtatcttatatggattttgaagaatcttgtttgcttataagaacttcaagaagcctaagcttggctttaattttcttgtactctctgtactcctcaagcactggaacacgatcctctttctgggcattcctaggggagaaaataaaatttgtaatgttctagagatcatttggaaaaaaagatccaaaagttgtcttaatatgagacatactgttactaaacataagttcaaataaaaagttgttctg

SEQ ID NO: 278162 - DNA, 610 bp, Homo sapiens
aggtccgccatggctgaggcgtcacggtggcaccgaggcggtgaggggtcctcttaaggagtgggagggacaggggcgatttggcagttccagacaccctgaaaggaactctgcggccccaaattcgtttgagagatgtgactgccgacacctttagccctcacagcctcccctggggaagcggagagggacagatggtcccattgcacagacgggaaaactgaagccctgagcgaggtggcgctcgcctcttgccggaggctcgagctgggcgttgtcacctgtcgagtgaccgtcgctaggccggtctctaaagtccttggttgatctggggagtcgtgaccttgacagaattcaagccgaggtgtttttcccctgtccagcagaaaccagccttcccaagaagctgtattgagggtggagaaaacggttaggacagatgagaggttttacttgtttcgtattttgctttttcatcttaagactggcgagaagacatcatgatataaaatctgttagtggccgggcgcagtggctcaagcctgtaatcccaacactttgggaggccgaggcgggcggatcacaaggtcaagagatcgagaccatcctg

SEQ ID NO: 278163 - DNA, 988 bp, Homo sapiens
  misc_feature (16)..(16): n is a, c, g, or t
gctggggtgaatcggncgagggtacccgactcaacgtgagacgcaccgcccggactcaccatgcgtgaatgcatctcagtccacgtggggcaggcaggtgtccagatgggcaatgcctgctgggagctctattgcttggaacatgggattcagcctgatgggcagatgcccagtgacaagaccattggtggaggggacgactccttcaccaccttcttctgtgaaactggtgctggaaaacacgtaccccgggcagtttttgtggatctggagcctacggtcattgatgagatccgaaatggcccataccgacagctcttccacccagagcagctcatcactgggaaagaggatgctgccaacaactatgcccgtggtcactataccattggcaaggagatcattgacccagtgctggatcggatccgcaagctgtctgaccagtgcacaggacttcagggcttcctggtgttccacagctttggtgggggcactggctctggcttcacctcactcctgatggagcggctctctgttgactatggcaagaaatccaagctggaattctccatctacccagccccccaggtgtctacagccgtggtcgagccctacaactctatcctgaccacccacaccaccctggagcactcagactgtgccttcatggtggacaacgaagcaatctatgacatctgccgccgcaacctagacatcgagcgcccaacctacaccaacctcaatcgcctcattagccaaattgtctcctccatcacagcttctctgcgctttgacggggccctcaatgtggacctgacagagttccagaccaacctggtgccctaccctcattccctggcactatgccagtctttttgcggaaggttcccgagcgcgtgggggggatccatgcgttggcttccaccaagtaggggcccggggatgccggcgcgcgggtggccggttgttcgcccaaacctttggggcc

SEQ ID NO: 278164 - DNA, 769 bp, Homo sapiens
agcggcagttctcactgagacctgtcaccccgactcaacgtgagacgcaccgcccggactcaccatgcgtgaatgcatctcagtccacgtggggcaggcaggtgtccagatgggcaatgcctgctgggagctctattgcttggaacatgggattcagcctgatgggcagatgcccagtgacaagaccattggtggaggggacgactccttcaccaccttcttctgtgaaactggtgctggaaaacacgtaccccgggcagtttttgtggatctggagcctacggtcattgatcgccgaggcctgggcccgcctggaccacaagttcgacctgatgtatgccaagagggcgtttgtgcactggtatgtgggtgagggcatggaggagggtgagttctccgaggcccgtgaggatatggctgccctggagaaggattatgaggaggtgggcatcgactcctatgaggacgaggatgagggagaagaataaagcagctgcctggagcctattcactatgtttattgcaaaatcctttcgaaataaacagtttccttccaaaaaaaaaagaagaaacaaaaaaaactttggtggcgcgcccggggccccgagaaagttttaaacccttcggtggggcccgcgcgccctgggtaggaccgggccctacgggtccaaggaacacgggcgaacaggcggttctcccaaaaaaaccgcgggggcccgcgttttgacaacccggggtcggggcgcggccccacgggcccgggcgtaac

SEQ ID NO: 278165 - DNA, 311 bp, Homo sapiens
tcccgctttttattggcacctcgctattaatcggcacctcgctatttatcggcacccacaccaccctggagcactcagactgtgccttcatggtggacaacgaagcaatctatgacatctgccgccgcaacctagacatcgagcgcccaacctacaccaacctcaatcgcctcattagccaaattgtctcctccatcacagcttctctgcgctttgacggggccctcaatgtggacctgacagagttccagaccaacctggtgccctaccctcgatgatagcgaggtgccgatgatagcgaggtgccgata

SEQ ID NO: 278166 - DNA, 2240 bp, Homo sapiens
  misc_feature (1635)..(1635): n is a, c, g, or t
  misc_feature (2240)..(2240): n is a, c, g, or t
agcggcagttctcactgagacctgtcaccccgactcaacgtgagacgcaccgcccggactcaccatgcgtgaatgcatctcagtccacgtggggcaggcaggtgtccagatgggcaatgcctgctgggagctctattgcttggaacatgggattcagcctgatgggcagatgcccagtgacaagaccattggtggaggggacgactccttcaccaccttcttctgtgaaactggtgctggaaaacacgtaccccgggcagtttttgtggatctggagcctacggtcattgatgagatccgaaatggcccataccgacagctcttccacccagagcagctcatcactgggaaagaggatgctgccaacaactatgcccgtggtcactataccattggcaaggagatcattgacccagtgctggatcggatccgcaagctgtctgaccagtgcacaggacttcagggcttcctggtgttccacagctttggtgggggcactggctctggcttcacctcactcctgatggagcggctctctgttgactatggcaagaaatccaagctggaattctccatctacccagccccccaggtgtctacagccgtggtcgagccctacaactctatcctgaccacccacaccaccctggagcactcagactgtgccttcatggtggacaacgaagcaatctatgacatctgccgccgcaacctagacatcgagcgcccaacctacaccaacctcaatcgcctcattagccaaattgtctcctccatcacagcttctctgcgctttgacggggccctcaatgtggacctgacagagttccagaccaacctggtgccctaccctcgcatccacttccccctggccacctatgcaccagtcatctctgcagaaaaggcataccacgagcagctgtcggtggcagagatcaccaatgcctgctttgagcctgccaaccagatggtaaagtgtgatccccggcacggcaagtacatggcctgctgcctgctgtaccgtggagatgtggtgcccaaggatgtcaacgctgccattgccgccatcaagaccaagcgcagcattcagtttgtggactggtgccccacaggcttcaaggttggtatcaactaccagcctcccactgtggtgcctgggggtgacctggccaaggtgcagcgtgccgtgtgcatgctgagcaacacgaccgccatcgccgaggcctgggcccgcctggaccacaagttcgacctgatgtatgccaagagggcgtttgtgcactggtatgtgggtgagggcatggaggagggtgagttctccgaggcccgtgaggatatggctgccctggagaaggattatgaggaggtgggcatcgactcctatgaggacgaggatgagggagaagaataaagcagctgcctggagcctattcactatgtttattgcaaaatcctttcgaaataaacagtttcctttgcgaaaaaaagaataagatacaaataactacatctagaatacataagtagaacaataagaaacaaaaagggggcggcggtcgacaaatgatttcccccgtgggggggcgccacttctactataacacccaatttgttttttgccaacgggggtcccanaaatgagcggggtgctataaaatgccaaaggtgcacttcggcgcgcgcactataaaagcacggccgtggtcgtcgaggaagacatctgtacagcatggtagcgcctctgtgagagagaggcacttatgtcacgagggaggggacaagccattttcggcgcacccatgtccccctgacagagagttgtttatggcccgcctagcggcggcacactaattttaaaccactgtgctaaatcgttgccgtcttacagggtgtttgttcgcaacaaccaccgagggggtactcgattactgatcgaccgctcggcgagaagaaaatgtttggcgttcaacaccggaggcacttaatttgtacattgaggacccacaatttattttaccggcagagcgctttctccttcaaactatcacgcgtgcgacgtggaccagatatgaaaaccatcgagcaggcagacgcaccagcgacactgaacattcgtaagtgccaaagataacactcaccatagtcggcaatttgttccaccacgagcgaaaaacgaagaacacgacggaggaacggagcgaccgaggacgttcgaacagccaaaaaaaaatacgcacttn

SEQ ID NO: 278167 - DNA, 1149 bp, Homo sapiens
agcggcagttctcactgagacctgtcaccccgactcaacgtgagacgcaccgcccggactcaccatgcgtgaatgcatctcagtccacgtggggcaggcaggtgtccagatgggcaatgcctgctgggagctctattgcttggaacatgggattcagcctgatgggcagatgcccagtgacaagaccattggtggaggggacgactccttcaccaccttcttctgtgaaactggtgctggaaaacacgtaccccgggcagtttttgtggatctggagcctacggtcattgatgagatccgaaatggcccataccgacagctcttccacccagagcagctcatcactgggaaagaggatgctgccaacaactatgcccgtggtcactataccattggcaaggagatcattgacccagtgctggatcggatccgcaagctgtctgaccagtgcacaggacttcagggcttcctggtgttccacagctttggtgggggcactggctctggcttcacctcactcctgatggagcggctctctgttgactatggcaagaaatccaagctggaattctccatctacccagccccccaggtgtctacagccgtggtcgagccctacaactctatcctgaccacccacaccaccctggagcactcagactgtgccttcatggtggacaacgaagcaatctatgacatctgccgccgcaacctagacatcgagcgcccaacctacaccaacctcaatcgcctcattagccaaattgtctcctccatcacagcttctctgcgctttgacggggccctcaatgtggacctgacagagttccagaccaacctggtgccctaccctcgcatccacttccccctggccacctatgcaccagtcatctctgcagaaaaggcataccacgagcagctgtcggtggcagagatcaccaatgcctgctttgagcctgccaaccagatggtaaagtgtgatccccggcacggcaagtacatggcctgctgcctgctgtaccgtggagatgtggtgcccaaggatgtcaacgctgccattgccgccatcaagaccaagcgcagcattcagtttgtggactggtccgataaacgagtgccgatgaatgggatcctctagaacagccagca

SEQ ID NO: 278168 - DNA, 2888 bp, Homo sapiens
  misc_feature (17)..(17): n is a, c, g, or t
  misc_feature (19)..(19): n is a, c, g, or t
  misc_feature (21)..(21): n is a, c, g, or t
  misc_feature (24)..(24): n is a, c, g, or t
  misc_feature (29)..(29): n is a, c, g, or t
  misc_feature (32)..(32): n is a, c, g, or t
aagtaggctagtagagncngntgntaatnggncgaggccgactcaacgtgagacgcaccgcccggactcaccatgcgtgaatgcatctcagtccacgtggggcaggcaggtgtccagatgggcaatgcctgctgggagctctattgcttggaacatgggattcagcctgatgggcagatgcccagtgacaagaccattggtggaggggacgactccttcaccaccttcttctgtgaaactggtgctggaaaacacgtaccccgggcagtttttgtggatctggagcctacggtcattgatgagatccgaaatggcccataccgacagctcttccacccagagcagctcatcactgggaaagaggatgctgccaacaactatgcccgtggtcactataccattggcaaggagatcattgacccagtgctggatcggatccgcaagctgtctgaccagtgcacaggacttcagggcttcctggtgttccacagctttggtgggggcactggctctggcttcacctcactcctgatggagcggctctctgttgactatggcaagaaatccaagctggaattctccatctacccagccccccaggtgtctacagccgtggtcgagccctacaactctatcctgaccacccacaccaccctggagcactcagactgtgccttcatggtggacaacgaagcaatctatgacatctgccgccgcaacctagacatcgagcgcccaacctacaccaacctcaatcgcctcattagccaaattgtctcctccatcacagcttctctgcgctttgacggggccctcaatgtggacctgacagagttccagaccaacctggtgccctaccctcgcatccacttccccctggccacctatgcaccagtcatctctgcagaaaaggcataccacgagcagctgtcggtggcagagatcaccaatgcctgctttgagcctgccaaccagatggtaaagtgtgatccccggcacggcaagtacatggcctgctgcctgctgtaccgtggagatgtggtgcccaaggatgtcaacgctgccattgccgccatcaagaccaagcgcagcattcagtttgtggactggtgccccacaggcttcaaggttggtatcaactaccagcctcccactgtggtgcctgggggtgacctggccaaggtgcagcgtgccgtgtgcatgctgagcaacacgaccgccatcgccgaggcctgggcccgcctggaccacaagttcgacctgatgtatgccaagagggcgtttgtgcactggtatgtgggtgagggcatggaggagggtgagttctccgaggcccgtgaggatatggctgccctggagaaggattatgaggaggtgggcatcgactcctatgaggacgaggatgagggagaagaataaagcagctgcctggagcctattcactatgtttattgcaaaatcctttcgaaataaacagtttccttgcacggtttcttgttccctctgagtgcttgagcttctgctgccttccccttcatgctgctgctgctctgtttgctgttcatgacccttatcccttccatcgctgaaggtgagacctgcaaaggggttcttgccaggcccaggaagcataaccccagggactttaaattgaagtcctagggttactcagtatagggaggaaatgaggaccaaaatccaggcacaaactgttgaaggatgagtcttcagctcctttccaagtaggagtataatccagtggtttctgtctttgaaagttagactgctaccctgttcttcctgctgcctctacatttaccaactctggaagcaaggcttggcccaggctcctctgtgcattatgagggtttgggagtggggctgggctggcccagagttcctgggcatggagccacgtcataagcttgggggatgggagggaacacaggcgatctcctagagttgtttgtgccactgcacctctgagcagctttgcatagcttcctgtcttgctgctttgctggagctggggctgtgccattaaaagtcaggtcatctcccctctgtttgtgatttctttctggcctcagcctctgtgctagctagtgggagactcctgctagggccctggggaaagcttcaactttgctaacaggagccccaggccccatgctgatgtcatactgtggggtagacatggttcgggggaggaggcttggatcacaaaagagcaggagatgccaaccctgcccttgcctttcctccctggtgattcagggaacagagcccttccctagggaacaggtttgaagcccagctaagacagggcccctgtttactcagcagagtaggcaggaagtggcagctggatactgccacaccacactgcctcattaatcattaaccatgtatgagcttgaacgatcagggagacacaggccaaaacagctgccgctgccacctccactcccctcgcccctaggctgaggatgggagacctgtaatctacctgtctcaaagcttcctcaggtgtctccacccagaggcccttgcctagcaaaccggctaggcagctttgactaagctactcaccccaggagtgaaggaaggaaagaactagttgagtgtttttagggggccctagttcttgacacaggcagatgccagcttgagcccaagcagctttaagttttgatctaagacaagctagaactgtccactgctaaccaacctcctgtagaatgaagtcacaccattgccgactctgcaccattcctccttcccaggcagttcgcctgaatatggcaacctgactttgggccccttgcacctcttctctcactccaggaacactgagactaagatctacaccaacctgcttccacttt

SEQ ID NO: 278169 - DNA, 2867 bp, Homo sapiens
ggcctggtggcgaattcggcacgagggtgagacgcaccgcccggactcaccatgcgtgaatgcatctcagtccacgtggggcaggcaggtgtccagatgggcaatgcctgctgggagctctattgcttggaacatgggattcagcctgatgggcagatgcccagtgacaagaccattggtggaggggacgactccttcaccaccttcttctgtgaaactggtgctggaaaacacgtaccccgggcagtttttgtggatctggagcctacggtcattgatgagatccgaaatggcccataccgacagctcttccacccagagcagctcatcactgggaaagaggatgctgccaacaactatgcccgtggtcactataccattggcaaggagatcattgacccagtgctggatcggatccgcaagctgtctgaccagtgcacaggacttcagggcttcctggtgttccacagctttggtgggggcactggctctggcttcacctcactcctgatggagcggctctctgttgactatggcaagaaatccaagctggaattctccatctacccagccccccaggtgtctacagccgtggtcgagccctacaactctatcctgaccacccacaccaccctggagcactcagactgtgccttcatggtggacaacgaagcaatctatgacatctgccgccgcaacctagacatcgagcgcccaacctacaccaacctcaatcgcctcattagccaaattgtctcctccatcacagcttctctgcgctttgacggggccctcaatgtggacctgacagagttccagaccaacctggtgccctaccctcgcatccacttccccctggccacctatgcaccagtcatctctgcagaaaaggcataccacgagcagctgtcggtggcagagatcaccaatgcctgctttgagcctgccaaccagatggtaaagtgtgatccccggcacggcaagtacatggcctgctgcctgctgtaccgtggagatgtggtgcccaaggatgtcaacgctgccattgccgccatcaagaccaagcgcagcattcagtttgtggactggtgccccacaggcttcaaggttggtatcaactaccagcctcccactgtggtgcctgggggtgacctggccaaggtgcagcgtgccgtgtgcatgctgagcaacacgaccgccatcgccgaggcctgggcccgcctggaccacaagttcgacctgatgtatgccaagagggcgtttgtgcactggtatgtgggtgagggcatggaggagggtgagttctccgaggcccgtgaggatatggctgccctggagaaggattatgaggaggtgggcatcgactcctatgaggacgaggatgagggagaagaataaagcagctgcctggagcctattcactatgtttattgcaaaatcctttcgaaataaacagtttccttgcacggtttcttgttccctctgagtgcttgagcttctgctgccttccccttcatgctgctgctgctctgtttgctgttcatgacccttatcccttccatcgctgaaggtgagacctgcaaaggggttcttgccaggcccaggaagcataaccccagggactttaaattgaagtcctagggttactcagtatagggaggaaatgaggaccaaaatccaggcacaaactgttgaaggatgagtcttcagctcctttccaagtaggagtataatccagtggtttctgtctttgaaagttagactgctaccctgttcttcctgctgcctctacatttaccaactctggaagcaaggcttggcccaggctcctctgtgcattatgagggtttgggagtggggctgggctggcccagagttcctgggcatggagccacgtcataagcttgggggatgggagggaacacaggcgatctcctagagttgtttgtgccactgcacctctgagcagctttgcatagcttcctgtcttgctgctttgctggagctggggctgtgccattaaaagtcaggtcatctcccctctgtttgtgatttctttctggcctcagcctctgtgctagctagtgggagactcctgctagggccctggggaaagcttcaactttgctaacaggagccccaggccccatgctgatgtcatactgtggggtagacatggttcgggggaggaggcttggatcacaaaagagcaggagatgccaaccctgcccttgcctttcctccctggtgattcagggaacagagcccttccctagggaacaggtttgaagcccagctaagacagggcccctgtttactcagcagagtaggcaggaagtggcagctggatactgccacaccacactgcctcattaatcattaaccatgtatgagcttgaacgatcagggagacacaggccaaaacagctgccgctgccacctccactcccctcgcccctaggctgaggatgggagacctgtaatctacctgtctcaaagcttcctcaggtgtctccacccagaggcccttgcctagcaaaccggctaggcagctttgactaagctactcaccccaggagtgaaggaaggaaagaactagttgagtgtttttagggggccctagttcttgacacaggcagatgccagcttgagcccaagcagctttaagttttgatctaagacaagctagaactgtccactgctaaccaacctcctgtagaatgaagtcacaccattgccgactctgcaccattcctccttcccaggcagttcgcctgaatatggcaacctgactttgggccccttgcacctcttctctcactccaggaacactgagactaagatctacaccaacctgcttccacttt

SEQ ID NO: 278170 - DNA, 992 bp, Homo sapiens
agcggcagttctcactgagacctgtcaccccgactcaacgtgagacgcaccgcccggactcaccatgcgtgaatgcatctcagtccacgtggggcaggcaggtgtccagatgggcaatgcctgctgggagctctattgcttggaacatgggattcagcctgatgggcagatgcccagtgacaagaccattggtggaggggacgactccttcaccaccttcttctgtgaaactggtgctggaaaacacgtaccccgggcagtttttgtggatctggagcctacggtcattgatgagatccgaaatggcccataccgacagctcttccacccagagcagctcatcactgggaaagaggatgctgccaacaactatgcccgtggtcactataccattggcaaggagatcattgacccagtgctggatcggatccgcaagctgtctgaccagtgcacaggacttcagggcttcctggtgttccacagctttggtgggggcactggctctggcttcacctcactcctgatggagcggctctctgttgactatggcaagaaatccaagctggaattctccatctacccagccccccaggtgtctacagccgtggtcgagccctacaactctatcctgaccacccacaccaccctggagcactcagactgtgccttcatggtggacaacgaagcaatctatgacatctgccgccgcaacctagacatcgagcgcccaacctacaccaacctcaatcgcctcattagccaaattgtctcctccatcacagcttctctgcgctttgacggggccctcaatgtggacctgacagagttccagaccaacctggtgccctaccctcattccctggcactatgccagtctttttgcggaaggttcccgagcgcgtgggggggatccatgcgttggcttccaccaagtaggggcccggggatgccggcgcgcgggtggccggttgttcgcccaaacctttggggcc

SEQ ID NO: 278171 - DNA, 2836 bp, Homo sapiens
ggactgcgcgggcggtttagcagcgtgaatgcatctcagtccacgtggggcaggcaggtgtccagatgggcaatgcctgctgggagctctattgcttggaacatgggattcagcctgatgggcagatgcccagtgacaagaccattggtggaggggacgactccttcaccaccttcttctgtgaaactggtgctggaaaacacgtaccccgggcagtttttgtggatctggagcctacggtcattgatgagatccgaaatggcccataccgacagctcttccacccagagcagctcatcactgggaaagaggatgctgccaacaactatgcccgtggtcactataccattggcaaggagatcattgacccagtgctggatcggatccgcaagctgtctgaccagtgcacaggacttcagggcttcctggtgttccacagctttggtgggggcactggctctggcttcacctcactcctgatggagcggctctctgttgactatggcaagaaatccaagctggaattctccatctacccagccccccaggtgtctacagccgtggtcgagccctacaactctatcctgaccacccacaccaccctggagcactcagactgtgccttcatggtggacaacgaagcaatctatgacatctgccgccgcaacctagacatcgagcgcccaacctacaccaacctcaatcgcctcattagccaaattgtctcctccatcacagcttctctgcgctttgacggggccctcaatgtggacctgacagagttccagaccaacctggtgccctaccctcgcatccacttccccctggccacctatgcaccagtcatctctgcagaaaaggcataccacgagcagctgtcggtggcagagatcaccaatgcctgctttgagcctgccaaccagatggtaaagtgtgatccccggcacggcaagtacatggcctgctgcctgctgtaccgtggagatgtggtgcccaaggatgtcaacgctgccattgccgccatcaagaccaagcgcagcattcagtttgtggactggtgccccacaggcttcaaggttggtatcaactaccagcctcccactgtggtgcctgggggtgacctggccaaggtgcagcgtgccgtgtgcatgctgagcaacacgaccgccatcgccgaggcctgggcccgcctggaccacaagttcgacctgatgtatgccaagagggcgtttgtgcactggtatgtgggtgagggcatggaggagggtgagttctccgaggcccgtgaggatatggctgccctggagaaggattatgaggaggtgggcatcgactcctatgaggacgaggatgagggagaagaataaagcagctgcctggagcctattcactatgtttattgcaaaatcctttcgaaataaacagtttccttgcacggtttcttgttccctctgagtgcttgagcttctgctgccttccccttcatgctgctgctgctctgtttgctgttcatgacccttatcccttccatcgctgaaggtgagacctgcaaaggggttcttgccaggcccaggaagcataaccccagggactttaaattgaagtcctagggttactcagtatagggaggaaatgaggaccaaaatccaggcacaaactgttgaaggatgagtcttcagctcctttccaagtaggagtataatccagtggtttctgtctttgaaagttagactgctaccctgttcttcctgctgcctctacatttaccaactctggaagcaaggcttggcccaggctcctctgtgcattatgagggtttgggagtggggctgggctggcccagagttcctgggcatggagccacgtcataagcttgggggatgggagggaacacaggcgatctcctagagttgtttgtgccactgcacctctgagcagctttgcatagcttcctgtcttgctgctttgctggagctggggctgtgccattaaaagtcaggtcatctcccctctgtttgtgatttctttctggcctcagcctctgtgctagctagtgggagactcctgctagggccctggggaaagcttcaactttgctaacaggagccccaggccccatgctgatgtcatactgtggggtagacatggttcgggggaggaggcttggatcacaaaagagcaggagatgccaaccctgcccttgcctttcctccctggtgattcagggaacagagcccttccctagggaacaggtttgaagcccagctaagacagggcccctgtttactcagcagagtaggcaggaagtggcagctggatactgccacaccacactgcctcattaatcattaaccatgtatgagcttgaacgatcagggagacacaggccaaaacagctgccgctgccacctccactcccctcgcccctaggctgaggatgggagacctgtaatctacctgtctcaaagcttcctcaggtgtctccacccagaggcccttgcctagcaaaccggctaggcagctttgactaagctactcaccccaggagtgaaggaaggaaagaactagttgagtgtttttagggggccctagttcttgacacaggcagatgccagcttgagcccaagcagctttaagttttgatctaagacaagctagaactgtccactgctaaccaacctcctgtagaatgaagtcacaccattgccgactctgcaccattcctccttcccaggcagttcgcctgaatatggcaacctgactttgggccccttgcacctcttctctcactccaggaacactgagactaagatctacaccaacctgcttccacttt

SEQ ID NO: 278172 - DNA, 3083 bp, Homo sapiens
cacagccggcccgagtctcctgggaggcagggctggaagggcaggggtgaaggccagctgtggccctatgggaaggaccgcctcgcctgctcccgacctaagtcagaacacctggatgaccggtgcctccaggacgcaggtgcaggtgagactcgccctgccacagcaccctgcatctccgcggaggccctcgggagcccagcgtgtctgctcaaaacgaggaaagaatggttaaagcccgaatcgcgactcttaatcccagcgggacagcgtgaatgcatctcagtccacgtggggcaggcaggtgtccagatgggcaatgcctgctgggagctctattgcttggaacatgggattcagcctgatgggcagatgcccagtgacaagaccattggtggaggggacgactccttcaccaccttcttctgtgaaactggtgctggaaaacacgtaccccgggcagtttttgtggatctggagcctacggtcattgatgagatccgaaatggcccataccgacagctcttccacccagagcagctcatcactgggaaagaggatgctgccaacaactatgcccgtggtcactataccattggcaaggagatcattgacccagtgctggatcggatccgcaagctgtctgaccagtgcacaggacttcagggcttcctggtgttccacagctttggtgggggcactggctctggcttcacctcactcctgatggagcggctctctgttgactatggcaagaaatccaagctggaattctccatctacccagccccccaggtgtctacagccgtggtcgagccctacaactctatcctgaccacccacaccaccctggagcactcagactgtgccttcatggtggacaacgaagcaatctatgacatctgccgccgcaacctagacatcgagcgcccaacctacaccaacctcaatcgcctcattagccaaattgtctcctccatcacagcttctctgcgctttgacggggccctcaatgtggacctgacagagttccagaccaacctggtgccctaccctcgcatccacttccccctggccacctatgcaccagtcatctctgcagaaaaggcataccacgagcagctgtcggtggcagagatcaccaatgcctgctttgagcctgccaaccagatggtaaagtgtgatccccggcacggcaagtacatggcctgctgcctgctgtaccgtggagatgtggtgcccaaggatgtcaacgctgccattgccgccatcaagaccaagcgcagcattcagtttgtggactggtgccccacaggcttcaaggttggtatcaactaccagcctcccactgtggtgcctgggggtgacctggccaaggtgcagcgtgccgtgtgcatgctgagcaacacgaccgccatcgccgaggcctgggcccgcctggaccacaagttcgacctgatgtatgccaagagggcgtttgtgcactggtatgtgggtgagggcatggaggagggtgagttctccgaggcccgtgaggatatggctgccctggagaaggattatgaggaggtgggcatcgactcctatgaggacgaggatgagggagaagaataaagcagctgcctggagcctattcactatgtttattgcaaaatcctttcgaaataaacagtttccttgcacggtttcttgttccctctgagtgcttgagcttctgctgccttccccttcatgctgctgctgctctgtttgctgttcatgacccttatcccttccatcgctgaaggtgagacctgcaaaggggttcttgccaggcccaggaagcataaccccagggactttaaattgaagtcctagggttactcagtatagggaggaaatgaggaccaaaatccaggcacaaactgttgaaggatgagtcttcagctcctttccaagtaggagtataatccagtggtttctgtctttgaaagttagactgctaccctgttcttcctgctgcctctacatttaccaactctggaagcaaggcttggcccaggctcctctgtgcattatgagggtttgggagtggggctgggctggcccagagttcctgggcatggagccacgtcataagcttgggggatgggagggaacacaggcgatctcctagagttgtttgtgccactgcacctctgagcagctttgcatagcttcctgtcttgctgctttgctggagctggggctgtgccattaaaagtcaggtcatctcccctctgtttgtgatttctttctggcctcagcctctgtgctagctagtgggagactcctgctagggccctggggaaagcttcaactttgctaacaggagccccaggccccatgctgatgtcatactgtggggtagacatggttcgggggaggaggcttggatcacaaaagagcaggagatgccaaccctgcccttgcctttcctccctggtgattcagggaacagagcccttccctagggaacaggtttgaagcccagctaagacagggcccctgtttactcagcagagtaggcaggaagtggcagctggatactgccacaccacactgcctcattaatcattaaccatgtatgagcttgaacgatcagggagacacaggccaaaacagctgccgctgccacctccactcccctcgcccctaggctgaggatgggagacctgtaatctacctgtctcaaagcttcctcaggtgtctccacccagaggcccttgcctagcaaaccggctaggcagctttgactaagctactcaccccaggagtgaaggaaggaaagaactagttgagtgtttttagggggccctagttcttgacacaggcagatgccagcttgagcccaagcagctttaagttttgatctaagacaagctagaactgtccactgctaaccaacctcctgtagaatgaagtcacaccattgccgactctgcaccattcctccttcccaggcagttcgcctgaatatggcaacctgactttgggccccttgcacctcttctctcactccaggaacactgagactaagatctacaccaacctgcttccacttt

SEQ ID NO: 278173 - DNA, 2834 bp, Homo sapiens
tcccctctctctatccctcagcgtgaatgcatctcagtccacgtggggcaggcaggtgtccagatgggcaatgcctgctgggagctctattgcttggaacatgggattcagcctgatgggcagatgcccagtgacaagaccattggtggaggggacgactccttcaccaccttcttctgtgaaactggtgctggaaaacacgtaccccgggcagtttttgtggatctggagcctacggtcattgatgagatccgaaatggcccataccgacagctcttccacccagagcagctcatcactgggaaagaggatgctgccaacaactatgcccgtggtcactataccattggcaaggagatcattgacccagtgctggatcggatccgcaagctgtctgaccagtgcacaggacttcagggcttcctggtgttccacagctttggtgggggcactggctctggcttcacctcactcctgatggagcggctctctgttgactatggcaagaaatccaagctggaattctccatctacccagccccccaggtgtctacagccgtggtcgagccctacaactctatcctgaccacccacaccaccctggagcactcagactgtgccttcatggtggacaacgaagcaatctatgacatctgccgccgcaacctagacatcgagcgcccaacctacaccaacctcaatcgcctcattagccaaattgtctcctccatcacagcttctctgcgctttgacggggccctcaatgtggacctgacagagttccagaccaacctggtgccctaccctcgcatccacttccccctggccacctatgcaccagtcatctctgcagaaaaggcataccacgagcagctgtcggtggcagagatcaccaatgcctgctttgagcctgccaaccagatggtaaagtgtgatccccggcacggcaagtacatggcctgctgcctgctgtaccgtggagatgtggtgcccaaggatgtcaacgctgccattgccgccatcaagaccaagcgcagcattcagtttgtggactggtgccccacaggcttcaaggttggtatcaactaccagcctcccactgtggtgcctgggggtgacctggccaaggtgcagcgtgccgtgtgcatgctgagcaacacgaccgccatcgccgaggcctgggcccgcctggaccacaagttcgacctgatgtatgccaagagggcgtttgtgcactggtatgtgggtgagggcatggaggagggtgagttctccgaggcccgtgaggatatggctgccctggagaaggattatgaggaggtgggcatcgactcctatgaggacgaggatgagggagaagaataaagcagctgcctggagcctattcactatgtttattgcaaaatcctttcgaaataaacagtttccttgcacggtttcttgttccctctgagtgcttgagcttctgctgccttccccttcatgctgctgctgctctgtttgctgttcatgacccttatcccttccatcgctgaaggtgagacctgcaaaggggttcttgccaggcccaggaagcataaccccagggactttaaattgaagtcctagggttactcagtatagggaggaaatgaggaccaaaatccaggcacaaactgttgaaggatgagtcttcagctcctttccaagtaggagtataatccagtggtttctgtctttgaaagttagactgctaccctgttcttcctgctgcctctacatttaccaactctggaagcaaggcttggcccaggctcctctgtgcattatgagggtttgggagtggggctgggctggcccagagttcctgggcatggagccacgtcataagcttgggggatgggagggaacacaggcgatctcctagagttgtttgtgccactgcacctctgagcagctttgcatagcttcctgtcttgctgctttgctggagctggggctgtgccattaaaagtcaggtcatctcccctctgtttgtgatttctttctggcctcagcctctgtgctagctagtgggagactcctgctagggccctggggaaagcttcaactttgctaacaggagccccaggccccatgctgatgtcatactgtggggtagacatggttcgggggaggaggcttggatcacaaaagagcaggagatgccaaccctgcccttgcctttcctccctggtgattcagggaacagagcccttccctagggaacaggtttgaagcccagctaagacagggcccctgtttactcagcagagtaggcaggaagtggcagctggatactgccacaccacactgcctcattaatcattaaccatgtatgagcttgaacgatcagggagacacaggccaaaacagctgccgctgccacctccactcccctcgcccctaggctgaggatgggagacctgtaatctacctgtctcaaagcttcctcaggtgtctccacccagaggcccttgcctagcaaaccggctaggcagctttgactaagctactcaccccaggagtgaaggaaggaaagaactagttgagtgtttttagggggccctagttcttgacacaggcagatgccagcttgagcccaagcagctttaagttttgatctaagacaagctagaactgtccactgctaaccaacctcctgtagaatgaagtcacaccattgccgactctgcaccattcctccttcccaggcagttcgcctgaatatggcaacctgactttgggccccttgcacctcttctctcactccaggaacactgagactaagatctacaccaacctgcttccacttt

SEQ ID NO: 278174 - DNA, 2899 bp, Homo sapiens
ggctgggctgcaggatggcgcccatcctgcccgggacaaggcgggtcacctctggggcctcaccgcaggttccacttcctttctggcgtgaatgcatctcagtccacgtggggcaggcaggtgtccagatgggcaatgcctgctgggagctctattgcttggaacatgggattcagcctgatgggcagatgcccagtgacaagaccattggtggaggggacgactccttcaccaccttcttctgtgaaactggtgctggaaaacacgtaccccgggcagtttttgtggatctggagcctacggtcattgatgagatccgaaatggcccataccgacagctcttccacccagagcagctcatcactgggaaagaggatgctgccaacaactatgcccgtggtcactataccattggcaaggagatcattgacccagtgctggatcggatccgcaagctgtctgaccagtgcacaggacttcagggcttcctggtgttccacagctttggtgggggcactggctctggcttcacctcactcctgatggagcggctctctgttgactatggcaagaaatccaagctggaattctccatctacccagccccccaggtgtctacagccgtggtcgagccctacaactctatcctgaccacccacaccaccctggagcactcagactgtgccttcatggtggacaacgaagcaatctatgacatctgccgccgcaacctagacatcgagcgcccaacctacaccaacctcaatcgcctcattagccaaattgtctcctccatcacagcttctctgcgctttgacggggccctcaatgtggacctgacagagttccagaccaacctggtgccctaccctcgcatccacttccccctggccacctatgcaccagtcatctctgcagaaaaggcataccacgagcagctgtcggtggcagagatcaccaatgcctgctttgagcctgccaaccagatggtaaagtgtgatccccggcacggcaagtacatggcctgctgcctgctgtaccgtggagatgtggtgcccaaggatgtcaacgctgccattgccgccatcaagaccaagcgcagcattcagtttgtggactggtgccccacaggcttcaaggttggtatcaactaccagcctcccactgtggtgcctgggggtgacctggccaaggtgcagcgtgccgtgtgcatgctgagcaacacgaccgccatcgccgaggcctgggcccgcctggaccacaagttcgacctgatgtatgccaagagggcgtttgtgcactggtatgtgggtgagggcatggaggagggtgagttctccgaggcccgtgaggatatggctgccctggagaaggattatgaggaggtgggcatcgactcctatgaggacgaggatgagggagaagaataaagcagctgcctggagcctattcactatgtttattgcaaaatcctttcgaaataaacagtttccttgcacggtttcttgttccctctgagtgcttgagcttctgctgccttccccttcatgctgctgctgctctgtttgctgttcatgacccttatcccttccatcgctgaaggtgagacctgcaaaggggttcttgccaggcccaggaagcataaccccagggactttaaattgaagtcctagggttactcagtatagggaggaaatgaggaccaaaatccaggcacaaactgttgaaggatgagtcttcagctcctttccaagtaggagtataatccagtggtttctgtctttgaaagttagactgctaccctgttcttcctgctgcctctacatttaccaactctggaagcaaggcttggcccaggctcctctgtgcattatgagggtttgggagtggggctgggctggcccagagttcctgggcatggagccacgtcataagcttgggggatgggagggaacacaggcgatctcctagagttgtttgtgccactgcacctctgagcagctttgcatagcttcctgtcttgctgctttgctggagctggggctgtgccattaaaagtcaggtcatctcccctctgtttgtgatttctttctggcctcagcctctgtgctagctagtgggagactcctgctagggccctggggaaagcttcaactttgctaacaggagccccaggccccatgctgatgtcatactgtggggtagacatggttcgggggaggaggcttggatcacaaaagagcaggagatgccaaccctgcccttgcctttcctccctggtgattcagggaacagagcccttccctagggaacaggtttgaagcccagctaagacagggcccctgtttactcagcagagtaggcaggaagtggcagctggatactgccacaccacactgcctcattaatcattaaccatgtatgagcttgaacgatcagggagacacaggccaaaacagctgccgctgccacctccactcccctcgcccctaggctgaggatgggagacctgtaatctacctgtctcaaagcttcctcaggtgtctccacccagaggcccttgcctagcaaaccggctaggcagctttgactaagctactcaccccaggagtgaaggaaggaaagaactagttgagtgtttttagggggccctagttcttgacacaggcagatgccagcttgagcccaagcagctttaagttttgatctaagacaagctagaactgtccactgctaaccaacctcctgtagaatgaagtcacaccattgccgactctgcaccattcctccttcccaggcagttcgcctgaatatggcaacctgactttgggccccttgcacctcttctctcactccaggaacactgagactaagatctacaccaacctgcttccacttt

SEQ ID NO: 278175 - DNA, 2856 bp, Homo sapiens
gcaccaaggttaaccggaaaacccaccgcccggactcaccatgcgtgaatgcatctcagtccacgtggggcaggcaggtgtccagatgggcaatgcctgctgggagctctattgcttggaacatgggattcagcctgatgggcagatgcccagtgacaagaccattggtggaggggacgactccttcaccaccttcttctgtgaaactggtgctggaaaacacgtaccccgggcagtttttgtggatctggagcctacggtcattgatgagatccgaaatggcccataccgacagctcttccacccagagcagctcatcactgggaaagaggatgctgccaacaactatgcccgtggtcactataccattggcaaggagatcattgacccagtgctggatcggatccgcaagctgtctgaccagtgcacaggacttcagggcttcctggtgttccacagctttggtgggggcactggctctggcttcacctcactcctgatggagcggctctctgttgactatggcaagaaatccaagctggaattctccatctacccagccccccaggtgtctacagccgtggtcgagccctacaactctatcctgaccacccacaccaccctggagcactcagactgtgccttcatggtggacaacgaagcaatctatgacatctgccgccgcaacctagacatcgagcgcccaacctacaccaacctcaatcgcctcattagccaaattgtctcctccatcacagcttctctgcgctttgacggggccctcaatgtggacctgacagagttccagaccaacctggtgccctaccctcgcatccacttccccctggccacctatgcaccagtcatctctgcagaaaaggcataccacgagcagctgtcggtggcagagatcaccaatgcctgctttgagcctgccaaccagatggtaaagtgtgatccccggcacggcaagtacatggcctgctgcctgctgtaccgtggagatgtggtgcccaaggatgtcaacgctgccattgccgccatcaagaccaagcgcagcattcagtttgtggactggtgccccacaggcttcaaggttggtatcaactaccagcctcccactgtggtgcctgggggtgacctggccaaggtgcagcgtgccgtgtgcatgctgagcaacacgaccgccatcgccgaggcctgggcccgcctggaccacaagttcgacctgatgtatgccaagagggcgtttgtgcactggtatgtgggtgagggcatggaggagggtgagttctccgaggcccgtgaggatatggctgccctggagaaggattatgaggaggtgggcatcgactcctatgaggacgaggatgagggagaagaataaagcagctgcctggagcctattcactatgtttattgcaaaatcctttcgaaataaacagtttccttgcacggtttcttgttccctctgagtgcttgagcttctgctgccttccccttcatgctgctgctgctctgtttgctgttcatgacccttatcccttccatcgctgaaggtgagacctgcaaaggggttcttgccaggcccaggaagcataaccccagggactttaaattgaagtcctagggttactcagtatagggaggaaatgaggaccaaaatccaggcacaaactgttgaaggatgagtcttcagctcctttccaagtaggagtataatccagtggtttctgtctttgaaagttagactgctaccctgttcttcctgctgcctctacatttaccaactctggaagcaaggcttggcccaggctcctctgtgcattatgagggtttgggagtggggctgggctggcccagagttcctgggcatggagccacgtcataagcttgggggatgggagggaacacaggcgatctcctagagttgtttgtgccactgcacctctgagcagctttgcatagcttcctgtcttgctgctttgctggagctggggctgtgccattaaaagtcaggtcatctcccctctgtttgtgatttctttctggcctcagcctctgtgctagctagtgggagactcctgctagggccctggggaaagcttcaactttgctaacaggagccccaggccccatgctgatgtcatactgtggggtagacatggttcgggggaggaggcttggatcacaaaagagcaggagatgccaaccctgcccttgcctttcctccctggtgattcagggaacagagcccttccctagggaacaggtttgaagcccagctaagacagggcccctgtttactcagcagagtaggcaggaagtggcagctggatactgccacaccacactgcctcattaatcattaaccatgtatgagcttgaacgatcagggagacacaggccaaaacagctgccgctgccacctccactcccctcgcccctaggctgaggatgggagacctgtaatctacctgtctcaaagcttcctcaggtgtctccacccagaggcccttgcctagcaaaccggctaggcagctttgactaagctactcaccccaggagtgaaggaaggaaagaactagttgagtgtttttagggggccctagttcttgacacaggcagatgccagcttgagcccaagcagctttaagttttgatctaagacaagctagaactgtccactgctaaccaacctcctgtagaatgaagtcacaccattgccgactctgcaccattcctccttcccaggcagttcgcctgaatatggcaacctgactttgggccccttgcacctcttctctcactccaggaacactgagactaagatctacaccaacctgcttccacttt

SEQ ID NO: 278176 - DNA, 2854 bp, Homo sapiens
gtcatttcgcaacctgactctcttaactaccacggctaacgcgtgaatgcatctcagtccacgtggggcaggcaggtgtccagatgggcaatgcctgctgggagctctattgcttggaacatgggattcagcctgatgggcagatgcccagtgacaagaccattggtggaggggacgactccttcaccaccttcttctgtgaaactggtgctggaaaacacgtaccccgggcagtttttgtggatctggagcctacggtcattgatgagatccgaaatggcccataccgacagctcttccacccagagcagctcatcactgggaaagaggatgctgccaacaactatgcccgtggtcactataccattggcaaggagatcattgacccagtgctggatcggatccgcaagctgtctgaccagtgcacaggacttcagggcttcctggtgttccacagctttggtgggggcactggctctggcttcacctcactcctgatggagcggctctctgttgactatggcaagaaatccaagctggaattctccatctacccagccccccaggtgtctacagccgtggtcgagccctacaactctatcctgaccacccacaccaccctggagcactcagactgtgccttcatggtggacaacgaagcaatctatgacatctgccgccgcaacctagacatcgagcgcccaacctacaccaacctcaatcgcctcattagccaaattgtctcctccatcacagcttctctgcgctttgacggggccctcaatgtggacctgacagagttccagaccaacctggtgccctaccctcgcatccacttccccctggccacctatgcaccagtcatctctgcagaaaaggcataccacgagcagctgtcggtggcagagatcaccaatgcctgctttgagcctgccaaccagatggtaaagtgtgatccccggcacggcaagtacatggcctgctgcctgctgtaccgtggagatgtggtgcccaaggatgtcaacgctgccattgccgccatcaagaccaagcgcagcattcagtttgtggactggtgccccacaggcttcaaggttggtatcaactaccagcctcccactgtggtgcctgggggtgacctggccaaggtgcagcgtgccgtgtgcatgctgagcaacacgaccgccatcgccgaggcctgggcccgcctggaccacaagttcgacctgatgtatgccaagagggcgtttgtgcactggtatgtgggtgagggcatggaggagggtgagttctccgaggcccgtgaggatatggctgccctggagaaggattatgaggaggtgggcatcgactcctatgaggacgaggatgagggagaagaataaagcagctgcctggagcctattcactatgtttattgcaaaatcctttcgaaataaacagtttccttgcacggtttcttgttccctctgagtgcttgagcttctgctgccttccccttcatgctgctgctgctctgtttgctgttcatgacccttatcccttccatcgctgaaggtgagacctgcaaaggggttcttgccaggcccaggaagcataaccccagggactttaaattgaagtcctagggttactcagtatagggaggaaatgaggaccaaaatccaggcacaaactgttgaaggatgagtcttcagctcctttccaagtaggagtataatccagtggtttctgtctttgaaagttagactgctaccctgttcttcctgctgcctctacatttaccaactctggaagcaaggcttggcccaggctcctctgtgcattatgagggtttgggagtggggctgggctggcccagagttcctgggcatggagccacgtcataagcttgggggatgggagggaacacaggcgatctcctagagttgtttgtgccactgcacctctgagcagctttgcatagcttcctgtcttgctgctttgctggagctggggctgtgccattaaaagtcaggtcatctcccctctgtttgtgatttctttctggcctcagcctctgtgctagctagtgggagactcctgctagggccctggggaaagcttcaactttgctaacaggagccccaggccccatgctgatgtcatactgtggggtagacatggttcgggggaggaggcttggatcacaaaagagcaggagatgccaaccctgcccttgcctttcctccctggtgattcagggaacagagcccttccctagggaacaggtttgaagcccagctaagacagggcccctgtttactcagcagagtaggcaggaagtggcagctggatactgccacaccacactgcctcattaatcattaaccatgtatgagcttgaacgatcagggagacacaggccaaaacagctgccgctgccacctccactcccctcgcccctaggctgaggatgggagacctgtaatctacctgtctcaaagcttcctcaggtgtctccacccagaggcccttgcctagcaaaccggctaggcagctttgactaagctactcaccccaggagtgaaggaaggaaagaactagttgagtgtttttagggggccctagttcttgacacaggcagatgccagcttgagcccaagcagctttaagttttgatctaagacaagctagaactgtccactgctaaccaacctcctgtagaatgaagtcacaccattgccgactctgcaccattcctccttcccaggcagttcgcctgaatatggcaacctgactttgggccccttgcacctcttctctcactccaggaacactgagactaagatctacaccaacctgcttccacttt

SEQ ID NO: 278177 - DNA, 2653 bp, Homo sapiens
  misc_feature (16)..(16): n is a, c, g, or t
gctggggtgaatcggncgagggtacccgactcaacgtgagacgcaccgcccggactcaccatgatgagatccgaaatggcccataccgacagctcttccacccagagcagctcatcactgggaaagaggatgctgccaacaactatgcccgtggtcactataccattggcaaggagatcattgacccagtgctggatcggatccgcaagctgtctgaccagtgcacaggacttcagggcttcctggtgttccacagctttggtgggggcactggctctggcttcacctcactcctgatggagcggctctctgttgactatggcaagaaatccaagctggaattctccatctacccagccccccaggtgtctacagccgtggtcgagccctacaactctatcctgaccacccacaccaccctggagcactcagactgtgccttcatggtggacaacgaagcaatctatgacatctgccgccgcaacctagacatcgagcgcccaacctacaccaacctcaatcgcctcattagccaaattgtctcctccatcacagcttctctgcgctttgacggggccctcaatgtggacctgacagagttccagaccaacctggtgccctaccctcgcatccacttccccctggccacctatgcaccagtcatctctgcagaaaaggcataccacgagcagctgtcggtggcagagatcaccaatgcctgctttgagcctgccaaccagatggtaaagtgtgatccccggcacggcaagtacatggcctgctgcctgctgtaccgtggagatgtggtgcccaaggatgtcaacgctgccattgccgccatcaagaccaagcgcagcattcagtttgtggactggtgccccacaggcttcaaggttggtatcaactaccagcctcccactgtggtgcctgggggtgacctggccaaggtgcagcgtgccgtgtgcatgctgagcaacacgaccgccatcgccgaggcctgggcccgcctggaccacaagttcgacctgatgtatgccaagagggcgtttgtgcactggtatgtgggtgagggcatggaggagggtgagttctccgaggcccgtgaggatatggctgccctggagaaggattatgaggaggtgggcatcgactcctatgaggacgaggatgagggagaagaataaagcagctgcctggagcctattcactatgtttattgcaaaatcctttcgaaataaacagtttccttgcacggtttcttgttccctctgagtgcttgagcttctgctgccttccccttcatgctgctgctgctctgtttgctgttcatgacccttatcccttccatcgctgaaggtgagacctgcaaaggggttcttgccaggcccaggaagcataaccccagggactttaaattgaagtcctagggttactcagtatagggaggaaatgaggaccaaaatccaggcacaaactgttgaaggatgagtcttcagctcctttccaagtaggagtataatccagtggtttctgtctttgaaagttagactgctaccctgttcttcctgctgcctctacatttaccaactctggaagcaaggcttggcccaggctcctctgtgcattatgagggtttgggagtggggctgggctggcccagagttcctgggcatggagccacgtcataagcttgggggatgggagggaacacaggcgatctcctagagttgtttgtgccactgcacctctgagcagctttgcatagcttcctgtcttgctgctttgctggagctggggctgtgccattaaaagtcaggtcatctcccctctgtttgtgatttctttctggcctcagcctctgtgctagctagtgggagactcctgctagggccctggggaaagcttcaactttgctaacaggagccccaggccccatgctgatgtcatactgtggggtagacatggttcgggggaggaggcttggatcacaaaagagcaggagatgccaaccctgcccttgcctttcctccctggtgattcagggaacagagcccttccctagggaacaggtttgaagcccagctaagacagggcccctgtttactcagcagagtaggcaggaagtggcagctggatactgccacaccacactgcctcattaatcattaaccatgtatgagcttgaacgatcagggagacacaggccaaaacagctgccgctgccacctccactcccctcgcccctaggctgaggatgggagacctgtaatctacctgtctcaaagcttcctcaggtgtctccacccagaggcccttgcctagcaaaccggctaggcagctttgactaagctactcaccccaggagtgaaggaaggaaagaactagttgagtgtttttagggggccctagttcttgacacaggcagatgccagcttgagcccaagcagctttaagttttgatctaagacaagctagaactgtccactgctaaccaacctcctgtagaatgaagtcacaccattgccgactctgcaccattcctccttcccaggcagttcgcctgaatatggcaacctgactttgggccccttgcacctcttctctcactccaggaacactgagactaagatctacaccaacctgcttccacttt

SEQ ID NO: 278178 - DNA, 2594 bp, Homo sapiens
ccggtccctatccggtccggggttgaccgacagctcttccacccagagcagctcatcactgggaaagaggatgctgccaacaactatgcccgtggtcactataccattggcaaggagatcattgacccagtgctggatcggatccgcaagctgtctgaccagtgcacaggacttcagggcttcctggtgttccacagctttggtgggggcactggctctggcttcacctcactcctgatggagcggctctctgttgactatggcaagaaatccaagctggaattctccatctacccagccccccaggtgtctacagccgtggtcgagccctacaactctatcctgaccacccacaccaccctggagcactcagactgtgccttcatggtggacaacgaagcaatctatgacatctgccgccgcaacctagacatcgagcgcccaacctacaccaacctcaatcgcctcattagccaaattgtctcctccatcacagcttctctgcgctttgacggggccctcaatgtggacctgacagagttccagaccaacctggtgccctaccctcgcatccacttccccctggccacctatgcaccagtcatctctgcagaaaaggcataccacgagcagctgtcggtggcagagatcaccaatgcctgctttgagcctgccaaccagatggtaaagtgtgatccccggcacggcaagtacatggcctgctgcctgctgtaccgtggagatgtggtgcccaaggatgtcaacgctgccattgccgccatcaagaccaagcgcagcattcagtttgtggactggtgccccacaggcttcaaggttggtatcaactaccagcctcccactgtggtgcctgggggtgacctggccaaggtgcagcgtgccgtgtgcatgctgagcaacacgaccgccatcgccgaggcctgggcccgcctggaccacaagttcgacctgatgtatgccaagagggcgtttgtgcactggtatgtgggtgagggcatggaggagggtgagttctccgaggcccgtgaggatatggctgccctggagaaggattatgaggaggtgggcatcgactcctatgaggacgaggatgagggagaagaataaagcagctgcctggagcctattcactatgtttattgcaaaatcctttcgaaataaacagtttccttgcacggtttcttgttccctctgagtgcttgagcttctgctgccttccccttcatgctgctgctgctctgtttgctgttcatgacccttatcccttccatcgctgaaggtgagacctgcaaaggggttcttgccaggcccaggaagcataaccccagggactttaaattgaagtcctagggttactcagtatagggaggaaatgaggaccaaaatccaggcacaaactgttgaaggatgagtcttcagctcctttccaagtaggagtataatccagtggtttctgtctttgaaagttagactgctaccctgttcttcctgctgcctctacatttaccaactctggaagcaaggcttggcccaggctcctctgtgcattatgagggtttgggagtggggctgggctggcccagagttcctgggcatggagccacgtcataagcttgggggatgggagggaacacaggcgatctcctagagttgtttgtgccactgcacctctgagcagctttgcatagcttcctgtcttgctgctttgctggagctggggctgtgccattaaaagtcaggtcatctcccctctgtttgtgatttctttctggcctcagcctctgtgctagctagtgggagactcctgctagggccctggggaaagcttcaactttgctaacaggagccccaggccccatgctgatgtcatactgtggggtagacatggttcgggggaggaggcttggatcacaaaagagcaggagatgccaaccctgcccttgcctttcctccctggtgattcagggaacagagcccttccctagggaacaggtttgaagcccagctaagacagggcccctgtttactcagcagagtaggcaggaagtggcagctggatactgccacaccacactgcctcattaatcattaaccatgtatgagcttgaacgatcagggagacacaggccaaaacagctgccgctgccacctccactcccctcgcccctaggctgaggatgggagacctgtaatctacctgtctcaaagcttcctcaggtgtctccacccagaggcccttgcctagcaaaccggctaggcagctttgactaagctactcaccccaggagtgaaggaaggaaagaactagttgagtgtttttagggggccctagttcttgacacaggcagatgccagcttgagcccaagcagctttaagttttgatctaagacaagctagaactgtccactgctaaccaacctcctgtagaatgaagtcacaccattgccgactctgcaccattcctccttcccaggcagttcgcctgaatatggcaacctgactttgggccccttgcacctcttctctcactccaggaacactgagactaagatctacaccaacctgcttccacttt

SEQ ID NO: 278179 - DNA, 3121 bp, Homo sapiens
agcggcagttctcactgagacctgtcaccccgactcaacgtgagacgcaccgcccggactcaccatgcgtgaatgcatctcagtccacgtggggcaggcaggtgtccagatgggcaatgcctgctgggagctctattgcttggaacatgggattcagcctgatgggcagatgcccagtgacaagaccattggtggaggggacgactccttcaccaccttcttctgtgaaactggtgctggaaaacacgtaccccgggcagtttttgtggatctggagcctacggtcattgatgagatccgaaatggcccataccgacagctcttccacccagagcagctcatcactgggaaagaggatgctgccaacaactatgcccgtggtcactataccattggcaaggagatcattgacccagtgctggatcggatccgcaagctggtgagagtgtgtcttgggagggagggaacttttgagactgtgctaatggtcaggaatattttttttcagatcctttcaggaggtcatctctaactatacatggtctcgagtgtggtgctgctatggcatcctcagtatttgccctgactgctgatgtatcttacgctttatggagccaggtgatagagtccctcaggcccctcccctacctaaactgttctttctcgttcttgcctttcagtctgaccagtgcacaggacttcagggcttcctggtgttccacagctttggtgggggcactggctctggcttcacctcactcctgatggagcggctctctgttgactatggcaagaaatccaagctggaattctccatctacccagccccccaggtgtctacagccgtggtcgagccctacaactctatcctgaccacccacaccaccctggagcactcagactgtgccttcatggtggacaacgaagcaatctatgacatctgccgccgcaacctagacatcgagcgcccaacctacaccaacctcaatcgcctcattagccaaattgtctcctccatcacagcttctctgcgctttgacggggccctcaatgtggacctgacagagttccagaccaacctggtgccctaccctcgcatccacttccccctggccacctatgcaccagtcatctctgcagaaaaggcataccacgagcagctgtcggtggcagagatcaccaatgcctgctttgagcctgccaaccagatggtaaagtgtgatccccggcacggcaagtacatggcctgctgcctgctgtaccgtggagatgtggtgcccaaggatgtcaacgctgccattgccgccatcaagaccaagcgcagcattcagtttgtggactggtgccccacaggcttcaaggttggtatcaactaccagcctcccactgtggtgcctgggggtgacctggccaaggtgcagcgtgccgtgtgcatgctgagcaacacgaccgccatcgccgaggcctgggcccgcctggaccacaagttcgacctgatgtatgccaagagggcgtttgtgcactggtatgtgggtgagggcatggaggagggtgagttctccgaggcccgtgaggatatggctgccctggagaaggattatgaggaggtgggcatcgactcctatgaggacgaggatgagggagaagaataaagcagctgcctggagcctattcactatgtttattgcaaaatcctttcgaaataaacagtttccttgcacggtttcttgttccctctgagtgcttgagcttctgctgccttccccttcatgctgctgctgctctgtttgctgttcatgacccttatcccttccatcgctgaaggtgagacctgcaaaggggttcttgccaggcccaggaagcataaccccagggactttaaattgaagtcctagggttactcagtatagggaggaaatgaggaccaaaatccaggcacaaactgttgaaggatgagtcttcagctcctttccaagtaggagtataatccagtggtttctgtctttgaaagttagactgctaccctgttcttcctgctgcctctacatttaccaactctggaagcaaggcttggcccaggctcctctgtgcattatgagggtttgggagtggggctgggctggcccagagttcctgggcatggagccacgtcataagcttgggggatgggagggaacacaggcgatctcctagagttgtttgtgccactgcacctctgagcagctttgcatagcttcctgtcttgctgctttgctggagctggggctgtgccattaaaagtcaggtcatctcccctctgtttgtgatttctttctggcctcagcctctgtgctagctagtgggagactcctgctagggccctggggaaagcttcaactttgctaacaggagccccaggccccatgctgatgtcatactgtggggtagacatggttcgggggaggaggcttggatcacaaaagagcaggagatgccaaccctgcccttgcctttcctccctggtgattcagggaacagagcccttccctagggaacaggtttgaagcccagctaagacagggcccctgtttactcagcagagtaggcaggaagtggcagctggatactgccacaccacactgcctcattaatcattaaccatgtatgagcttgaacgatcagggagacacaggccaaaacagctgccgctgccacctccactcccctcgcccctaggctgaggatgggagacctgtaatctacctgtctcaaagcttcctcaggtgtctccacccagaggcccttgcctagcaaaccggctaggcagctttgactaagctactcaccccaggagtgaaggaaggaaagaactagttgagtgtttttagggggccctagttcttgacacaggcagatgccagcttgagcccaagcagctttaagttttgatctaagacaagctagaactgtccactgctaaccaacctcctgtagaatgaagtcacaccattgccgactctgcaccattcctccttcccaggcagttcgcctgaatatggcaacctgactttgggccccttgcacctcttctctcactccaggaacactgagactaagatctacaccaacctgcttccacttt

SEQ ID NO: 278180 - DNA, 2532 bp, Homo sapiens
taggcagtaactatacggttctaaggttaagctgcattagtgaatcggcagtacgaggattgacccagtgctggatcggatccgcaagctgtctgaccagtgcacaggacttcagggcttcctggtgttccacagctttggtgggggcactggctctggcttcacctcactcctgatggagcggctctctgttgactatggcaagaaatccaagctggaattctccatctacccagccccccaggtgtctacagccgtggtcgagccctacaactctatcctgaccacccacaccaccctggagcactcagactgtgccttcatggtggacaacgaagcaatctatgacatctgccgccgcaacctagacatcgagcgcccaacctacaccaacctcaatcgcctcattagccaaattgtctcctccatcacagcttctctgcgctttgacggggccctcaatgtggacctgacagagttccagaccaacctggtgccctaccctcgcatccacttccccctggccacctatgcaccagtcatctctgcagaaaaggcataccacgagcagctgtcggtggcagagatcaccaatgcctgctttgagcctgccaaccagatggtaaagtgtgatccccggcacggcaagtacatggcctgctgcctgctgtaccgtggagatgtggtgcccaaggatgtcaacgctgccattgccgccatcaagaccaagcgcagcattcagtttgtggactggtgccccacaggcttcaaggttggtatcaactaccagcctcccactgtggtgcctgggggtgacctggccaaggtgcagcgtgccgtgtgcatgctgagcaacacgaccgccatcgccgaggcctgggcccgcctggaccacaagttcgacctgatgtatgccaagagggcgtttgtgcactggtatgtgggtgagggcatggaggagggtgagttctccgaggcccgtgaggatatggctgccctggagaaggattatgaggaggtgggcatcgactcctatgaggacgaggatgagggagaagaataaagcagctgcctggagcctattcactatgtttattgcaaaatcctttcgaaataaacagtttccttgcacggtttcttgttccctctgagtgcttgagcttctgctgccttccccttcatgctgctgctgctctgtttgctgttcatgacccttatcccttccatcgctgaaggtgagacctgcaaaggggttcttgccaggcccaggaagcataaccccagggactttaaattgaagtcctagggttactcagtatagggaggaaatgaggaccaaaatccaggcacaaactgttgaaggatgagtcttcagctcctttccaagtaggagtataatccagtggtttctgtctttgaaagttagactgctaccctgttcttcctgctgcctctacatttaccaactctggaagcaaggcttggcccaggctcctctgtgcattatgagggtttgggagtggggctgggctggcccagagttcctgggcatggagccacgtcataagcttgggggatgggagggaacacaggcgatctcctagagttgtttgtgccactgcacctctgagcagctttgcatagcttcctgtcttgctgctttgctggagctggggctgtgccattaaaagtcaggtcatctcccctctgtttgtgatttctttctggcctcagcctctgtgctagctagtgggagactcctgctagggccctggggaaagcttcaactttgctaacaggagccccaggccccatgctgatgtcatactgtggggtagacatggttcgggggaggaggcttggatcacaaaagagcaggagatgccaaccctgcccttgcctttcctccctggtgattcagggaacagagcccttccctagggaacaggtttgaagcccagctaagacagggcccctgtttactcagcagagtaggcaggaagtggcagctggatactgccacaccacactgcctcattaatcattaaccatgtatgagcttgaacgatcagggagacacaggccaaaacagctgccgctgccacctccactcccctcgcccctaggctgaggatgggagacctgtaatctacctgtctcaaagcttcctcaggtgtctccacccagaggcccttgcctagcaaaccggctaggcagctttgactaagctactcaccccaggagtgaaggaaggaaagaactagttgagtgtttttagggggccctagttcttgacacaggcagatgccagcttgagcccaagcagctttaagttttgatctaagacaagctagaactgtccactgctaaccaacctcctgtagaatgaagtcacaccattgccgactctgcaccattcctccttcccaggcagttcgcctgaatatggcaacctgactttgggccccttgcacctcttctctcactccaggaacactgagactaagatctacaccaacctgcttccacttt

SEQ ID NO: 278181 - DNA, 3415 bp, Homo sapiens
agcggcagttctcactgagacctgtcaccccgactcaacgtgagacgcaccgcccggactcaccatgcgtgaatgcatctcagtccacgtggggcaggcaggtgtccagatgggcaatgcctgctgggagctctattgcttggaacatgggattcagcctgatgggcagatgcccagtgacaagaccattggtggaggggacgactccttcaccaccttcttctgtgaaactggtgctggaaaacacgtaccccgggcagtttttgtggatctggagcctacggtcattggtgagaggaagtggggacaaaattgaagggggtggagcatgactcaaagcttctccctggagagagagggtatttagaccaggcattcctagccctgaaaattcctagccgtacttgaagctgcagaaggcaagctgatctgagactggcctgggcagctggtctgggtttctctcacactctggtatctcaggctggcaggaggatgagtccttccatgcatctggccacagctaccaccctgggggaggaaggtccctgctgagcatagctttgtggtttttgcccttccagatgagatccgaaatggcccataccgacagctcttccacccagagcagctcatcactgggaaagaggatgctgccaacaactatgcccgtggtcactataccattggcaaggagatcattgacccagtgctggatcggatccgcaagctggtgagagtgtgtcttgggagggagggaacttttgagactgtgctaatggtcaggaatattttttttcagatcctttcaggaggtcatctctaactatacatggtctcgagtgtggtgctgctatggcatcctcagtatttgccctgactgctgatgtatcttacgctttatggagccaggtgatagagtccctcaggcccctcccctacctaaactgttctttctcgttcttgcctttcagtctgaccagtgcacaggacttcagggcttcctggtgttccacagctttggtgggggcactggctctggcttcacctcactcctgatggagcggctctctgttgactatggcaagaaatccaagctggaattctccatctacccagccccccaggtgtctacagccgtggtcgagccctacaactctatcctgaccacccacaccaccctggagcactcagactgtgccttcatggtggacaacgaagcaatctatgacatctgccgccgcaacctagacatcgagcgcccaacctacaccaacctcaatcgcctcattagccaaattgtctcctccatcacagcttctctgcgctttgacggggccctcaatgtggacctgacagagttccagaccaacctggtgccctaccctcgcatccacttccccctggccacctatgcaccagtcatctctgcagaaaaggcataccacgagcagctgtcggtggcagagatcaccaatgcctgctttgagcctgccaaccagatggtaaagtgtgatccccggcacggcaagtacatggcctgctgcctgctgtaccgtggagatgtggtgcccaaggatgtcaacgctgccattgccgccatcaagaccaagcgcagcattcagtttgtggactggtgccccacaggcttcaaggttggtatcaactaccagcctcccactgtggtgcctgggggtgacctggccaaggtgcagcgtgccgtgtgcatgctgagcaacacgaccgccatcgccgaggcctgggcccgcctggaccacaagttcgacctgatgtatgccaagagggcgtttgtgcactggtatgtgggtgagggcatggaggagggtgagttctccgaggcccgtgaggatatggctgccctggagaaggattatgaggaggtgggcatcgactcctatgaggacgaggatgagggagaagaataaagcagctgcctggagcctattcactatgtttattgcaaaatcctttcgaaataaacagtttccttgcacggtttcttgttccctctgagtgcttgagcttctgctgccttccccttcatgctgctgctgctctgtttgctgttcatgacccttatcccttccatcgctgaaggtgagacctgcaaaggggttcttgccaggcccaggaagcataaccccagggactttaaattgaagtcctagggttactcagtatagggaggaaatgaggaccaaaatccaggcacaaactgttgaaggatgagtcttcagctcctttccaagtaggagtataatccagtggtttctgtctttgaaagttagactgctaccctgttcttcctgctgcctctacatttaccaactctggaagcaaggcttggcccaggctcctctgtgcattatgagggtttgggagtggggctgggctggcccagagttcctgggcatggagccacgtcataagcttgggggatgggagggaacacaggcgatctcctagagttgtttgtgccactgcacctctgagcagctttgcatagcttcctgtcttgctgctttgctggagctggggctgtgccattaaaagtcaggtcatctcccctctgtttgtgatttctttctggcctcagcctctgtgctagctagtgggagactcctgctagggccctggggaaagcttcaactttgctaacaggagccccaggccccatgctgatgtcatactgtggggtagacatggttcgggggaggaggcttggatcacaaaagagcaggagatgccaaccctgcccttgcctttcctccctggtgattcagggaacagagcccttccctagggaacaggtttgaagcccagctaagacagggcccctgtttactcagcagagtaggcaggaagtggcagctggatactgccacaccacactgcctcattaatcattaaccatgtatgagcttgaacgatcagggagacacaggccaaaacagctgccgctgccacctccactcccctcgcccctaggctgaggatgggagacctgtaatctacctgtctcaaagcttcctcaggtgtctccacccagaggcccttgcctagcaaaccggctaggcagctttgactaagctactcaccccaggagtgaaggaaggaaagaactagttgagtgtttttagggggccctagttcttgacacaggcagatgccagcttgagcccaagcagctttaagttttgatctaagacaagctagaactgtccactgctaaccaacctcctgtagaatgaagtcacaccattgccgactctgcaccattcctccttcccaggcagttcgcctgaatatggcaacctgactttgggccccttgcacctcttctctcactccaggaacactgagactaagatctacaccaacctgcttccacttt

SEQ ID NO: 278182 - DNA, 964 bp, Homo sapiens
  misc_feature (17)..(17): n is a, c, g, or t
  misc_feature (19)..(19): n is a, c, g, or t
  misc_feature (21)..(21): n is a, c, g, or t
  misc_feature (24)..(24): n is a, c, g, or t
  misc_feature (29)..(29): n is a, c, g, or t
  misc_feature (32)..(32): n is a, c, g, or t
  misc_feature (874)..(874): n is a, c, g, or t
  misc_feature (876)..(876): n is a, c, g, or t
  misc_feature (878)..(880): n is a, c, g, or t
  misc_feature (885)..(885): n is a, c, g, or t
  misc_feature (892)..(892): n is a, c, g, or t
  misc_feature (896)..(897): n is a, c, g, or t
  misc_feature (900)..(900): n is a, c, g, or t
  misc_feature (908)..(909): n is a, c, g, or t
  misc_feature (914)..(915): n is a, c, g, or t
aagtaggctagtagagncngntgntaatnggncgaggccgactcaacgtgagacgcaccgcccggactcaccatgcgtgaatgcatctcagtccacgtggggcaggcaggtgtccagatgggcaatgcctgctgggagctctattgcttggaacatgggattcagcctgatgggcagatgcccagtgacaagaccattggtggaggggacgactccttcaccaccttcttctgtgaaactggtgctggaaaacacgtaccccgggcagtttttgtggatctggagcctacggtcattgatgagatccgaaatggcccataccgacagctcttccacccagagcagctcatcactgggaaagaggatgctgccaacaactatgcccgtggtcactataccattggcaaggagatcattgacccagtgctggatcggatccgcaagctgtctgaccagtgcacaggacttcagggcttcctggtgttccacagctttggtgggggcactggctctggcttcacctcactcctgatggagcggctctctgttgactatggcaagaaatccaagctggaattctccatctacccagccccccaggtgtctacagccgtggtcgagccctacaactctatcctgaccacccacaccaccctggagcactcagactgtgccttcatggtggacaacgaagcaatctatgacatctgccgccgcaacctagacatcgagcgcccaacctacaccaacctcaatcgcctcattagccaaattgtctcctccatcacagcttctctgcgctttgacggggccctcaatgtggacctgacagagttccagaccaacctggtgccctaccctcttccctggcctntncnnnttttngaaggtncccnncgnggggggannccgcnnttggcccccagtgttgtgtcccggaatcgcctcgaatgtacgaaatccc

SEQ ID NO: 278183 - DNA, 2880 bp, Homo sapiens
agcggcagttctcactgagacctgtcaccccgactcaacgtgagacgcaccgcccggactcaccatgcgtgaatgcatctcagtccacgtggggcaggcaggtgtccagatgggcaatgcctgctgggagctctattgcttggaacatgggattcagcctgatgggcagatgcccagtgacaagaccattggtggaggggacgactccttcaccaccttcttctgtgaaactggtgctggaaaacacgtaccccgggcagtttttgtggatctggagcctacggtcattgatgagatccgaaatggcccataccgacagctcttccacccagagcagctcatcactgggaaagaggatgctgccaacaactatgcccgtggtcactataccattggcaaggagatcattgacccagtgctggatcggatccgcaagctgtctgaccagtgcacaggacttcagggcttcctggtgttccacagctttggtgggggcactggctctggcttcacctcactcctgatggagcggctctctgttgactatggcaagaaatccaagctggaattctccatctacccagccccccaggtgtctacagccgtggtcgagccctacaactctatcctgaccacccacaccaccctggagcactcagactgtgccttcatggtggacaacgaagcaatctatgacatctgccgccgcaacctagacatcgagcgcccaacctacaccaacctcaatcgcctcattagccaaattgtctcctccatcacagcttctctgcgctttgacggggccctcaatgtggacctgacagagttccagaccaacctggtgccctaccctcgcatccacttccccctggccacctatgcaccagtcatctctgcagaaaaggcataccacgagcagctgtcggtggcagagatcaccaatgcctgctttgagcctgccaaccagatggtaaagtgtgatccccggcacggcaagtacatggcctgctgcctgctgtaccgtggagatgtggtgcccaaggatgtcaacgctgccattgccgccatcaagaccaagcgcagcattcagtttgtggactggtgccccacaggcttcaaggttggtatcaactaccagcctcccactgtggtgcctgggggtgacctggccaaggtgcagcgtgccgtgtgcatgctgagcaacacgaccgccatcgccgaggcctgggcccgcctggaccacaagttcgacctgatgtatgccaagagggcgtttgtgcactggtatgtgggtgagggcatggaggagggtgagttctccgaggcccgtgaggatatggctgccctggagaaggattatgaggaggtgggcatcgactcctatgaggacgaggatgagggagaagaataaagcagctgcctggagcctattcactatgtttattgcaaaatcctttcgaaataaacagtttccttgcacggtttcttgttccctctgagtgcttgagcttctgctgccttccccttcatgctgctgctgctctgtttgctgttcatgacccttatcccttccatcgctgaaggtgagacctgcaaaggggttcttgccaggcccaggaagcataaccccagggactttaaattgaagtcctagggttactcagtatagggaggaaatgaggaccaaaatccaggcacaaactgttgaaggatgagtcttcagctcctttccaagtaggagtataatccagtggtttctgtctttgaaagttagactgctaccctgttcttcctgctgcctctacatttaccaactctggaagcaaggcttggcccaggctcctctgtgcattatgagggtttgggagtggggctgggctggcccagagttcctgggcatggagccacgtcataagcttgggggatgggagggaacacaggcgatctcctagagttgtttgtgccactgcacctctgagcagctttgcatagcttcctgtcttgctgctttgctggagctggggctgtgccattaaaagtcaggtcatctcccctctgtttgtgatttctttctggcctcagcctctgtgctagctagtgggagactcctgctagggccctggggaaagcttcaactttgctaacaggagccccaggccccatgctgatgtcatactgtggggtagacatggttcgggggaggaggcttggatcacaaaagagcaggagatgccaaccctgcccttgcctttcctccctggtgattcagggaacagagcccttccctagggaacaggtttgaagcccagctaagacagggcccctgtttactcagcagagtaggcaggaagtggcagctggatactgccacaccacactgcctcattaatcattaaccatgtatgagcttgaacgatcagggagacacaggccaaaacagctgccgctgccacctccactcccctcgcccctaggctgaggatgggagacctgtaatctacctgtctcaaagcttcctcaggtgtctccacccagaggcccttgcctagcaaaccggctaggcagctttgactaagctactcaccccaggagtgaaggaaggaaagaactagttgagtgtttttagggggccctagttcttgacacaggcagatgccagcttgagcccaagcagctttaagttttgatctaagacaagctagaactgtccactgctaaccaacctcctgtagaatgaagtcacaccattgccgactctgcaccattcctccttcccaggcagttcgcctgaatatggcaacctgactttgggccccttgcacctcttctctcactccaggaacactgagactaagatctacaccaacctgcttccacttt

SEQ ID NO: 278184 - DNA, 2876 bp, Homo sapiens
  misc_feature (16)..(16): n is a, c, g, or t
gctggggtgaatcggncgagggtacccgactcaacgtgagacgcaccgcccggactcaccatgcgtgaatgcatctcagtccacgtggggcaggcaggtgtccagatgggcaatgcctgctgggagctctattgcttggaacatgggattcagcctgatgggcagatgcccagtgacaagaccattggtggaggggacgactccttcaccaccttcttctgtgaaactggtgctggaaaacacgtaccccgggcagtttttgtggatctggagcctacggtcattgatgagatccgaaatggcccataccgacagctcttccacccagagcagctcatcactgggaaagaggatgctgccaacaactatgcccgtggtcactataccattggcaaggagatcattgacccagtgctggatcggatccgcaagctgtctgaccagtgcacaggacttcagggcttcctggtgttccacagctttggtgggggcactggctctggcttcacctcactcctgatggagcggctctctgttgactatggcaagaaatccaagctggaattctccatctacccagccccccaggtgtctacagccgtggtcgagccctacaactctatcctgaccacccacaccaccctggagcactcagactgtgccttcatggtggacaacgaagcaatctatgacatctgccgccgcaacctagacatcgagcgcccaacctacaccaacctcaatcgcctcattagccaaattgtctcctccatcacagcttctctgcgctttgacggggccctcaatgtggacctgacagagttccagaccaacctggtgccctaccctcgcatccacttccccctggccacctatgcaccagtcatctctgcagaaaaggcataccacgagcagctgtcggtggcagagatcaccaatgcctgctttgagcctgccaaccagatggtaaagtgtgatccccggcacggcaagtacatggcctgctgcctgctgtaccgtggagatgtggtgcccaaggatgtcaacgctgccattgccgccatcaagaccaagcgcagcattcagtttgtggactggtgccccacaggcttcaaggttggtatcaactaccagcctcccactgtggtgcctgggggtgacctggccaaggtgcagcgtgccgtgtgcatgctgagcaacacgaccgccatcgccgaggcctgggcccgcctggaccacaagttcgacctgatgtatgccaagagggcgtttgtgcactggtatgtgggtgagggcatggaggagggtgagttctccgaggcccgtgaggatatggctgccctggagaaggattatgaggaggtgggcatcgactcctatgaggacgaggatgagggagaagaataaagcagctgcctggagcctattcactatgtttattgcaaaatcctttcgaaataaacagtttccttgcacggtttcttgttccctctgagtgcttgagcttctgctgccttccccttcatgctgctgctgctctgtttgctgttcatgacccttatcccttccatcgctgaaggtgagacctgcaaaggggttcttgccaggcccaggaagcataaccccagggactttaaattgaagtcctagggttactcagtatagggaggaaatgaggaccaaaatccaggcacaaactgttgaaggatgagtcttcagctcctttccaagtaggagtataatccagtggtttctgtctttgaaagttagactgctaccctgttcttcctgctgcctctacatttaccaactctggaagcaaggcttggcccaggctcctctgtgcattatgagggtttgggagtggggctgggctggcccagagttcctgggcatggagccacgtcataagcttgggggatgggagggaacacaggcgatctcctagagttgtttgtgccactgcacctctgagcagctttgcatagcttcctgtcttgctgctttgctggagctggggctgtgccattaaaagtcaggtcatctcccctctgtttgtgatttctttctggcctcagcctctgtgctagctagtgggagactcctgctagggccctggggaaagcttcaactttgctaacaggagccccaggccccatgctgatgtcatactgtggggtagacatggttcgggggaggaggcttggatcacaaaagagcaggagatgccaaccctgcccttgcctttcctccctggtgattcagggaacagagcccttccctagggaacaggtttgaagcccagctaagacagggcccctgtttactcagcagagtaggcaggaagtggcagctggatactgccacaccacactgcctcattaatcattaaccatgtatgagcttgaacgatcagggagacacaggccaaaacagctgccgctgccacctccactcccctcgcccctaggctgaggatgggagacctgtaatctacctgtctcaaagcttcctcaggtgtctccacccagaggcccttgcctagcaaaccggctaggcagctttgactaagctactcaccccaggagtgaaggaaggaaagaactagttgagtgtttttagggggccctagttcttgacacaggcagatgccagcttgagcccaagcagctttaagttttgatctaagacaagctagaactgtccactgctaaccaacctcctgtagaatgaagtcacaccattgccgactctgcaccattcctccttcccaggcagttcgcctgaatatggcaacctgactttgggccccttgcacctcttctctcactccaggaacactgagactaagatctacaccaacctgcttccacttt

SEQ ID NO: 278185 - DNA, 532 bp, Homo sapiens
cgtccccaccctccccgagactcaattccgtggggagtcgggccctcgacactgtgctgacccccggccacccacctccatcttggccgcggtggtccctagccctcgcctccgcagagcgctctggggccccggcggcccccactccaagcagcgtccccccacgggctgctgcgcccgctacctggccccggcgctggctgggtcgcggtgacagccgcgcgcccccgcagcccgcggctcccacgcgcgcgccgccccacaggtggccctcgccccggcccacccgcgcctcccaggcccagcctcacctgctgccgagagaggacagtgatcccccaaaagccggaggtggaggaggaggaggaagaggaggaaggagctggaggagccggggactcgcccgctgaagatgctcttgtcaagacaatgaatgagaagcagccgtgcgcccgcctccggggtggccgcgccccttggggcggagctcttccaggcccgccctgcgctcccgggcccccgctgcggccgc

SEQ ID NO: 278186 - DNA, 529 bp, Homo sapiens
gcctctgcaacagagcctggcgtggtgttgccccactgcatgtttgttgactgactggctgatggatgcagagcccgtccttcctaatggttcagactcaggcgtcatcagcccagatggctccgagggaagggagaggccactccgactgctctgaggtccagggaaggggcctgtgctgccgcttggagggtgccatgcccagagcctctgcccctagcctcagcctcgcctactcactgggggctccagcacccccggccaccccaggactcccgaagaggctgctaggtcggcctgcccaaagagcggtgaggagcgtatgtgaagagccccagtcttgaggagcagcctgtatctggagagaggggagccccggaccagaggtgggggacaggaagccatcgccccaccctgcctcctcccccaccacaggtaccaggcccggaaaccacggaaaggggaacttggtcttttcttgttttgctctcaaccccttcctgtctccaagcccagggcagctgccccg

SEQ ID NO: 278187 - DNA, 327 bp, Homo sapiens
cacccccatgtaaactgcacacaggaagggagaggccactccgactgctctgaggtccaggtggccctcgccccggcccacccgcgcctcccaggcccagcctcacctgctgccgagagaggacagtgatcccccaaaagccggaggtggaggaggaggaggaagaggaggaaggagctggaggagccggggactcgcccgctgaagatgctcttgtcaagacaatgaatgagaagcagccgtgcgcccgcctccggggtggccgcgccccttggggcggagctcttccaggcccgccctgcgctcccgggcccccgctgcggccgc

SEQ ID NO: 278188 - DNA, 702 bp, Homo sapiens
gcctctgcaacagagcctggcgtggtgttgccccactgcatgtttgttgactgactggctgatggatgcagagcccgtccttcctaatggttcagactcaggcgtcatcagcccagatggctccgagggaagggagaggccactccgactgctctgaggtccagggaaggggcctgtgctgccgcttggagggtgccatgcccagagcctctgcccctagcctcagcctcgcctactcactgggggctccagcacccccggccaccccaggactcccgaagaggctgctaggtcggcctgcccaaagagcggtgaggagcgtatgtgaagagccccagtcttgaggagcagcctgtatctggagagaggggagccccggaccagaggtgggggacaggaagccatcgccccaccctgcctcctcccccaccacaggtggccctcgccccggcccacccgcgcctcccaggcccagcctcacctgctgccgagagaggacagtgatcccccaaaagccggaggtggaggaggaggaggaagaggaggaaggagctggaggagccggggactcgcccgctgaagatgctcttgtcaagacaatgaatgagaagcagccgtgcgcccgcctccggggtggccgcgccccttggggcggagctcttccaggcccgccctgcgctcccgggcccccgctgcggccgc

SEQ ID NO: 278189 - DNA, 361 bp, Homo sapiens
gcctctgcaacagagcctggcgtggtgttgccccactgcatgtttgttgactgactggctgatggatgcagagcccgtccttcctaatggttcagactcaggcgtcatcagcccagatggctccgagggaagggagaggccactccgactgctctgaggtccagggaaggggcctgtgctgccgcttggagggtgccatgcccagagcctctgcccctagcctcagcctcgcccgctgaagatgctcttgtcaagacaatgaatgagaagcagccgtgcgcccgcctccggggtggccgcgccccttggggcggagctcttccaggcccgccctgcgctcccgggcccccgctgcggccgc

SEQ ID NO: 278190 - DNA, 969 bp, Homo sapiens
tactagctggttgatatggaaacatcctccacttatctctcaagaaaataaacacaaatcagccaaaagtaattggtaccaaattactgaaagtacagctattccaaggcccgaattctatttacaatgctagtagtgaaaaggtcttcttaattatcagcagacagcaagttttcaagtctttttccaaaatcacattaagacttaatgttatgctgttatttgttccatcgttcaaaagaaaaatgagatgacaatctttttgtaatagtatatcctcttcttccagtcaatacctgagtaccaagcaagcagcactcaaatattgggggcagtggaaaaatggaactaccatataagcaagattaaggatggtgacaacttcacgtgcttgctgaaaactccatacacagagatttaggtcctttaaagtacacaaacatttagtttggtcacaagttagatttaatcctgtgcgttttaatttttagatgtaaacaatggcaaataataatgaccaacatataagccagaaacagagcctcacacacagaaaacttggcaccaaaactcaagatttaaaataagaaaaaaaaaaaaaaagtccattaacatactcacgtgtggtgctagaaaatttaatacgatgcacagcagctgaaatgcgttatcttacagatgcaacctacattaacaagtaagttatataacaaaccattctagccacagacacttagtgtacttgcccttattattatgtacctgatgtccaaaaaagcacaacaatttaagactttgggcactttatgtagcagatatataaaaagcaaagcaggaattaagagcaaatgaatttaataatactgatataaggcagcttttaatctattcacaggaaaaggaaaaatttatattatctcctaaatattatagcatgtaatatgaagagttaataatctcgtccattct

SEQ ID NO: 278191 - DNA, 480 bp, Homo sapiens
tactagctggttgatatggaaacatcctccacttatctctcaagaaaataaacacaaatcagccaaaagtaattggtaccaaattactgaaagtacagctattccaaggcccgaattctatttacaatgctagtagtgaaaaggtcttcttaattatcagcagacagcaagttttcaagtctttttccaaaatcacattaagacttaatgttatgctgttatttgttccatcgttcaaaagaaaaatgagatgacaatctttttgtaatagtatatcctcttcttccagtcaatacctgagtaccaagcaagcagcactcaaatattgggggcagtggaaaaatggaactaccatataagcaagattaaggatggtgacaacttcacgtgcttgctgaaaactccatacacagagatttaggtcctttaaagtacacaaacatttagtttggtgttacattctgatgtggagcggccgca

SEQ ID NO: 278192 - DNA, 846 bp, Homo sapiens
ctcgggtgtcctcaccacaggtctgcgcctccggcctgcgggatcgaagggaaaggaatccgatccggggaggcaagcctgggagacgtcctttattcaggaataatggacaaataaaaattccatatattcagctgggtgcagtggctaacacctgtaatcccagtactttgggaggctgaggtgtgcagatcgcttgaggtcaggagtttgagaccagcctggccatcacgctgaatgaactgggatttcttggagaagtggtagagccaagctctggaaccggaaatacgcaaggtgaggctggaacacgttgtcaaatcagaaaacaagaggcttcgggcatgtgggcatgtccaaaggactaaagaaccaacctgaataagctccctctggccaaagatggacttaatgagcatcatcatggtaataattgtaatggattagggccaggtgcagtggctcatgcctgtaatcctagaactctgggaggcaaggcagaaggatcacttgagcccaggagtttgagaccaccctgggcaaaatagtgagacctcatctctacaaaaaccttaacaatttagctggcttgggccggctgtggtggctcaagtctgtaatcacagcgcttcgggaggccgaagcaggtggatcacctgaggtcaggagttggagaccagcctggccaaaatggtgaaatcccgtttttactaaaaatacaaaaatcagctgggcatggtggcggatgcctataatcccagctactcgggaggctgaggcaggagaatcgcatgaacctgggaggtggagtttgcagtgagccgagatcatgccactgcactccag

SEQ ID NO: 278193 - DNA, 648 bp, Homo sapiens
agtcagctggtgggaattaggcatttttgtgacttggagctccagagttgctgaggaggagcccaagacaatgggaggggagatgggaacagacacctagaggttacagtggcagggccatggaaaagacggctcctctgcctgacccacactggagccaccctttggccacttcttccctccaagaaaacttgggatctcgggccctcaggcctggacacaatcataggggctgactggctcagaggtccccaaagattgcgggggtacagtggggacaatcagcatctctgtgcctctcctgagtgagaactgagtagggggacatgaagggagagataaacaacttacccgcggtcacccagcagcctggggctggaactctgggtaaactgagacatcatccccggggcacgggtgggcagctgccccaggggacctgcctggactaatgagatattctgtgtctgtctgtccatccatccaggtgcaagttcttcagtctgactgagacaccagaggattacactatcattgtcgatgaggaaggattcctaggtaagtgcttctctccctaggggctcggctggaccatgccccgaagtcagggctggctacccacctccttatttctgtccccaacccacc

SEQ ID NO: 278194 - DNA, 1596 bp, Homo sapiens
cgaacacgagctgctccccgcgccggcacccgcgcgccgctgctccgccggcgctgcctccctcgacccgtggctccccctcgcaacttggcgggcctcctcccttttgtccggcccggtccggccgccgccgccccccgcgcctggcgccgagctcccgggtccccgggccggctgtcggtgccggcagggcgcggagggggcgggggccgcggctcgtcccccagcggatgagctgccgcggacggggcgcgggcggacgatggaactccacatcctggagcaccggctgcaagttgccagcgtcgccaaggagagtatcccgctgttcacctacgggcctgatcaaacttgccttcctgttctccaagaccaggtgcaagttcttcagtctgactgagacaccagaggattacactatcattgtcgatgaggaaggattcctagagctgccctcctcagagcacctgagtgtggcggatgccacctggctggccctgaacgtggtgtccggcggtggcagcttctccagctcccagcctattggcatgaccaagatcgccaagtcagtcatcgccccactggctgaccagaacatatccgtgttcatgctgtccacgtatcagacagacttcatcctggtgctcaagcgggacctgccctttgtcacccacacgttgtcatcagagttcaccatcctgtggtcagtggctagactgtagcagccgagaacctcggcatcaccagtggcttcgtgaagcccaagctggtccagatgccggtcatccacccactgtccagcccgagcaacaggttctgtgtcaccagcctggaccccgacacgctgcctgctgttgccacactcctcatggatgtcatgtcctacttcaatgggtgaggatacaactagaagccagcagtctacaggctggaagaaggccctcaccagaacccaacccttggacttcagcctccagaactgtgagaaatacatacctgctgtttgtcagacaccagtctatggaattctgttacagtagcctgaactcagacatagcccttttccatttataaggtggttttaccttatattttatgtaaaaggtccattttatttatttttgaattgttgatttttttttaagagacacgtgtttactatgttacccaggctggactccaactcctggactattgatcctcctgtctccacctcccgagttgctggaactacaggctaacagctctgttttaaagatgagaaaatgggccccacgcagtggctcacacctgtaatcccagcacttagggaggctgagccaggtggagccacttgaggtcaggtgttcgagattagcctggccaacatggcaaaaccccgtctctactaaaaatacaaaaaaaattagccgggcatgatggcgcgtgcctgtaatcccagctacttgggagtctgaggcaggagaattgcttgagcccaggaggcagaggttgcagtgagccgagactatgccactgcactccagcctaggtgacaaagagagactctacctcaaaaaataaaaataattaaaaaataaagatgagaaaatggag

SEQ ID NO: 278195 - DNA, 1254 bp, Homo sapiens
acttcgcaaataaaaaaaccagttcctttcccagcctcataagaacaaatatgggcacagcaggcccctatggcacctcctgggagggaagtcagtgtgggcaccaggatcaggcctgactgcagagcgcttcttggcctgctgactgagccccttaaatgactttgttttggaaaccagaaaacggattttttctgagatgttaggaaataatattttaacagaggccttgctctctagtctctggtttgaaggtatcattgtttggtttctccttctgagcacaagactcccctgttctgttctgttctgttctttttccttccctgcagagaagagaacagaagaataacagcagaagatacgcagcctgtaatggactgaatatctgtgtccccctaaacccacatattgaaatccttcccccagtgtgatgctgtttggaagtggggcctttgggaggtgattgggtcataggggtgcagccctcatggatggatgaatgcccttctaagcccaggccagagggctagcttgctgtttctcctccaggtgaggatacaactagaagccagcagtctacaggctggaagaaggccctcaccagaacccaacccttggacttcagcctccagaactgtgagaaatacatacctgctgtttgtcagacaccagtctatggaattctgttacagtagcctgaactcagacatagcccttttccatttataaggtggttttaccttatattttatgtaaaaggtccattttatttatttttgaattgttgatttttttttaagagacacgtgtttactatgttacccaggctggactccaactcctggactattgatcctcctgtctccacctcccgagttgctggaactacaggctaacagctctgttttaaagatgagaaaatgggccccacgcagtggctcacacctgtaatcccagcacttagggaggctgagccaggtggagccacttgaggtcaggtgttcgagattagcctggccaacatggcaaaaccccgtctctactaaaaatacaaaaaaaattagccgggcatgatggcgcgtgcctgtaatcccagctacttgggagtctgaggcaggagaattgcttgagcccaggaggcagaggttgcagtgagccgagactatgccactgcactccagcctaggtgacaaagagagactctacctcaaaaaataaaaataattaaaaaataaagatgagaaaatggag

SEQ ID NO: 278196 - DNA, 1784 bp, Homo sapiens
caatattataataatctttgttctacaattataacctaggaaaaaccaggccatacagagataggagctgaagggacatgctgagaagtgaccagaaggcaggagtgtgaaccctctgtcatgcccggacagggccactagagggctccctggtctagtggtaatgccagtgcctgggaaggcacccgttacttagcagaccttggtctagcagtggtgccagtgcctgggaagataactgttacttagcagaccgggaaagggagactccctttccctgggggagttagagaagacgctgctccaccacctcttgtggaaggcctgacatcagtcaggcccgcccacagccatccggaggcctaaccgtctccctgtgatgctgtgcttcagcagtcaccctcctgtttcactttcatgttccgctctgtacacctggctccaccttctagatggcagtagcagaattagtgaaagtattagtctttgatctttctgagaagagcatagaagtagtaatgatgtaagctgtcctctctctctccgcctcggctacctaaaaggaggagaaaaacccacagacctagtagggctggacatctacagtgccacccctgaaaagcactgctctgcatcacttaccaggctgggcaaaggcctccatgcctgctacctaagctggcctcagctcgtccagcctggcctgggcctggccagtgggaggtgctgctgagaagccagagccctgggctgtcctggacggccagcagggggcttgctggcatgaacccttcacagctgagcctgtcagggtgagggcgtgcacaaaaaagtatccacagatgttgtgcagcagaaataaagaaacattctaaccttttaagacaaaaagacagtatcgcttcttggccttttggccaagatcaagtgtagataaaaacattgtaagtcatgattcccttggaatacgatcagtattgtgagggaagagaggcaaacccccagcccatcaccacacactgcagctcacacacttcaggttttgtgctcccagacaatgcctgtcctcatgagagcactgttgtctgcgccgggaaatcatcctctgacctgttcacaagtcttctagatgaagattttcagcgggtttggatctatttaaaaagcggtaactgcaaagaggcacctaatccacttgatttgcctgtttttgagaggtactcctggcagttatgaaggtcattaaaagtatcagaataaattgaactttttttttttttgaaacggagtcttgctgggtcggctcactgcaacctccatctcccaaattcaagcgattctcctgtctcagcctcccgagtagctgggactacaggctcatgccaccacacccagctaattttgttgtatttttagtagagacggggtttcaccatgttggccaggatggtctcaatctcttgacctcgtgatctgcccgccttggcctcccaaagtgctgggattacaggcctgagccaccgcacccagccctaaactgaactttcaactgaacttcagaaaatgttgaaccatgattttaaaaaatgtttctcactttgctctaagcccttttttaagagcaaaaaggcattttgcagtgttaaccaatgaaatattttaaaacacttatttcgtcaactcatgttacattttaaatgtgtataatatagaagaattagtatatgtttatataacttacaattttttaaaaaactgatacaaatgtccaaaagttgggagtc

SEQ ID NO: 278197 - DNA, 1045 bp, Homo sapiens
  misc_feature (217)..(217): n is a, c, g, or t
cagcatattgctattgaaaaatagctattaggagaccttgcacaatttgtgaaacattgttaggctcattgtactgtgtaaaatcaggaaagaatttgggaacatactgatacaacaaaaagataggttgtcaaaccctcacttcaccagaaagctaaattaaccagataagtctttctgaaagttttagtgtcttagtttgttcctgcgctgtaanagaataccttagactgggtaacctataaataataggaatttatttctcacagttttggaggctggaccccgacacgctgcctgctgttgccacactcctcatggatgtcatgtcctacttcaatgggtgaggatacaactagaagccagcagtctacaggctggaagaaggccctcaccagaacccaacccttggacttcagcctccagaactgtgagaaatacatacctgctgtttgtcagacaccagtctatggaattctgttacagtagcctgaactcagacatagcccttttccatttataaggtggttttaccttatattttatgtaaaaggtccattttatttatttttgaattgttgatttttttttaagagacacgtgtttactatgttacccaggctggactccaactcctggactattgatcctcctgtctccacctcccgagttgctggaactacaggctaacagctctgttttaaagatgagaaaatgggccccacgcagtggctcacacctgtaatcccagcacttagggaggctgagccaggtggagccacttgaggtcaggtgttcgagattagcctggccaacatggcaaaaccccgtctctactaaaaatacaaaaaaaattagccgggcatgatggcgcgtgcctgtaatcccagctacttgggagtctgaggcaggagaattgcttgagcccaggaggcagaggttgcagtgagccgagactatgccactgcactccagcctaggtgacaaagagagactctacctcaaaaaataaaaataattaaaaaataaagatgagaaaatggag

SEQ ID NO: 278198 - DNA, 1397 bp, Homo sapiens
caatattataataatctttgttctacaattataacctaggaaaaaccaggccatacagagataggagctgaagggacatgctgagaagtgaccagaaggcaggagtgtgaaccctctgtcatgcccggacagggccactagagggctccctggtctagtggtaatgccagtgcctgggaaggcacccgttacttagcagaccttggtctagcagtggtgccagtgcctgggaagataactgttacttagcagaccgggaaagggagactccctttccctgggggagttagagaagacgctgctccaccacctcttgtggaaggcctgacatcagtcaggcccgcccacagccatccggaggcctaaccgtctccctgtgatgctgtgcttcagcagtcaccctcctgtttcactttcatgttccgctctgtacacctggctccaccttctagatggcagtagcagaattagtgaaagtattagtctttgatctttctgagaagagcatagaagtagtaatgatgtaagctgtcctctctctctccgcctcggctacctaaaaggaggagaaaaacccacagacctagtagggctggacatctacagtgccacccctgaaaagcactgctctgcatcacttaccaggctgggcaaaggcctccatgcctgctacctaagctggcctcagctcgtccagcctggcctgggcctggccagtgggaggtgctgctgagaagccagagccctgggctgtcctggacggccagcagggggcttgctggcatgaacccttcacagctgagcctgtcagggtgagggcgtgcacaaaaaagtatccacagatgttgtgcagcagaaataaagaaacattctaaccttttaagacaaaaagacagtatcgcttcttggccttttggccaagatcaagtgtagataaaaacattgtaagtcatgattcccttggaatacgatcagtattgtgagggaagagaggcaaacccccagcccatcaccacacactgcagctcacacacttcaggttttgtgctcccagacaatgcctgtcctcatgagagcactgttgtctgcgccgggaaatcatcctctgacctgttcacaagtcttctagatgaagattttcagcgggtttggatctatttaaaaagcggtaactgcaaagaggcacctaatccacttgatttgcctgtttttgagaggtactcctggcagttatgaaggtcattaaaagtatcagaataaattgaactttttttttttttgaaacggagtcgttgcagtgagccgagactatgccactgcactccagcctaggtgacaaagagagactctacctcaaaaaataaaaataattaaaaaataaagatgagaaaatggag

SEQ ID NO: 278199 - DNA, 1346 bp, Homo sapiens
caatattataataatctttgttctacaattataacctaggaaaaaccaggccatacagagataggagctgaagggacatgctgagaagtgaccagaaggcaggagtgtgaaccctctgtcatgcccggacagggccactagagggctccctggtctagtggtaatgccagtgcctgggaaggcacccgttacttagcagaccttggtctagcagtggtgccagtgcctgggaagataactgttacttagcagaccgggaaagggagactccctttccctgggggagttagagaagacgctgctccaccacctcttgtggaaggcctgacatcagtcaggcccgcccacagccatccggaggcctaaccgtctccctgtgatgctgtgcttcagcagtcaccctcctgtttcactttcatgttccgctctgtacacctggctccaccttctagatggcagtagcagaattagtgaaagtattagtctttgatctttctgagaagagcatagaagtagtaatgatgtaagctgtcctctctctctccgcctcggctacctaaaaggaggagaaaaacccacagacctagtagggctggacatctacagtgccacccctgaaaagcactgctctgcatcacttaccaggctgggcaaaggcctccatgcctgctacctaagctggcctcagctcgtccagcctggcctgggcctggccagtgggaggtgctgctgagaagccagagccctgggctgtcctggacggccagcagggggcttgctggcatgaacccttcacagctgagcctgtcagggtgagggcgtgcacaaaaaagtatccacagatgttgtgcagcagaaataaagaaacattctaaccttttaagacaaaaagacagtatcgcttcttggccttttggccaagatcaagtgtagataaaaacattgtaagtcatgattcccttggaatacgatcagtattgtgagggaagagaggcaaacccccagcccatcaccacacactgcagctcacacacttcaggttttgtgctcccagacaatgcctgtcctcatgagagcactgttgtctgcgccgggaaatcatcctctgacctgttcacaagtcttctagatgaagattttcagcgggtttggatctatttaaaaagcggtaactgcaaagaggcacctaatccacttgatttgcctgtttttgagaggtactcctggcagttatgaaggtcattaaaagtatcagaataaattgaactttttttttttttgaaacggagtctggcgggggccgggctcacgggacaacgggcgggggtaccggagctcggaatccg

SEQ ID NO: 278200 - DNA, 934 bp, Homo sapiens
cgaacacgagctgctccccgcgccggcacccgcgcgccgctgctccgccggcgctgcctccctcgacccgtggctccccctcgcaacttggcgggcctcctcccttttgtccggcccggtccggccgccgccgccccccgcgcctggcgccgagctcccgggtccccgggccggctgtcggtgccggcagggcgcggagggggcgggggccgcggctcgtcccccagcggatgagctgccgcggacggggcgcgggcggacgatggaactccacatcctggagcaccggctgcaagttgccagcgtcgccaaggagagtatcccgctgttcacctacgggcctgatcaaacttgccttcctgttctccaagaccaggtgcaagttcttcagtctgactgagacaccagaggattacactatcattgtcgatgaggaaggattcctagagctgccctcctcagagcacctgagtgtggcggatgccacctggctggccctgaacgtggtgtccggcggtggcagcttctccagctcccagcctattggcatgaccaagatcgccaagtcagtcatcgccccactggctgaccagaacatatccgtgttcatgctgtccacgtatcagacagacttcatcctgcaaagtgctgggattacaggcctgagccaccgcacccagccctaaactgaactttcaactgaacttcagaaaatgttgaaccatgattttaaaaaatgtttctcactttgctctaagcccttttttaagagcaaaaaggcattttgcagtgttaaccaatgaaatattttaaaacacttatttcgtcaactcatgttacattttaaatgtgtataatatagaagaattagtatatgtttatataacttacaattttttaaaaaactgatacaaatgtccaaaagttgggagtc

SEQ ID NO: 278201 - DNA, 247 bp, Homo sapiens
ccccactggctgaccagaacatatccgtgttcatgctgtccacgtatcagacagacttcatcctgtggtgagctgaccatcacagacacgccttgcacacttgggcccgcctctgacacactcactcccatctcccaccccttgcagccttgcccttccacgctattccagggtgggggcagagtctcagggtgagaggttggtgccccagggccaccaggcacacacagcctcaacttcttgcccc

SEQ ID NO: 278202 - DNA, 318 bp, Homo sapiens
tgagtctctcagggcctgcggctgagccctccccagccctcttcccaggccctgcactcaccagagctgctgctttcagtcccagcctcagtgcctgacatctttgtgctcttacagtccagatgccggtcatccacccactgtccagcccgagcaacaggttctgtgtcaccagcctggaccccgacacgctgcctgctgttgccacactcctcatggatgtcatgtcctacttcaatgggtagggctgccttgggcatgaggggtcgccggctggaccagggggaggcacggctctgcctaggagtcttagtctga

SEQ ID NO: 278203 - DNA, 834 bp, Homo sapiens
caatattataataatctttgttctacaattataacctaggaaaaaccaggccatacagagataggagctgaagggacatgctgagaagtgaccagaaggcaggagtgtgaaccctctgtcatgcccggacagggccactagagggctccctggtctagtggtaatgccagtgcctgggaaggcacccgttacttagcagaccttggtctagcagtggtgccagtgcctgggaagataactgttacttagcagaccgggaaagggagactccctttccctgggggagttagagaagacgctgctccaccacctcttgtggaaggcctgacatcagtcaggcccgcccacagccatccggaggcctaaccgtctccctgtgatgctgtgcttcagcagtcaccctcctgtttcactttcatgttccgctctgtacacctggctccaccttctagatggcagtagcagaattagtgaaagtattagtctttgatctttctgagaagagcatagaagtagtaatgatgtaagctgtcctctctctctccgcctcggctacctaaaaggtaaagacccctgtctggtggacacgtgactcatgtgaccttatctatcgatagagatgactcgcactccttaccctgccccctttgccttgaatacagctctcatctccgaccgggaggagaagacccacaggactagtagggtgggattcacagggcaccctgaaaggatgggcggatccttccaggcgggaaagcgcaagcgggacggtgtcaagcgcaacggctggcggcagggggcgtggcaccgggggcgagacaggggcggtgc

SEQ ID NO: 278204 - DNA, 506 bp, Homo sapiens
tactaaaacctctcttttatttctcagacctccaggtgaaggtacaagacattacaatgcagtggtaccagcagctgcaggatgcttccatgcagtgtgtgttgacctttgagggcctgaccaacagcaaggacagtcaggtaggggagaggtatatggcagtaattttgtggacttgatggttctcagagaatgatcacttcgtgtcccaaaggaatgtagctggcatgtcactttacctgattctaagtgacatctactcagctcttcagaacactgctttctcactgttctcttctggcaggccaaaaagataaagatggacctccagaaggctgctaccatcccagtgagccaaatctctaccattgcaggttggtcagaggggttgagaacatgacctttcatttcattgtattatctttcagactccaaatctatgtatctgtaaggttcctataaaagtatattcaaacaaatgtttacagttggatcgggtacatata

SEQ ID NO: 278205 - DNA, 3369 bp, Homo sapiens
aggcgttaggggcggggctgtgctgcgcgcgcgtcccggaagcagaagcctgtgtggccttcccggcggctgattcgagggcttgtttggtcagaaggggggcgtcagagaagctgccccttagccaaccatgccgtctgagggtcgctgctgggagaccttgaaggccctacgcagttccgacaaaggtcgcctttgctactaccgcgactggctgctgcggcgcgaggatgttttagaagaatgtatgtctcttcccaagctatcttcttattctggatgggtggtagagcacgtcctaccccatatgcaggagaaccaacctctgtctgagacttcgccatcctctacgtcagcttcagccctagatcaaccctcatttgttcccaaatctcctgacgcaagctctgccttttccccagcctcccctgcaacaccaaatggaaccaagggcaaagatgagtcccagcacacagaatctatggtacttcagtcctcacgggggatcaaagtggaaggctgcgtccgaatgtacgaactggtacacagaatgaaaggaacagagggcctgaggctatggcaggaggagcaggagaggaaggtgcaagccctctcggagatggcatctgaacaactgaagcggtttgatgaatggaaggaactgaagcagcataaagaattccaggacttgcgggaagtaatggagaagagctccagagaagccttgggacaccaagagaagctaaaagctgagcaccgtcacagagcaaagattctcaacctgaagctgcgggaagcagagcagcagcgcgtgaagcaagcagaacaggagcggcttcggaaggaagaaggccagatccgcctgcgggccctctatgctctgcaggaggagatgctgcagctcagccagcagctggatgcctctgagcagcacaaagccctgcttaaggtcgacctggctgccttccagacccgaggcaaccagctgtgcagcctcatctcagggatcatccgggcctcttcagagagcagctatcccacagcagagagtcaagctgaggctgagcgagctctgcgggaaatgcgggacctcctgatgaacttggggcaggagatcaccagagcctgcgaagacaagaggaggcaggatgaagaagaggcccaggtaaagctgcaagaggcacagatgcagcagggaccagaggcccacaaagagcccccagctcccagccagggcccaggagggaaacagaatgaagacctccaggtgaaggtacaagacattacaatgcagtggtaccagcagctgcaggatgcttccatgcagtgtgtgttgacctttgagggcctgaccaacagcaaggacagtcaggccaaaaagataaagatggacctccagaaggctgctaccatcccagtgagccaaatctctaccattgcaggctcaaaactgaaggagatctttgacaagatccacagcctgctctctggaaaacctgttcaatctggtgggcgctctgtgtctgtcacacttaacccacaggggctggactttgttcaatacaaactggcagagaaatttgtgaaacaaggcgaggaggaagtggcctctcaccatgaagcagcattccccattgcagttgtggcatccgggatctgggagctccaccccagagtgggggacctcattcttgctcatctacataagaagtgtccttactctgttcctttctatcccactttcaaggagggaatggctttggaagactatcagaggatgcttggttaccaagtaaaggattccaaagtggagcagcaagacaactttctaaaacgcatgtcagggatgatccgtctctacgctgctatcatccagctccggtggccatatggaaaccgacaggagattcaccctcatggcttaaatcatggatggcgctggttggcacagatcttaaacatggagcccttgtcagatgtgacagccaccctcctctttgacttcctggaggtgtgtgggaatgccctcatgaagcaataccaggttcagttctggaagatgctaattctcatcaaagaggactactttcccagaattgaagctatcacaagctcaggacagatgggctccttcatacgcctcaagcagttcttggagaaatgtttgcaacacaaggacattcctgtccccaagggctttctgacttcctccttctggcgctcctgatgtcactccatcacccaccatcaccgctgctgcaaagaggcaataataaaggaactgaagacagctgtatttgggagaagtcatgtcagattcagaaatttgccattatgtatttttatgtatttatgccttgtgactaggagaggagattttcatgggtcacaaaattcttggaggtcccttagtagatttggtagttccttaagagatccacgtgataaaataaatggagttggcctttcttgttttttgcaaaagtgataaaaggtctttagcacttggtctcctcccttgtctctagtgtctttcagaaagttggcaataccttaacaaatgcactctgagctggagggagcccaccatttgcacccacctacccaccctcacccctgttcagatgaatttccagaaagagctaaggctcataaggttcccttttaagtattatttaatagttgaggccagatacttacatgcaagtctgggttatggttgttttgcctttctcagcttgtgaagtcattctaaagctagaggaagtatgtgatatacacatggactaaggctcaggtgacactatggctagattaacatctgggattaggactggaaacacatgtcattttgaactaagggaaactctttgtcatcctaatttggaatttggtccctggatggctagggatccatgaaccaggcaggtaccttttttgtttttgttttgttttgtttcttttctgtttgaattaagatgggctaagatggggcttgcaacattaaacatgagctgagcatccataagcattgaattgggattaaataaagatgttgggcaggaactgaacactgctaatatgatgataaatatgcctgactaaagccactacagaaatccagagattggctgttaaaatttgttttgtggaaagactaattctctttgatactgcagaggcagtggccatggatctgttcctctgtgctaaatgtcttgtggcagggtgtgtttgtgggggagtgttcactggtactcttgagtggcctgaagtgacccattctatgaattgttaattaaggtgccaaaaaaaattaataataaagcttggttttttgaaaaacccattgctgataaaaaaaaacaa

SEQ ID NO: 278206 - DNA, 2301 bp, Homo sapiens
tactaaaacctctcttttatttctcagacctccaggtgaaggtacaagacattacaatgcagtggtaccagcagctgcaggatgcttccatgcagtgtgtgttgacctttgagggcctgaccaacagcaaggacagtcaggtaggggagaggtatatggcagtaattttgtggacttgatggttctcagagaatgatcacttcgtgtcccaaaggaatgtagctggcatgtcactttacctgattctaagtgacatctactcagctcttcagaacactgctttctcactgttctcttctggcaggccaaaaagataaagatggacctccagaaggctgctaccatcccagtgagccaaatctctaccattgcaggctcaaaactgaaggagatctttgacaagatccacagcctgctctctggaaaacctgttcaatctggtgggcgctctgtgtctgtcacacttaacccacaggggctggactttgttcaatacaaactggcagagaaatttgtgaaacaaggcgaggaggaagtggcctctcaccatgaagcagcattccccattgcagttgtggcatccgggatctgggagctccaccccagagtgggggacctcattcttgctcatctacataagaagtgtccttactctgttcctttctatcccactttcaaggagggaatggctttggaagactatcagaggatgcttggttaccaagtaaaggattccaaagtggagcagcaagacaactttctaaaacgcatgtcagggatgatccgtctctacgctgctatcatccagctccggtggccatatggaaaccgacaggagattcaccctcatggcttaaatcatggatggcgctggttggcacagatcttaaacatggagcccttgtcagatgtgacagccaccctcctctttgacttcctggaggtgtgtgggaatgccctcatgaagcaataccaggttcagttctggaagatgctaattctcatcaaagaggactactttcccagaattgaagctatcacaagctcaggacagatgggctccttcatacgcctcaagcagttcttggagaaatgtttgcaacacaaggacattcctgtccccaagggctttctgacttcctccttctggcgctcctgatgtcactccatcacccaccatcaccgctgctgcaaagaggcaataataaaggaactgaagacagctgtatttgggagaagtcatgtcagattcagaaatttgccattatgtatttttatgtatttatgccttgtgactaggagaggagattttcatgggtcacaaaattcttggaggtcccttagtagatttggtagttccttaagagatccacgtgataaaataaatggagttggcctttcttgttttttgcaaaagtgataaaaggtctttagcacttggtctcctcccttgtctctagtgtctttcagaaagttggcaataccttaacaaatgcactctgagctggagggagcccaccatttgcacccacctacccaccctcacccctgttcagatgaatttccagaaagagctaaggctcataaggttcccttttaagtattatttaatagttgaggccagatacttacatgcaagtctgggttatggttgttttgcctttctcagcttgtgaagtcattctaaagctagaggaagtatgtgatatacacatggactaaggctcaggtgacactatggctagattaacatctgggattaggactggaaacacatgtcattttgaactaagggaaactctttgtcatcctaatttggaatttggtccctggatggctagggatccatgaaccaggcaggtaccttttttgtttttgttttgttttgtttcttttctgtttgaattaagatgggctaagatggggcttgcaacattaaacatgagctgagcatccataagcattgaattgggattaaataaagatgttgggcaggaactgaacactgctaatatgatgataaatatgcctgactaaagccactacagaaatccagagattggctgttaaaatttgttttgtggaaagactaattctctttgatactgcagaggcagtggccatggatctgttcctctgtgctaaatgtcttgtggcagggtgtgtttgtgggggagtgttcactggtactcttgagtggcctgaagtgacccattctatgaattgttaattaaggtgccaaaaaaaattaataataaagcttggttttttgaaaaacccattgctgataaaaaaaaacaa

SEQ ID NO: 278207 - DNA, 2240 bp, Homo sapiens
aggcgttaggggcggggctgtgctgcgcgcgcgtcccggaagcagaagcctgtgtggccttcccggcggctgattcgagggcttgtttggtcagaaggggggcgtcagagaagctgccccttagccaaccatgccgtctgagggtcgctgctgggagaccttgaaggccctacgcagttccgacaaaggtcgcctttgctactaccgcgactggctgctgcggcgcgaggatgttttagaagaatgtatgtctcttcccaagctatcttcttattctggatgggtggtagagcacgtcctaccccatatgcaggagaaccaacctctgtctgagacttcgccatcctctacgtcagcttcagccctagatcaaccctcatttgttcccaaatctcctgacgcaagctctgccttttccccagcctcccctgcaacaccaaatggaaccaagggcaaagatgagtcccagcacacagaatctatggtacttcagtcctcacgggggatcaaagtggaaggctgcgtccgaatgtacgaactggtacacagaatgaaaggaacagagggcctgaggctatggcaggaggagcaggagaggaaggtgcaagccctctcggagatggcatctgaacaactgaagcggtttgatgaatggaaggaactgaagcagcataaagaattccaggacttgcgggaagtaatggagaagagctccagagaagccttgggacaccaagagaagctaaaagctgagcaccgtcacagagcaaagattctcaacctgaagctgcgggaagcagagcagcagcgcgtgaagcaagcagaacaggagcggcttcggaaggaagaaggccagatccgcctgcgggccctctatgctctgcaggaggagatgctgcagctcagccagcagctggatgcctctgagcagcacaaagccctgcttaaggtcgacctggctgccttccagacccgaggcaaccagctgtgcagcctcatctcagggatcatccgggcctcttcagagagcagctatcccacagcagagagtcaagctgaggctgagcgagctctgcgggaaatgcgggacctcctgatgaacttggggcaggagatcaccagagcctgcgaagacaagaggaggcaggatgaagaagaggcccaggtaaagctgcaagaggcacagatgcagcagggaccagaggcccacaaagagcccccagctcccagccagggcccaggagggaaacagaatgaagacctccaggtgaaggtacaagacattacaatgcagtggtaccagcagctgcaggatgcttccatgcagtgtgtgttgacctttgagggcctgaccaacagcaaggacagtcaggccaaaaagataaagatggacctccagaaggctgctaccatcccagtgagccaaatctctaccattgcaggctcaaaactgaaggagatctttgacaagatccacagcctgctctctggaaaacctgttcaatctggtgggcgctctgtgtctgtcacacttaacccacaggggctggactttgttcaatacaaactggcagagaaatttgtgaaacaaggcgaggaggaagtggcctctcaccatgaagcagcattccccattgcagttgtggcatccgggatctgggagctccaccccagagtgggggacctcattcttgctcatctacataagaagtgtccttactctgttcctttctatcccactttcaaggagggaatggctttggaagactatcagaggatgcttggttaccaagtaaaggattccaaagtggagcagcaagacaactttctaaaacgcatgtcagggatgatccgtctctacgctgctatcatccagctccggtggccatatggaaaccgacaggagattcaccctcatggcttaaatcatggatggcgctggttggcacagatcttaaacatggagcccttgtcagatgtgacagccaccctcctctttgacttcctggaggtgtgtgggaatgccctcatgaagcaataccaggttcagttctggaagatgctaattctcatcaaagaggactactttcccaggtatcaggcttgttgagcagacagcaggggattaagtaactcataaccaggcctcagatacccaagggtgctattacctgctggttttgattcaagttttgttcatatctattatagtttttttcttttttttttttttttttttt

SEQ ID NO: 278208 - DNA, 1262 bp, Homo sapiens
aggcgttaggggcggggctgtgctgcgcgcgcgtcccggaagcagaagcctgtgtggccttcccggcggctgattcgagggcttgtttggtcagaaggggggcgtcagagaagctgccccttagccaaccatgccgtctgagggtcgctgctgggagaccttgaaggccctacgcagttccgacaaaggtcgcctttgctactaccgcgactggctgctgcggcgcgaggatgttttagaagaatgtatgtctcttcccaagctatcttcttattctggatgggtggtagagcacgtcctaccccatatgcaggagaaccaacctctgtctgagacttcgccatcctctacgtcagcttcagccctagatcaaccctcatttgttcccaaatctcctgacgcaagctctgccttttccccagcctcccctgcaacaccaaatggaaccaagggcaaagatgagtcccagcacacagaatctatggtacttcagtcctcacgggggatcaaagtggaaggctgcgtccgaatgtacgaactggtacacagaatgaaaggaacagagggcctgaggctatggcaggaggagcaggagaggaaggtgcaagccctctcggagatggcatctgaacaactgaagcggtttgatgaatggaaggaactgaagcagcataaagaattccaggacttgcgggaagtaatggagaagagctccagagaagccttgggacaccaagagaagctaaaagctgagcaccgtcacagagcaaagcagcgcgtgaagcaagcagaacaggagcggcttcggaaggaagaaggccagatccgcctgcgggccctctatgctctgcaggaggagatgctgcagctcagccagcagctggatgcctctgagcagcacaaagccctgcttaaggtcgacctggctgccttccagacccgaggcaaccagctgtgcagcctcatctcagggatcatccgggcctcttcagagagcagctatcccacagcagagagtcaagctgaggctgagcgagctctgcgggaaatgcgggacctcctgatgaacttggggcaggagatcaccagagcctgcgaagacaagaggaggcaggatgaagaagaggcccaggtaaagctgcaagaggcacagatgcagcagggaccagaggcccacaaagagcccccagctcccagccagggcccaggagggaaacagaatgaagactccagtgaacgtccagacttccatgcgtggtaca

SEQ ID NO: 278209 - DNA, 2199 bp, Homo sapiens
aggcgttaggggcggggctgtgctgcgcgcgcgtcccggaagcagaagcctgtgtggccttcccggcggctgattcgagggcttgtttggtcagaaggggggcgtcagagaagctgccccttagccaaccatgccgtctgagggtcgctgctgggagaccttgaaggccctacgcagttccgacaaaggtcgcctttgctactaccgcgactggctgctgcggcgcgaggtgagcggtggccccggaggacgtaggcctttccggcccctcgcgaccgaaaccttctccctagccgttggcacgttctgctcccgggaacccgtgcagtctaacaacctgcatttatttcttgacttctgtgtgtacatccctctgtcctggggtttctgtcctcttcagcctattttagcgtttcggggagctcccctgacttcacaggtgccccgcgctctgaaggcttcattgctaccctccgccagttgggcgccttctccgttctgctgttgtcaaagcaatctcggccccaggttcagttaacttactgtatgtctcatgtgctgggagctctagagtttgcgacgaacgattgacacgacctaatccattgctactagtgaaatgaccaaatttttagattgatttggcagacctggaaagtgaatgggggcgtggtcaccgtacctagcatttgcaaagctctgcgcgagaagtggagggatgtggagagttaaggccgagctcccattcccgagtcgctgctagttagctacagataaggcgttgtcctgcatcctcagacttcttgggaaacaatcctaaagtatttccctgtcttttatgttgttgacagttttgaaaaatacagaccttacattctgtaggttgactgccagcatatgtgctttcaaaccaccagaccaaggttaagcattcttggcaggaataccacagaaatgatgccatggctttctcagtaagtcacatgaggaggcacacagatgtcaacccatcccaacactggtgatgctaatcttgatcacctggttacgttattatctgcctggtctctccgtttaaaattcgtcatttttcccttagtaattgttgggaagtaataataccagtatccttttttctgggcaaaccttaatcctccatggctttagcattcattgatgttttccacatgaatcgatacctctatgacgttgccagatcctgtttctttatatccgctattccttctgcatttgttagttggcattctactgtaaggaggtgctttctattttattcagtgagttgtaatccattacttttattatttatttattttattttaaatgtcccagattttgtaagcttgtatcaaaataatcacatgcaaggctaggcgtggtggctcaggcccgtaatcccagcacgttgggaggccgagggggacggatcacttgaggtcaagagttcgcgaccagcctggccaacatggtgaaaccgcatctctactaaaaatacaaaattagccgagcatggtggtgcatgcctgtaatcccagctactcgggagactgaggcatgagaattgcttgaaccctggaagcagaggttgcagtgagccgagattgtgctgctgcactcaagcctgggtgacagagtgagactgtgtctcaaaaaaaaaaaatgtagccttgtaaatatgtacaacaattatgtattcataagaattaaaaagaaaaatgtcccagatttggctactgggcacctcattaagttggttcctgtgttcctgtgacatatttccatctttcattgacatttctttactttttgacacaataaagatgtcccaggtgcaagtttccctgtcttaatcctggaatcagctatttctccacaagaggctgactcttttgaagtggaggatggtgctgtattggcaaaccaagatctgggagttgagtgtgttgagattcttgattgggtaccattgcttctaggccttctcagtagacagagctaggaaataatacatatctaaatatcatgacttcatactgataaatgccacttccaacccagcacttcacttttctttctaatcttaccccatccatgtttgtaaatatgttacctagcagtgagaagtttggctcctgttattctcaatatgtttacttatttgctcaatcagtttacttt

SEQ ID NO: 278210 - DNA, 279 bp, Homo sapiens
aaaaaaaaaaggaaaagaaaaagagattgatctgtggttatatcttttaatttctctctatcatgctcaggctcaaaactgaaggagatctttgacaagatccacagcctgctctctggaaaacctgttcaatctggtgggcgctctgtgtctgtcacacttaacccacaggggctggactttgttcaatacaaactggcagagaaatttgtggtgagaaaccttgttgctagaggtatgggaagcagaggctggtgtacaagatttcagcctttttct

SEQ ID NO: 278211 - DNA, 2452 bp, Homo sapiens
aggcgttaggggcggggctgtgctgcgcgcgcgtcccggaagcagaagcctgtgtggccttcccggcggctgattcgagggcttgtttggtcagaaggggggcgtcagagaagctgccccttagccaaccatgccgtctgagggtcgctgctgggagaccttgaaggccctacgcagttccgacaaaggtcgcctttgctactaccgcgactggctgctgcggcgcgaggatgttttagaagaatgtatgtctcttcccaagctatcttcttattctggatgggtggtagagcacgtcctaccccatatgcaggagaaccaacctctgtctgagacttcgccatcctctacgtcagcttcagccctagatcaaccctcatttgttcccaaatctcctgacgcaagctctgccttttccccagcctcccctgcaacaccaaatggaaccaagggcaaagatgagtcccagcacacagaatctatggtacttcagtcctcacgggggatcaaagtggaaggctgcgtccgaatgtacgaactggtacacagaatgaaaggaacagagggcctgaggctatggcaggaggagcaggagaggaaggtgcaagccctctcggagatggcatctgaacaactgaagcggtttgatgaatggaaggaactgaagcagcataaagaattccaggacttgcgggaagtaatggagaagagctccagagaagccttgggacaccaagagaagctaaaagctgagcaccgtcacagagcaaagattctcaacctgaagctgcgggaagcagagcagcagcgcgtgaagcaagcagaacaggagcggcttcggaaggaagaaggccagatccgcctgcgggccctctatgctctgcaggaggagatgctgcagctcagccagcagctggatgcctctgagcagcacaaagccctgcttaaggtcgacctggctgccttccagacccgaggcaaccagctgtgcagcctcatctcagggatcatccgggcctcttcagagagcagctatcccacagcagagagtcaagctgaggctgagcgagctctgcgggaaatgcgggacctcctgatgaacttggggcaggagatcaccagagcctgcgaagacaagaggaggcaggatgaagaagaggcccaggtaaagctgcaagaggcacagatgcagcagggaccagaggcccacaaagagcccccagctcccagccagggcccaggagggaaacagaatgaagacctccaggtgaaggtacaagacattacaatgcagtggtaccagcagctgcaggatgcttccatgcagtgtgtgttgacctttgagggcctgaccaacagcaaggacagtcaggccaaaaagataaagatggacctccagaaggctgctaccatcccagtgagccaaatctctaccattgcaggctcaaaactgaaggagatctttgacaagatccacagcctgctctctggaaaacctgttcaatctggtgggcgctctgtgtctgtcacacttaacccacaggggctggactttgttcaatacaaactggcagagaaatttgtgaaacaaggcgaggaggaagtggcctctcaccatgaagcagcattccccattgcagttgtggcatccgggatctgggagctccaccccagagtgggggacctcattcttgctcatctacataagaagtgtccttactctgttcctttctatcccactttcaaggagggaatggctttggaagactatcagaggatgcttggttaccaagtaaaggattccaaagtggagcagcaagacaactttctaaaacgcatgtcagggatgatccgtctctacgctgctatcatccagctccggtggccatatggaaaccgacaggagattcaccctcatggcttaaatcatggatggcgctggttggcacagatcttaaacatggagcccttgtcagatgtgacagccaccctcctctttgacttcctggaggtgtgtgggaatgccctcatgaagcaataccaggttcagttctggaagatgctaattctcatcaaagaggactactttcccaggtatcaggcttgttgagcagacagcaggggattaagtaactcataaccaggcctcagatacccaagggtgctattacctgctggttttgattcaagttaaaaacacctgtactaagtatgacatctttcctactccagtccctctcgttgatatttgaataaatgcttttgaaccttaatgagagtctgtcttaaatatcattgcccaaacaaaaacacaaattaggggctgagcacagtggcttatgcctataattatgcctataattgcagctctttgggaggccacaggaggaggatcacttgagcccaggtgttcaaaaccagcctgggcaatatagcaagaccccatctctac

SEQ ID NO: 278212 - DNA, 3494 bp, Homo sapiens
aggcgttaggggcggggctgtgctgcgcgcgcgtcccggaagcagaagcctgtgtggccttcccggcggctgattcgagggcttgtttggtcagaaggggggcgtcagagaagctgccccttagccaaccatgccgtctgagggtcgctgctgggagaccttgaaggccctacgcagttccgacaaaggtcgcctttgctactaccgcgactggctgctgcggcgcgaggctggttgtggtgactcatgcccataatcccaacactttgcgaggctgaggcaggacgagtgcttgaggccagttcaagctgggagccaggcttggtgtctcacacctgcaatcccagcactttggatgttttagaagaatgtatgtctcttcccaagctatcttcttattctggatgggtggtagagcacgtcctaccccatatgcaggagaaccaacctctgtctgagacttcgccatcctctacgtcagcttcagccctagatcaaccctcatttgttcccaaatctcctgacgcaagctctgccttttccccagcctcccctgcaacaccaaatggaaccaagggcaaagatgagtcccagcacacagaatctatggtacttcagtcctcacgggggatcaaagtggaaggctgcgtccgaatgtacgaactggtacacagaatgaaaggaacagagggcctgaggctatggcaggaggagcaggagaggaaggtgcaagccctctcggagatggcatctgaacaactgaagcggtttgatgaatggaaggaactgaagcagcataaagaattccaggacttgcgggaagtaatggagaagagctccagagaagccttgggacaccaagagaagctaaaagctgagcaccgtcacagagcaaagattctcaacctgaagctgcgggaagcagagcagcagcgcgtgaagcaagcagaacaggagcggcttcggaaggaagaaggccagatccgcctgcgggccctctatgctctgcaggaggagatgctgcagctcagccagcagctggatgcctctgagcagcacaaagccctgcttaaggtcgacctggctgccttccagacccgaggcaaccagctgtgcagcctcatctcagggatcatccgggcctcttcagagagcagctatcccacagcagagagtcaagctgaggctgagcgagctctgcgggaaatgcgggacctcctgatgaacttggggcaggagatcaccagagcctgcgaagacaagaggaggcaggatgaagaagaggcccaggtaaagctgcaagaggcacagatgcagcagggaccagaggcccacaaagagcccccagctcccagccagggcccaggagggaaacagaatgaagacctccaggtgaaggtacaagacattacaatgcagtggtaccagcagctgcaggatgcttccatgcagtgtgtgttgacctttgagggcctgaccaacagcaaggacagtcaggccaaaaagataaagatggacctccagaaggctgctaccatcccagtgagccaaatctctaccattgcaggctcaaaactgaaggagatctttgacaagatccacagcctgctctctggaaaacctgttcaatctggtgggcgctctgtgtctgtcacacttaacccacaggggctggactttgttcaatacaaactggcagagaaatttgtgaaacaaggcgaggaggaagtggcctctcaccatgaagcagcattccccattgcagttgtggcatccgggatctgggagctccaccccagagtgggggacctcattcttgctcatctacataagaagtgtccttactctgttcctttctatcccactttcaaggagggaatggctttggaagactatcagaggatgcttggttaccaagtaaaggattccaaagtggagcagcaagacaactttctaaaacgcatgtcagggatgatccgtctctacgctgctatcatccagctccggtggccatatggaaaccgacaggagattcaccctcatggcttaaatcatggatggcgctggttggcacagatcttaaacatggagcccttgtcagatgtgacagccaccctcctctttgacttcctggaggtgtgtgggaatgccctcatgaagcaataccaggttcagttctggaagatgctaattctcatcaaagaggactactttcccagaattgaagctatcacaagctcaggacagatgggctccttcatacgcctcaagcagttcttggagaaatgtttgcaacacaaggacattcctgtccccaagggctttctgacttcctccttctggcgctcctgatgtcactccatcacccaccatcaccgctgctgcaaagaggcaataataaaggaactgaagacagctgtatttgggagaagtcatgtcagattcagaaatttgccattatgtatttttatgtatttatgccttgtgactaggagaggagattttcatgggtcacaaaattcttggaggtcccttagtagatttggtagttccttaagagatccacgtgataaaataaatggagttggcctttcttgttttttgcaaaagtgataaaaggtctttagcacttggtctcctcccttgtctctagtgtctttcagaaagttggcaataccttaacaaatgcactctgagctggagggagcccaccatttgcacccacctacccaccctcacccctgttcagatgaatttccagaaagagctaaggctcataaggttcccttttaagtattatttaatagttgaggccagatacttacatgcaagtctgggttatggttgttttgcctttctcagcttgtgaagtcattctaaagctagaggaagtatgtgatatacacatggactaaggctcaggtgacactatggctagattaacatctgggattaggactggaaacacatgtcattttgaactaagggaaactctttgtcatcctaatttggaatttggtccctggatggctagggatccatgaaccaggcaggtaccttttttgtttttgttttgttttgtttcttttctgtttgaattaagatgggctaagatggggcttgcaacattaaacatgagctgagcatccataagcattgaattgggattaaataaagatgttgggcaggaactgaacactgctaatatgatgataaatatgcctgactaaagccactacagaaatccagagattggctgttaaaatttgttttgtggaaagactaattctctttgatactgcagaggcagtggccatggatctgttcctctgtgctaaatgtcttgtggcagggtgtgtttgtgggggagtgttcactggtactcttgagtggcctgaagtgacccattctatgaattgttaattaaggtgccaaaaaaaattaataataaagcttggttttttgaaaaacccattgctgataaaaaaaaacaa

SEQ ID NO: 278213 - DNA, 2773 bp, Homo sapiens
aggcgttaggggcggggctgtgctgcgcgcgcgtcccggaagcagaagcctgtgtggccttcccggcggctgattcgagggcttgtttggtcagaaggggggcgtcagagaagctgccccttagccaaccatgccgtctgagggtcgctgctgggagaccttgaaggccctacgcagttccgacaaaggtcgcctttgctactaccgcgactggctgctgcggcgcgaggatgttttagaagaatgtatgtctcttcccaagctatcttcttattctggatgggtggtagagcacgtcctaccccatatgcaggagaaccaacctctgtctgagacttcgccatcctctacgtcagcttcagccctagatcaaccctcatttgttcccaaatctcctgacgcaagctctgccttttccccagcctcccctgcaacaccaaatggaaccaagggcaaagatgagtcccagcacacagaatctatggtacttcagtcctcacgggggatcaaagtggaaggctgcgtccgaatgtacgaactggtacacagaatgaaaggaacagagggcctgaggctatggcaggaggagcaggagaggaaggtgcaagccctctcggagatggcatctgaacaactgaagcggtttgatgaatggaaggaactgaagcagcataaagaattccaggacttgcgggaagtaatggagaagagctccagagaagccttgggacaccaagagaagctaaaagctgagcaccgtcacagagcaaagattctcaacctgaagctgcgggaagcagagcagcagcgcgtgaagcaagcagaacaggagcggcttcggaaggaagaaggccagatccgcctgcgggccctctatgctctgcaggaggagatgctgcagctcagccagcagctggatgcctctgagcagcacaaagccctgcttaaggtcgacctggctgccttccagacccgaggcaaccagctgtgcagcctcatctcagggatcatccgggcctcttcagagagcagctatcccacagcagagagtcaagctgaggctgagcgagctctgcgggaaatgcgggacctcctgatgaacttggggcaggagatcaccagagcctgcgaagacaagaggaggcaggatgaagaagaggcccaggtaaagctgcaagaggcacagatgcagcagggaccagaggcccacaaagagcccccagctcccagccagggcccaggagggaaacagaatgaagacctccaggtgaaggtacaagacattacaatgcagtggtaccagcagctgcaggatgcttccatgcagtgtgtgttgacctttgagggcctgaccaacagcaaggacagtcaggccaaaaagataaagatggacctccagaaggctgctaccatcccagtgagccaaatctctaccattgcaggctcaaaactgaaggagatctttgacaagatccacagcctgctctctggaaaacctgttcaatctggtgggcgctctgtgtctgtcacacttaacccacaggggctggactttgttcaatacaaactggcagagaaatttgtgaaacaaggcgaggaggaagtggcctctcaccatgaagcagcattccccattgcagttgtggcatccgggatctgggagctccaccccagagtgggggacctcattcttgctcatctacataagaagtgtccttactctgttcctttctatcccactttcaaggagggaatggctttggaagactatcagaggatgcttggttaccaagtaaaggattccaaagtggagcagcaagacaactttctaaaacgcatgtcagggatgatccgtctctacgctgctatcatccagctccggtggccatatggaaaccgacaggagattcaccctcatggcttaaatcatggatggcgctggttggcacagatcttaaacatggagcccttgtcagatgtgacagccaccctcctctttgacttcctggaggtgtgtgggaatgccctcatgaagcaataccaggttcagttctggaagatgctaattctcatcaaagaggactactttcccagaattgaagctatcacaagctcaggacagatgggctccttcatacgcctcaagcagttcttggagaaatgtttgcaacacaaggacattcctgtccccaagggctttctgacttcctccttctggcgctcctgatgtcactccatcacccaccatcaccgctgctgcaaagaggcaataataaaggaactgaagacagctgtatttgggagaagtcatgtcagattcagaaatttgccattatgtatttttatgtatttatgccttgtgactaggagaggagattttcatgggtcacaaaattcttggaggtcccttagtagatttggtagttccttaagagatccacgtgataaaataaatggagttgggcaggaactgaacactgctaatatgatgataaatatgcctgactaaagccactacagaaatccagagattggctgttaaaatttgttttgtggaaagactaattctctttgatactgcagaggcagtggccatggatctgttcctctgtgctaaatgtcttgtggcagggtgtgtttgtgggggagtgttcactggtactcttgagtggcctgaagtgacccattctatgaattgttaattaaggtgccaaaaaaaattaataataaagcttggttttttgaaaaacccattgctgataaaaaaaaacaa

SEQ ID NO: 278214 - DNA, 277 bp, Homo sapiens
gtgaggaccaggcaggagggcctccctcgaggcgagatggccgcacggtctctagcgcgcagggctctcagagtcgcaggcggtgacgcccggtcggggggcccggtcgcaagggacacacagctgggggcgcaatggcgctggatcgccgaaggtctggttgaaaacttgaacccgcctggagcggatgcctaagaaaatgcaggcccgctgaagcctccccgccgggccctgggccctgaaagcctccggcagtttcccgtgaccccgcggccgc

SEQ ID NO: 278215 - DNA, 300 bp, Homo sapiens
gtgaggaccaggcaggagggcctccctcgaggcgagatggccgcacggtctctagcgcgcagggctctcagagtcgcaggcggtgacgcccggtcggggggcccggtcgcaagggacacacagctgggggcgcaatgtcacccgcattgacgttccctaggcgctggatcgccgaaggtctggttgaaaacttgaacccgcctggagcggatgcctaagaaaatgcaggcccgctgaagcctccccgccgggccctgggccctgaaagcctccggcagtttcccgtgaccccgcggccgc

SEQ ID NO: 278216 - DNA, 204 bp, Homo sapiens
ggcgcgccaacccgggtcaccgccctgcacagcgggagaagtcacccgcattgacgttccctaggcgctggatcgccgaaggtctggttgaaaacttgaacccgcctggagcggatgcctaagaaaatgcaggcccgctgaagcctccccgccgggccctgggccctgaaagcctccggcagtttcccgtgaccccgcggccgc

SEQ ID NO: 278217 - DNA, 656 bp, Homo sapiens
ctaatgggatgtcagtattctaatgaacacagcctgagaaatgttgctgtaatcctgacacttcaatcttgcagcaaaccttgtgctgaaattttctgcatcagaaatcattctggaatcctttttacctggcactgactaaagagatatgggtgttccttcccagaagtctgttcaggagtgagccactggagagcagaagattttggagaggtctcaaaagaaatttctataacaatttcttgatttctgtatgaaacacataaatatattagtagagtatgattccatctagtgaaaatttaaactcataatacatacactgaataatataaataacatagtatgcattctcatcactgattggcagtaagctctaggtatgccacatcctcagtgggtaagtctcctctcagttttcctacctaattgccagcctgtgggtccttttacctctcccatgctaactgctagcgaaggcttaatggcaactaacagtggttgactaccccgttgtgtgtcacgtactttgcatctgtgatatcatttaatattttattagagtgaaaaagtaaaagaaatcatttttggggcttcaactaccacagcagcaggtgccacagcatgacacagagcagtgctagtctgcaaactgt

SEQ ID NO: 278218 - DNA, 1210 bp, Homo sapiens
gtgctccttgccggggtgggggtcgttaccgagtgggaacttctgcaaatcctgacttttgtcacttcgcgccccgcacaagatgtcctgccggcggtgcgattggtcccgttgcttcgaggggaaactgaggccacttagtccgggcacttacccgcagctagttaaggactaggctctgatggagacgcttgttacgacctcaatggcctgtagaatctgggaggccgcctccgacctaagcccaaaaagcacatgatcgggctcacagggggcggccagaggtgaaaacagccaacgctttacaacgacgctgtgcggggcacttcgtgtgtgtcatcccgtctcatcctcgggtgataggaactgttcattcgggaaaattgcaaacaactaaatacccctcaccaggagctggcccattatagcaactctgagacctctctaccgcaggctcttaaaatgggttttcatcccaacagaatttttctgaggaacttgatatacaaattctataatttatattggaagaatgaagatacaagaatagtttttctttctgcacaaaaaggataaagaaggagcactcaccagataccaaggcgtgctacaaagccatggtaattgtgcagcttaacagtggatgtaactgcttctttgctgtggcagattgtattttctgaaggccccaacagtctctcctgtccctcctcctcttctgaaaccttgatacttccctatgaagaggtagggtctaatacttccctccttcaacctgaagccccgccttgggcttgtgacttgcttgtaaccagtcaaatacagtggaagagttactacgtgacttccagggctaggtcagaaaaggatgcagcctcagggttcaacacacacttgggcctggagccaccatgcaagaaggctgccatgctgcgagggagcaaaggcacgtggagggacatacacaggggctgtggctggcagtcctggcctttgagtcatccttgtttaagtgccaggcacacacgttaactacctttaggtaattccatacctcaggtgtcatgtcaccccaagcccttgagccttcccatctgaagccccaggctgtatggagaagaaacaagatgttcctgccacgctctttctgaactgctgacatacagaatctgtgaccataataaaatggttgttttgtgccattaaaaaa

SEQ ID NO: 278219 - DNA, 914 bp, Homo sapiens
gtgctccttgccggggtgggggtcgttaccgagtgggaacttctgcaaatcctgacttttgtcacttcgcgccccgcacaagatgtcctgccggcggtgcgattggtcccgttgcttcgaggggaaactgaggccacttagtccgggcacttacccgcagctagttaaggactaggctctgatggagacgcttgttacgacctcaatggcctgtagaatctgggaggccgcctccgacctaagcccaaaaagcacatgatcgggctcacagggggcggccagaggtgaaaacagccaacgctttacaacgacgctgtgcggggcacttcgtgtgtgtcatcccgtctcatcctcgggtgataggaactgttcattcgggaaaattgcaaacaactaaatacccctcaccaggagctggcccattatagcaactctgagacctctctaccgcaggctcttaaaatgggacaccgccgcccgcccctcgggcaccggacacaggcgcggctgaggactgacggccccctggaagccactcgggagtcctagattttgctgaaggaagaaggggctggagaaaataaaagggcaggagtctggagtgtgataactgtggcttcgtctcatttccacccgccaagactaaaacttccctcatctgctcagcgggaagaaacagaagttcttggccatggtgtgacagtgacaccgagagaagcccgattcactcccaggtttctgctcacaggtcacctggccagggatgccctccctgaccaccctgaatgcaacagcaacaccgaccctgcctgtgcagtggacactatactgctcttacccttcctggttatttgttactgctcacctggttactgcttaccacatttggttatttggtatcccttcccatgagg

SEQ ID NO: 278220 - DNA, 658 bp, Homo sapiens
tgtgagaccccagctcaaagacgacacacggagaagggagccaagcagcactgaccgatgtgggcagcgttattgccgaccaggaatttgtccctggacttcccctccgcactgctccatgctcaccttcctcttctcgggggtctccaccagctgccagctgttggccttgaggtggtagagttcatcgaacttcatgctgatatcctcgatggacagctgtagcaggtcccagaaccctgccaggtcctgggctgtggggcgtgggttggcatcagggttctgtgggccagatggggatcagtggggccagctcagcagaggcttgtcctgctccccccaaccccccaacaagcagggttcctctgggccctgccagcacccgcgggggctcttgaggcctagtgtctggggaagaaacagaagttcttggccatggtgtgacagtgacaccgagagaagcccgattcactcccaggtttctgctcacaggtcacctggccagggatgccctccctgaccaccctgaatgcaacagcaacaccgaccctgcctgtgcagtggacactatactgctcttacccttcctggttatttgttactgctcacctggttactgcttaccacatttggttatttggtatcccttcccatgagg

SEQ ID NO: 278221 - DNA, 549 bp, Homo sapiens
ttcttctccccagatctctacagacttcctctctccctctcttcaggtttctgctcacaggtcacctggccagggatgccctccctgaccaccctgaatgcaacagcaacaccgaccctgcctgtgcagtggacactatactgctcttacccttcctggttatttgttactgctcacctggttactgcttaccacatttggttatttggtatcccttcccatgaggggagggattttgttttgttcactgcgacatccccagaagctacaacagtacctggcataaggtaggtactcaataaatattcactgagtgaatgacggtcaggacaaggtagagatatggacctattattccacactgtcctgaagcaccttgccatacagttggacaagatatcaataagatcagagagacaaggggccaggcatggtggctcacgcctgtaatcccagcactttgggaggctgcggtgggcggatcacgaggtcaggagatcaagaccatcctggctaacacggtgaaactccatctctattaaaattaca

SEQ ID NO: 278222 - DNA, 5935 bp, Homo sapiens
agtgccgccactggaaccaggagatgcggcgcaggagctgtcgctgtgtttgctttaacctgagtcttgttccttattgtggttcctgctgtggttttgatcatgttgttaccctcggacgtagcccggcttgtattgggttacttacagcaagaaaacctcatttctacctgccagacttttattttggaaagttcagatttaaaagaatatgcagaacattgtacagatgaagggtttattccagcctgcttactgtccttatttggaaaaaacttgacaacaattttaaatgagtatgtagctatgaaaacaaaagaaacatcaaataatgtcccagcaataatgtcatctctatggaagaaattggaccatacactttctcagatcaggagcatgcaaagttccccaaggtttgctggcagtcagagagcccgaacgagaactggaattgcagaaatcaaacggcagagaaagcttgcatctcaaacagctccagccagtgcagagttgctcactttaccttacctttcaggacagtttaccactcctccttccacaggtacacaggttactcgaccaagtggccaaatttcagatccatcgaggtcatattttgtagtggtcaaccactcacagtcacaagatactgtaaccactggagaagctttaaatgtcattcctggtgctcaggaaaagaaagcacatgccagtttaatgtctcccggtagacgcaaaagtgaatctcagagaaaaagtaccactttgtctggccctcattcaacaatacggaatttccaagatccaaacgcttttgcagtagaaaaacaaatggttattgaaaatgcacgagaaaaaatactaagcaacaaatctcttcaagaaaagctagcagaaaacataaataaatttttaactagtgataacaatattgcccaagtacctaagcaaacagataacaaccctacggagccagagacttcaattgatgaattcctaggacttccgagtgaaattcacatgtctgaagaagctatacaggacatattggaacagacagaatcagacccagcatttcaggcactctttgatctctttgactatggcaaaacaaagaataataaaaatatatcacaaagtatttccagtcaacctatggaatccaatcccagtatagtcttagcagatgaaactaatctagcagttaaaggttcttttgaaacagaagaatctgatggtcagtctggtcagcccgctttttgtacatcctatcagaatgatgacccattaaatgctttgaagaatagcaacaaccatgatgtgcttagacaagaagaccaggaaaatttttcccaaataagtaccagcatacagaaaaaggcctttaaaacagctgtacccactgaacagaagtgtgacattgacattacctttgagtccgtgcctaatttgaatgactttaaccaaagagggaattctaatgctgaatgtaatccacattgtgctgaattatacaccaatcagatgtccactgaaactgaaatggctatagggattgaaaagaactctttgtcttcaaatgtaccgagtgaatctcagttacagcctgatcagcctgatataccaataacttcatttgtttcacttggttgtgaagctaacaatgaaaacttaattctctctgggaagagttctcaacttttatcccaagatacttcattaactggaaagccatctaaaaaaagtcaattttgtgaaaattctaatgatacagtaaaacttaaaattaattttcatggttccaagtcatcagattctagtgaaattcacaagagtaaaatagaaattaatgtgttagaaccagttatgtcacagctatcaaattgccaagataattcttgtcttcaaagtgaaatactacctgtgtctgttgaaagttcacatttaaatgtatctggacaagtagaaattcatcttggagattcgctgtcttctactaaacaaccatctaatgattcagcatctgttgagttaaatcatacagaaaatgaagctcaggcatccaagtctgagaattcacaggagccttcatcttctgtaaaagaagagaatactatttttctctctttaggtggaaatgctaactgtgagaaagttgcactgacgcctccagaaggcactcctgtagaaaacagtcactctcttcctccagaatctgtgtgttcttcagtgggagattctcaccctgagtcccaaaatactgatgataaaccttctagcaacaactcagcagagatagatgcatcaaatatcgtctctctcaaagttatcattagtgatgatccatttgtttcctcagatactgaacttaccagtgctgtttctagtattaatggagaaaacctgccaactataatcttgtcttctcctactaaatcacctactaaaaatgcagaactagttaaatgcctatcttcagaagaaactgtaggtgctgttgtatatgccgaagtaggggattcagcctcaatggaacagagtcttttaacattcaaatctgaagactctgcagtaaacaatactcagaatgaagatggcattgctttttcagctaatgttacaccatgtgtttccaaggatggaggatatatacagttgatgccagccacaagcacagcttttggcaattcaaataacattctgatagctacctgtgtgactgatccaacagcgttaggaacatctgtaagtcagtctaatgtagtggtgttgcctggaaattctgcacctatgactgctcaacctctaccacctcagttacagacaccaccaaggtcaaacagtgtatttgctgtcaaccaagctgtgtcaccaaacttttcacaaggatctgccataataattgcctctccagtccagcctgtactccaaggaatggtagggatgatcccagtatctgtggttggacagaatggaaataacttttctactcctcctcggcaggttcttcatatgcctttgacagcacctgtatgcaatagaagtatccctcaattccccgtccctccaaaatctcagaaggctcagggactaagaaacaagccttgtataggaaaacaagtaaataatttggtggattcgtcaggtcattcagttggatgtcatgcacaaaaaactgaagtttctgacaaaagtattgccacagatcttgggaaaaaatcagaagaaaccacagttcccttcccagaagagagtatagttccagctgctaaaccatgccacagacgtgtactctgtttcgacagcactactgctcctgtggcaaatacgcaggggccaaaccataagatggtgtcccaaaacaaagaaaggaatgcagtctcttttcctaatcttgactcacccaatgtgtcctccaccttaaaacccccttctaataatgctatcaaaagagagaaagagaagcctcctctgcctaagattttatctaaatcggaaagtgccattagccggcataccaccataagagaaactcaatcagaaaagaaagtttcaccaacagaaattgtgcttgaatctttccataaagcaacagctaataaggagaatgaattatgcagcgatgtagaaagacagaaaaatccagaaaattcaaaactatctattgggcagcaaaatgggggtttgcgaagtgagaaatctatagcttcactgcaagaaatgaccaaaaaacaaggcacatcttcaaacaataaaaatgtactttcagtaggtacagctgtgaaggatctaaaacaagaacaaactaaatccgccagttctttgattaccacagaaatgttacaggatatacagaggcacagctcagtaagtaggcttgctgatagtagtgatttacctgtgccccggacacctggctcaggggcaggggaaaaacataaagaagaacctatagatattatcaaggccccctctagtaggcgtttcagtgaagacagtagtacatcaaaagtaatggtccctcctgtcaccccagacttgcctgcctgcagccctgccagtgaaacaggaagtgaaaacagtgtaaatatggctgcccacacattaatgattctctccagggcagccatttctaggactacttcagcaactcctctgaaagataacacacaacagtttagagcatcttcaaggagcaccacaaaaaagcggaaaattgaggaattagatgaacgtgagcgaaactctcgtccttctagtaaaaatcttacaaattcatcaataccaatgaaaaagaagaaaattaagaaaaagaagcttcccagttcatttccagcaggaatggatgtagacaaatttttgttatcattgcattatgatgagtaaacattctggacacataagaacagtaggtgttaaaaactcatatcccttaaactgagtgtagggaatgggatattgacagaatctgaaagcatgacctgcactttcattgtactgaaacttcactttatatctaaatcatgctgtttctgaaacagcttcctagtttgtaaatagacttacttggtatatttttattttgggaaaaacgtttgcagaaatgtaagtaaagccaatctgcaaaactgtatagctttgacaattccatattgtaaatactgtgtaaatcttgttgaaatagaggttaaatcaacctaatgttcttacactgtgttttttgacttcttatgatccctaattctgagacttactcatctggaatagtttctcacttgttttggaggaaaatgatgcttattcttataaattaccttcagtaactattcaataagacatttaaatacacaatcactaagtactacaaaataataaccacctcaactgatagcaaaatatctaattagaaatcaacagtttgatgagtttttttcctagagtgaattactacccctttcttataattgctgtaagtattatatttctggaatttcacactttacctactctgatcactctgttctctttgttttaaagagagaattttgtaaaccatttattgaatgttctgatctttcatttataacttaagattttttacagaactttaagtggttagactattgagccataaaattttggtttgtagtagagatttctcggtatgtacttttcccctaaatgctggggatttaaagaattgcactaattcatagaactctttacattgtagtgaccaatgcacatataatttaaatcttgtgttctatgtgagagtttatgtggaggattatcttctggtgttgtgtccatcataagatgtaaaaagagaaatcatagttttatattttagtttctcctacaatgggtatgttaaataactatatctatacttagatatagtgcattgtctgtgtcccttaaagtgttacaaagagtttctctcaaaaggtccttaaggagagtgagagatgagagaggtgccttctctgtattagactcacacacatcagtccagttgaagaattggtttaaacttttaaatgagaacagaaattataattagtacctgaccaattgtgcctagatattaaagtatgttctctttagtactttccgttcaattaaatatcagtatattagggatttttttctacaggtgtatattttgttgaagagtcactttcctcaaccatttttttgtactgggcctttaaaaaaataaatccatccaactttaacacaacatttctcagtgtagaaatcatgtcttcttaattgctgaaccttactgcaaaaacttgtgatgtaagaaatttgtatggtgtggcagtggtctattcctaaggaactaaatatcatatagttaatgtttatttaactcagcttgagactgtactacagttaggtttgaataaatattttcattaacttc

SEQ ID NO: 278223 - DNA, 3942 bp, Homo sapiens
agtgccgccactggaaccaggagatgcggcgcaggagctgtcgctgtgtttgctttaacctgagtcttgttccttattgtggttcctgctgtggttttgatcatgttgttaccctcggacgtagcccggcttgtattgggttacttacagcaagaaaacctcatttctacctgccagacttttattttggaaagttcagatttaaaagaatatgcagaacattgtacagatgaagggtttattccagcctgcttactgtccttatttggaaaaaacttgacaacaattttaaatgagtatgtagctatgaaaacaaaagaaacatcaaataatgtcccagcaataatgtcatctctatggaagaaattggaccatacactttctcagatcaggagcatgcaaagttccccaaggtttgctggcagtcagagagcccgaacgagaactggaattgcagaaatcaaacggcagagaaagcttgcatctcaaacagctccagccagtgcagagttgctcactttaccttacctttcaggacagtttaccactcctccttccacaggtacacaggttactcgaccaagtggccaaatttcagatccatcgaggtcatattttgtagtggtcaaccactcacagtcacaagatactgtaaccactggagaagctttaaatgtcattcctggtgctcaggaaaagaaagcacatgccagtttaatgtctcccggtagacgcaaaagtgaatctcagagaaaaagtaccactttgtctggccctcattcaacaatacggaatttccaagatccaaacgcttttgcagtagaaaaacaaatggttattgaaaatgcacgagaaaaaatactaagcaacaaatctcttcaagaaaagctagcagaaaacataaataaatttttaactagtgataacaatattgcccaagtacctaagcaaacagataacaaccctacggagccagagacttcaattgatgaattcctaggacttccgagtgaaattcacatgtctgaagaagctatacaggacatattggaacagacagaatcagacccagcatttcaggcactctttgatctctttgactatggcaaaacaaagaataataaaaatatatcacaaagtatttccagtcaacctatggaatccaatcccagtatagtcttagcagatgaaactaatctagcagttaaaggttcttttgaaacagaagaatctgatggtcagtctggtcagcccgctttttgtacatcctatcagaatgatgacccattaaatgctttgaagaatagcaacaaccatgatgtgcttagacaagaagaccaggaaaatttttcccaaataagtaccagcatacagaaaaaggcctttaaaacagctgtacccactgaacagaagtgtgacattgacattacctttgagtccgtgcctaatttgaatgactttaaccaaagagggaattctaatgctgaatgtaatccacattgtgctgaattatacaccaatcagatgtccactgaaactgaaatggctatagggattgaaaagaactctttgtcttcaaatgtaccgagtgaatctcagttacagcctgatcagcctgatataccaataacttcatttgtttcacttggttgtgaagctaacaatgaaaacttaattctctctgggaagagttctcaacttttatcccaagatacttcattaactggaaagccatctaaaaaaagtcaattttgtgaaaattctaatgatacagtaaaacttaaaattaattttcatggttccaagtcatcagattctagtgaaattcacaagagtaaaatagaaattaatgtgttagaaccagttatgtcacagctatcaaattgccaagataattcttgtcttcaaagtgaaatactacctgtgtctgttgaaagttcacatttaaatgtatctggacaagtagaaattcatcttggagattcgctgtcttctactaaacaaccatctaatgattcagcatctgttgagttaaatcatacagaaaatgaagctcaggcatccaagtctgagaattcacaggagccttcatcttctgtaaaagaagagaatactatttttctctctttaggtggaaatgctaactgtgagaaagttgcactgacgcctccagaaggcactcctgtagaaaacagtcactctcttcctccagaatctgtgtgttcttcagtgggagattctcaccctgagtcccaaaatactgatgataaaccttctagcaacaactcagcagagatagatgcatcaaatatcgtctctctcaaagttatcattagtgatgatccatttgtttcctcagatactgaacttaccagtgctgtttctagtattaatggagaaaacctgccaactataatcttgtcttctcctactaaatcacctactaaaaatgcagaactagttaaatgcctatcttcagaagaaactgtaggtgctgttgtatatgccgaagtaggggattcagcctcaatggaacagagtcttttaacattcaaatctgaagactctgcagtaaacaatactcagaatgaagatggcattgctttttcagctaatgttacaccatgtgtttccaaggatggaggatatatacagttgatgccagccacaagcacagcttttggcaattcaaataacattctgatagctacctgtgtgactgatccaacagcgttaggaacatctgtaagtcagtctaatgtagtggtgttgcctggaaattctgcacctatgactgctcaacctctaccacctcagttacagacaccaccaaggtcaaacagtgtatttgctgtcaaccaagctgtgtcaccaaacttttcacaaggatctgccataataattgcctctccagtccagcctgtactccaaggaatggtagggatgatcccagtatctgtggttggacagaatggaaataacttttctactcctcctcggcaggttcttcatatgcctttgacagcacctgtatgcaatagaagtatccctcaattccccgtccctccaaaatctcagaaggctcagggactaagaaacaagccttgtataggaaaacaagtaaataatttggtggattcgtcaggtcattcagttggatgtcatgcacaaaaaactgaagtttctgacaaaagtattgccacagatcttgggaaaaaatcagaagaaaccacagttcccttcccagaagagagtatagttccagctgctaaaccatgccacagacgtgtactctgtttcgacagcactactgctcctgtggcaaatacgcaggggccaaaccataagatggtgtcccaaaacaaagaaaggaatgcagtctcttttcctaatcttgactcacccaatgtgtcctccaccttaaaacccccttctaataatgctatcaaaagagagaaagagaagcctcctctgcctaagattttatctaaatcggaaagtgccattagccggcataccaccataagagaaactcaatcagaaaagaaagtttcaccaacagaaattgtgcttgaatctttccataaagcaacagctaataaggagaatggtgatatactatcttcttgatgtgcagttttatttagttagctagtattttgttgaggacttttgcatctatgctcatcagggatagtggtctgcagttttctttttattatgtcctttcctggttttgatattagatcagggaagatttcctcaattgtttgttcaaataagttttccaaacttgtagccttgtcttctccctcaggaatgccaatcattcttaggtttggccttttcacataatctcatatttcttagagactttgtccacttcttttgattatttttctttatctttgtctaattggataatttgaaagccttgtcttg

SEQ ID NO: 278224 - DNA, 485 bp, Homo sapiens
gcccctcgaggccaagaattcgggcaagagggtgtatattttgttgaagagtcactttcctcaaccatttttttgtactgggcctttaaaaaaataaatccatccaactttaacacaacatttctcagtgtagaaatcatgtcttcttaattgctgaaccttactgcaaaaacttgtgatgtaagaaatttgtatggtgtggcagtggtctattcctaaggaactaaatatcatatagttaatgtttatttaactcagcttgagactgtactacagttaggtttgaataaatattttcattaacttcaaaagtttgaattactttacattggcagtcttgtttagaaactgattaaattcctttgcaagtcagttctttttgggagtttgtacaatgctgaaaatcacagttttcttcttattcaattcatagttgtatgtactaagcactgaaaattcatatacaaataaaataagtttacttt

SEQ ID NO: 278225 - DNA, 281 bp, Homo sapiens
ttgagactatattgtactttggattttattgtaaaaccttaaggcataaagactgtattttattaatcttagtgtcttttaccatgctttacacatggtaggcactcagtacatgttaattgaatttaatgtaaaataataatcactaatgctttttatcccattacaagtttagaaaactattcagtttctttggcttactgttatgttttcttgaaatacagctggagaagctttagtgattattattttacattaaattcaattaacatgtacgtcga

SEQ ID NO: 278226 - DNA, 5563 bp, Homo sapiens
tatagatcgagctcggtaccgaatctcgaccaagtggccaaatttcagatccatcgaggtcatattttgtagtggtcaaccactcacagtcacaagatactgtaaccactggagaagctttaaatgtcattcctggtgctcaggaaaagaaagcacatgccagtttaatgtctcccggtagacgcaaaagtgaatctcagagaaaaagtaccactttgtctggccctcattcaacaatacggaatttccaagatccaaacgcttttgcagtagaaaaacaaatggttattgaaaatgcacgagaaaaaatactaagcaacaaatctcttcaagaaaagctagcagaaaacataaataaatttttaactagtgataacaatattgcccaagtacctaagcaaacagataacaaccctacggagccagagacttcaattgatgaattcctaggacttccgagtgaaattcacatgtctgaagaagctatacaggacatattggaacagacagaatcagacccagcatttcaggcactctttgatctctttgactatggcaaaacaaagaataataaaaatatatcacaaagtatttccagtcaacctatggaatccaatcccagtatagtcttagcagatgaaactaatctagcagttaaaggttcttttgaaacagaagaatctgatggtcagtctggtcagcccgctttttgtacatcctatcagaatgatgacccattaaatgctttgaagaatagcaacaaccatgatgtgcttagacaagaagaccaggaaaatttttcccaaataagtaccagcatacagaaaaaggcctttaaaacagctgtacccactgaacagaagtgtgacattgacattacctttgagtccgtgcctaatttgaatgactttaaccaaagagggaattctaatgctgaatgtaatccacattgtgctgaattatacaccaatcagatgtccactgaaactgaaatggctatagggattgaaaagaactctttgtcttcaaatgtaccgagtgaatctcagttacagcctgatcagcctgatataccaataacttcatttgtttcacttggttgtgaagctaacaatgaaaacttaattctctctgggaagagttctcaacttttatcccaagatacttcattaactggaaagccatctaaaaaaagtcaattttgtgaaaattctaatgatacagtaaaacttaaaattaattttcatggttccaagtcatcagattctagtgaaattcacaagagtaaaatagaaattaatgtgttagaaccagttatgtcacagctatcaaattgccaagataattcttgtcttcaaagtgaaatactacctgtgtctgttgaaagttcacatttaaatgtatctggacaagtagaaattcatcttggagattcgctgtcttctactaaacaaccatctaatgattcagcatctgttgagttaaatcatacagaaaatgaagctcaggcatccaagtctgagaattcacaggagccttcatcttctgtaaaagaagagaatactatttttctctctttaggtggaaatgctaactgtgagaaagttgcactgacgcctccagaaggcactcctgtagaaaacagtcactctcttcctccagaatctgtgtgttcttcagtgggagattctcaccctgagtcccaaaatactgatgataaaccttctagcaacaactcagcagagatagatgcatcaaatatcgtctctctcaaagttatcattagtgatgatccatttgtttcctcagatactgaacttaccagtgctgtttctagtattaatggagaaaacctgccaactataatcttgtcttctcctactaaatcacctactaaaaatgcagaactagttaaatgcctatcttcagaagaaactgtaggtgctgttgtatatgccgaagtaggggattcagcctcaatggaacagagtcttttaacattcaaatctgaagactctgcagtaaacaatactcagaatgaagatggcattgctttttcagctaatgttacaccatgtgtttccaaggatggaggatatatacagttgatgccagccacaagcacagcttttggcaattcaaataacattctgatagctacctgtgtgactgatccaacagcgttaggaacatctgtaagtcagtctaatgtagtggtgttgcctggaaattctgcacctatgactgctcaacctctaccacctcagttacagacaccaccaaggtcaaacagtgtatttgctgtcaaccaagctgtgtcaccaaacttttcacaaggatctgccataataattgcctctccagtccagcctgtactccaaggaatggtagggatgatcccagtatctgtggttggacagaatggaaataacttttctactcctcctcggcaggttcttcatatgcctttgacagcacctgtatgcaatagaagtatccctcaattccccgtccctccaaaatctcagaaggctcagggactaagaaacaagccttgtataggaaaacaagtaaataatttggtggattcgtcaggtcattcagttggatgtcatgcacaaaaaactgaagtttctgacaaaagtattgccacagatcttgggaaaaaatcagaagaaaccacagttcccttcccagaagagagtatagttccagctgctaaaccatgccacagacgtgtactctgtttcgacagcactactgctcctgtggcaaatacgcaggggccaaaccataagatggtgtcccaaaacaaagaaaggaatgcagtctcttttcctaatcttgactcacccaatgtgtcctccaccttaaaacccccttctaataatgctatcaaaagagagaaagagaagcctcctctgcctaagattttatctaaatcggaaagtgccattagccggcataccaccataagagaaactcaatcagaaaagaaagtttcaccaacagaaattgtgcttgaatctttccataaagcaacagctaataaggagaatgaattatgcagcgatgtagaaagacagaaaaatccagaaaattcaaaactatctattgggcagcaaaatgggggtttgcgaagtgagaaatctatagcttcactgcaagaaatgaccaaaaaacaaggcacatcttcaaacaataaaaatgtactttcagtaggtacagctgtgaaggatctaaaacaagaacaaactaaatccgccagttctttgattaccacagaaatgttacaggatatacagaggcacagctcagtaagtaggcttgctgatagtagtgatttacctgtgccccggacacctggctcaggggcaggggaaaaacataaagaagaacctatagatattatcaaggccccctctagtaggcgtttcagtgaagacagtagtacatcaaaagtaatggtccctcctgtcaccccagacttgcctgcctgcagccctgccagtgaaacaggaagtgaaaacagtgtaaatatggctgcccacacattaatgattctctccagggcagccatttctaggactacttcagcaactcctctgaaagataacacacaacagtttagagcatcttcaaggagcaccacaaaaaagcggaaaattgaggaattagatgaacgtgagcgaaactctcgtccttctagtaaaaatcttacaaattcatcaataccaatgaaaaagaagaaaattaagaaaaagaagcttcccagttcatttccagcaggaatggatgtagacaaatttttgttatcattgcattatgatgagtaaacattctggacacataagaacagtaggtgttaaaaactcatatcccttaaactgagtgtagggaatgggatattgacagaatctgaaagcatgacctgcactttcattgtactgaaacttcactttatatctaaatcatgctgtttctgaaacagcttcctagtttgtaaatagacttacttggtatatttttattttgggaaaaacgtttgcagaaatgtaagtaaagccaatctgcaaaactgtatagctttgacaattccatattgtaaatactgtgtaaatcttgttgaaatagaggttaaatcaacctaatgttcttacactgtgttttttgacttcttatgatccctaattctgagacttactcatctggaatagtttctcacttgttttggaggaaaatgatgcttattcttataaattaccttcagtaactattcaataagacatttaaatacacaatcactaagtactacaaaataataaccacctcaactgatagcaaaatatctaattagaaatcaacagtttgatgagtttttttcctagagtgaattactacccctttcttataattgctgtaagtattatatttctggaatttcacactttacctactctgatcactctgttctctttgttttaaagagagaattttgtaaaccatttattgaatgttctgatctttcatttataacttaagattttttacagaactttaagtggttagactattgagccataaaattttggtttgtagtagagatttctcggtatgtacttttcccctaaatgctggggatttaaagaattgcactaattcatagaactctttacattgtagtgaccaatgcacatataatttaaatcttgtgttctatgtgagagtttatgtggaggattatcttctggtgttgtgtccatcataagatgtaaaaagagaaatcatagttttatattttagtttctcctacaatgggtatgttaaataactatatctatacttagatatagtgcattgtctgtgtcccttaaagtgttacaaagagtttctctcaaaaggtccttaaggagagtgagagatgagagaggtgccttctctgtattagactcacacacatcagtccagttgaagaattggtttaaacttttaaatgagaacagaaattataattagtacctgaccaattgtgcctagatattaaagtatgttctctttagtactttccgttcaattaaatatcagtatattagggatttttttctacaggtgtatattttgttgaagagtcactttcctcaaccatttttttgtactgggcctttaaaaaaataaatccatccaactttaacacaacatttctcagtgtagaaatcatgtcttcttaattgctgaaccttactgcaaaaacttgtgatgtaagaaatttgtatggtgtggcagtggtctattcctaaggaactaaatatcatatagttaatgtttatttaactcagcttgagactgtactacagttaggtttgaataaatattttcattaacttcaaaagtttgaattactttacattggcagtcttgtttagaaactgattaaattcctttgcaagtcagttctttttgggagtttgtacaatgctgaaaatcacagttttcttcttattcaattcatagttgtatgtactaagcactgaaaattcatatacaaataaaataagtttacttt

SEQ ID NO: 278227 - DNA, 1194 bp, Homo sapiens
aagcagtggtatcaacagagtgcccattacggccctttcttataattgctgtaagtattatatttctggaatttcacactttacctactctgatcactctgttctctttgttttaaagagagaattttgtaaaccatttattgaatgttctgatctttcatttataacttaagattttttacagaactttaagtggttagactattgagccataaaattttggtttgtagtagagatttctcggtatgtacttttcccctaaatgctggggatttaaagaattgcactaattcatagaactctttacattgtagtgaccaatgcacatataatttaaatcttgtgttctatgtgagagtttatgtggaggattatcttctggtgttgtgtccatcataagatgtaaaaagagaaatcatagttttatattttagtttctcctacaatgggtatgttaaataactatatctatacttagatatagtgcattgtctgtgtcccttaaagtgttacaaagagtttctctcaaaaggtccttaaggagagtgagagatgagagaggtgccttctctgtattagactcacacacatcagtccagttgaagaattggtttaaacttttaaatgagaacagaaattataattagtacctgaccaattgtgcctagatattaaagtatgttctctttagtactttccgttcaattaaatatcagtatattagggatttttttctacaggtgtatattttgttgaagagtcactttcctcaaccatttttttgtactgggcctttaaaaaaataaatccatccaactttaacacaacatttctcagtgtagaaatcatgtcttcttaattgctgaaccttactgcaaaaacttgtgatgtaagaaatttgtatggtgtggcagtggtctattcctaaggaactaaatatcatatagttaatgtttatttaactcagcttgagactgtactacagttaggtttgaataaatattttcattaacttcaaaagtttgaattactttacattggcagtcttgtttagaaactgattaaattcctttgcaagtcagttctttttgggagtttgtacaatgctgaaaatcacagttttcttcttattcaattcatagttgtatgtactaagcactgaaaattcatatacaaataaaataagtttacttt

SEQ ID NO: 278228 - DNA, 1190 bp, Homo sapiens
agtgccgccactggaaccaggagatgcggcgcaggagctgtcgctgtgtttgctttaacctgagtcttgttccttattgtggttcctgctgtggttttgatcatgttgttaccctcggacgtagcccggcttgtattgggttacttacagcaagaaaacctcatttctacctgccagacttttattttggaaagttcagatttaaaagaatatgcagaacattgtacagatgaagggtttattccagcctgcttactggtgagttatttgttccttaagggaaatatttcatcaacacaagagactaaaaacatagtcataaaatcagcttatcagaaaaaaaaaattgaaattggcagaaatttggtggtttatattcatgcatgactggtaagacccaaagaagaccagcttttctttttacaaatttatgccaaaactattaaatgaattacaactttgactccgagagttagtttcaaaatgacaccctcgtttctgattagtttcgctgctgctgtctccaagcctttttttttcttcctgacctgtatctggctgctccttttagacaaatataaaacagatattttgatatattattgtcatctcttttgttaaatatcactagaccaacaaaccatcatttggtacatagtggataccttccagaactacatcatttcacatggtgtttgccattttattttaatcatggctccttaaaggctatcacagataacatgaatgtctgcttaggaaactgaaaatgatgcaaaactaaagttaagcagggtcatagaatacagaatatacacaaatccattatattccgtatgcctgcaatgaacaattggattttgaaaatacccgtttataatagcaacaaacaaacaaacaaaatgcttagagataatctaacaaaatatgtgtgaaatccaaatgctcaaaattgcctgagatctaaggcctgaataaaaggagaattgtattgtgtgtacaaattgagagactcaatattgttaaggtgttagttcctcccaatttaattatagatttttcacagtcaaaatgcctgcaagcatttttatagataacacaaagctgaattctaagttttaaatggaaaagaaactagaatagcctaaacagtttctgaaaaagaacaacttggaggactcacattacca

SEQ ID NO: 278229 - DNA, 829 bp, Homo sapiens
ttttctctctttaggtggaaatgctaactgtgagaaagttgcactgacgcctccagaaggcactcctgtagaaaacagtcactctcttcctccagaatctgtgtgttcttcagtgggagattctcaccctgagtcccaaaatactgatgataaaccttctagcaacaactcagcagagatagatgcatcaaatatcgtctctctcaaagttatcattagtgatgatccatttgtttcctcagatactgaacttaccagtgctgtttctagtattaatggagaaaacctgccaactataatcttgtcttctcctactaaatcacctactaaaaatgcagaactagttaaatgcctatcttcagaagaaactgtaggtgctgttgtatatgccgaagtaggggattcagcctcaatggaacagagtcttttaacattcaaatctgaagactctgcagtaaacaatactcagaatgaagatggcattgctttttcagctaatgttacaccatgtgtttccaaggatggaggatatatacagttgatgccagccacaagcacagcttttggcaattcaaataacattctgatagctacctgtgtgactgatccaacagcgttaggaacatctgtaagtcagtctaatgtagtggtgttgcctggaaattctgcacctatgactgctcaacctctaccacctcagttacagacaccaccaaggtcaaacagtgtatttgctgtcaaccaagctgtgtcaccaaacttttcacaaggtaactttaataacataattgaaatttgtttctctgggttgggatctaatttcttttgt

SEQ ID NO: 278230 - DNA, 733 bp, Homo sapiens
gagacggagtctcgctctgtcgcccaggctggagtgcagtggcgcgatctcggctcactgcaagctccgcctcccgggttcacgccattctcctgcctcagcctcccgagtagctgggactacaggcgcccgctaccacgcccggctaattttttgtatttttagtagagacggggtttcaccgtgttagccaggatggtctcgatctcctgacctcgtgatccgcccgcctcggcctcccaaagtgctgggattacaggcgtgagccaccgcgcccggccaagttcaggtttcttaattcatggtgttatcaatattaattactgcagaacaaatataatcttggatttataaagcttgattgtattcattttagtttcttctgaaagtcgcataaatttagttgatatatttaggaatcattcttcaatctgtggatgtaacacgttgttatataataggttgcatcatattgacttcttacaattcccaaactaccctgacgttgaatttgttttttaaatgcttatatgtttcagcccgaacgagaactggaattgcagaaatcaaacggcagagaaagcttgcatctcaaacagctccagccagtgcagagttgctcactttaccttacctttcaggacagtttaccactcctccttccacaggtacacaggttactcgaccaagtggccaaatttcagatccatcgaggtcatattttgtagtggtc

SEQ ID NO: 278231 - DNA, 634 bp, Homo sapiens
tagagttaggaatatccttagagagtgtgtggtatatcttatttgttgcatacttgaaacttctgaaaacacatggtagttaagggataagaagctagttaataacagagttgggattagaattcaggagttagcactctcagttcacaaaccaattatctttctgtgcagctaaaatttgttgccatcaagatctccctcattttcaccttttccaaatccttttctacacccagaatgcttagtttatacttcttagactttttccattctactgtattattttttgttgagactatattgtactttggattttattgtaaaaccttaaggcataaagactgtattttattaatcttagtgtcttttaccatgctttacacatggtaggcactcagtacatgttaattgaatttaatgtaaaataataatcactaatgctttttatcccattacaagtttagaaaactattcagtttctttggcttactgttatgttttcttgaaatacagctggagaagctttaaatgtcattcctggtgctcaggaaaagaaagcacatgccagtttaatgtctcccggtagacgcaaaaggtaaatgctttttaaaagagacaagttacccgtatccat

SEQ ID NO: 278232 - DNA, 6113 bp, Homo sapiens
agtgccgccactggaaccaggagatgcggcgcaggagctgtcgctgtgtttgctttaacctgagtcttgttccttattgtggttcctgctgtggttttgatcatgttgttaccctcggacgtagcccggcttgtattgggttacttacagcaagaaaacctcatttctacctgccagacttttattttggaaagttcagatttaaaagaatatgcagaacattgtacagatgaagggtttattccagcctgcttactgtccttatttggaaaaaacttgacaacaattttaaatgagtatgtagctatgaaaacaaaagaaacatcaaataatgtcccagcaataatgtcatctctatggaagaaattggaccatacactttctcagatcaggagcatgcaaagttccccaaggtttgctggcagtcagagagcccgaacgagaactggaattgcagaaatcaaacggcagagaaagcttgcatctcaaacagctccagccagtgcagagttgctcactttaccttacctttcaggacagtttaccactcctccttccacaggtacacaggttactcgaccaagtggccaaatttcagatccatcgaggtcatattttgtagtggtcaaccactcacagtcacaagatactgtaaccactggagaagctttaaatgtcattcctggtgctcaggaaaagaaagcacatgccagtttaatgtctcccggtagacgcaaaagtgaatctcagagaaaaagtaccactttgtctggccctcattcaacaatacggaatttccaagatccaaacgcttttgcagtagaaaaacaaatggttattgaaaatgcacgagaaaaaatactaagcaacaaatctcttcaagaaaagctagcagaaaacataaataaatttttaactagtgataacaatattgcccaagtacctaagcaaacagataacaaccctacggagccagagacttcaattgatgaattcctaggacttccgagtgaaattcacatgtctgaagaagctatacaggacatattggaacagacagaatcagacccagcatttcaggcactctttgatctctttgactatggcaaaacaaagaataataaaaatatatcacaaagtatttccagtcaacctatggaatccaatcccagtatagtcttagcagatgaaactaatctagcagttaaaggttcttttgaaacagaagaatctgatggtcagtctggtcagcccgctttttgtacatcctatcagaatgatgacccattaaatgctttgaagaatagcaacaaccatgatgtgcttagacaagaagaccaggaaaatttttcccaaataagtaccagcatacagaaaaaggcctttaaaacagctgtacccactgaacagaagtgtgacattgacattacctttgagtccgtgcctaatttgaatgactttaaccaaagagggaattctaatgctgaatgtaatccacattgtgctgaattatacaccaatcagatgtccactgaaactgaaatggctatagggattgaaaagaactctttgtcttcaaatgtaccgagtgaatctcagttacagcctgatcagcctgatataccaataacttcatttgtttcacttggttgtgaagctaacaatgaaaacttaattctctctgggaagagttctcaacttttatcccaagatacttcattaactggaaagccatctaaaaaaagtcaattttgtgaaaattctaatgatacagtaaaacttaaaattaattttcatggttccaagtcatcagattctagtgaaattcacaagagtaaaatagaaattaatgtgttagaaccagttatgtcacagctatcaaattgccaagataattcttgtcttcaaagtgaaatactacctgtgtctgttgaaagttcacatttaaatgtatctggacaagtagaaattcatcttggagattcgctgtcttctactaaacaaccatctaatgattcagcatctgttgagttaaatcatacagaaaatgaagctcaggcatccaagtctgagaattcacaggagccttcatcttctgtaaaagaagagaatactatttttctctctttaggtggaaatgctaactgtgagaaagttgcactgacgcctccagaaggcactcctgtagaaaacagtcactctcttcctccagaatctgtgtgttcttcagtgggagattctcaccctgagtcccaaaatactgatgataaaccttctagcaacaactcagcagagatagatgcatcaaatatcgtctctctcaaagttatcattagtgatgatccatttgtttcctcagatactgaacttaccagtgctgtttctagtattaatggagaaaacctgccaactataatcttgtcttctcctactaaatcacctactaaaaatgcagaactagttaaatgcctatcttcagaagaaactgtaggtgctgttgtatatgccgaagtaggggattcagcctcaatggaacagagtcttttaacattcaaatctgaagactctgcagtaaacaatactcagaatgaagatggcattgctttttcagctaatgttacaccatgtgtttccaaggatggaggatatatacagttgatgccagccacaagcacagcttttggcaattcaaataacattctgatagctacctgtgtgactgatccaacagcgttaggaacatctgtaagtcagtctaatgtagtggtgttgcctggaaattctgcacctatgactgctcaacctctaccacctcagttacagacaccaccaaggtcaaacagtgtatttgctgtcaaccaagctgtgtcaccaaacttttcacaaggatctgccataataattgcctctccagtccagcctgtactccaaggaatggtagggatgatcccagtatctgtggttggacagaatggaaataacttttctactcctcctcggcaggttcttcatatgcctttgacagcacctgtatgcaatagaagtatccctcaattccccgtccctccaaaatctcagaaggctcagggactaagaaacaagccttgtataggaaaacaagtaaataatttggtggattcgtcaggtcattcagttggatgtcatgcacaaaaaactgaagtttctgacaaaagtattgccacagatcttgggaaaaaatcagaagaaaccacagttcccttcccagaagagagtatagttccagctgctaaaccatgccacagacgtgtactctgtttcgacagcactactgctcctgtggcaaatacgcaggggccaaaccataagatggtgtcccaaaacaaagaaaggaatgcagtctcttttcctaatcttgactcacccaatgtgtcctccaccttaaaacccccttctaataatgctatcaaaagagagaaagagaagcctcctctgcctaagattttatctaaatcggaaagtgccattagccggcataccaccataagagaaactcaatcagaaaagaaagtttcaccaacagaaattgtgcttgaatctttccataaagcaacagctaataaggagaatgaattatgcagcgatgtagaaagacagaaaaatccagaaaattcaaaactatctattgggcagcaaaatgggggtttgcgaagtgagaaatctatagcttcactgcaagaaatgaccaaaaaacaaggcacatcttcaaacaataaaaatgtactttcagtaggtacagctgtgaaggatctaaaacaagaacaaactaaatccgccagttctttgattaccacagaaatgttacaggatatacagaggcacagctcagtaagtaggcttgctgatagtagtgatttacctgtgccccggacacctggctcaggggcaggggaaaaacataaagaagaacctatagatattatcaaggccccctctagtaggcgtttcagtgaagacagtagtacatcaaaagtaatggtccctcctgtcaccccagacttgcctgcctgcagccctgccagtgaaacaggaagtgaaaacagtgtaaatatggctgcccacacattaatgattctctccagggcagccatttctaggactacttcagcaactcctctgaaagataacacacaacagtttagagcatcttcaaggagcaccacaaaaaagcggaaaattgaggaattagatgaacgtgagcgaaactctcgtccttctagtaaaaatcttacaaattcatcaataccaatgaaaaagaagaaaattaagaaaaagaagcttcccagttcatttccagcaggaatggatgtagacaaatttttgttatcattgcattatgatgagtaaacattctggacacataagaacagtaggtgttaaaaactcatatcccttaaactgagtgtagggaatgggatattgacagaatctgaaagcatgacctgcactttcattgtactgaaacttcactttatatctaaatcatgctgtttctgaaacagcttcctagtttgtaaatagacttacttggtatatttttattttgggaaaaacgtttgcagaaatgtaagtaaagccaatctgcaaaactgtatagctttgacaattccatattgtaaatactgtgtaaatcttgttgaaatagaggttaaatcaacctaatgttcttacactgtgttttttgacttcttatgatccctaattctgagacttactcatctggaatagtttctcacttgttttggaggaaaatgatgcttattcttataaattaccttcagtaactattcaataagacatttaaatacacaatcactaagtactacaaaataataaccacctcaactgatagcaaaatatctaattagaaatcaacagtttgatgagtttttttcctagagtgaattactacccctttcttataattgctgtaagtattatatttctggaatttcacactttacctactctgatcactctgttctctttgttttaaagagagaattttgtaaaccatttattgaatgttctgatctttcatttataacttaagattttttacagaactttaagtggttagactattgagccataaaattttggtttgtagtagagatttctcggtatgtacttttcccctaaatgctggggatttaaagaattgcactaattcatagaactctttacattgtagtgaccaatgcacatataatttaaatcttgtgttctatgtgagagtttatgtggaggattatcttctggtgttgtgtccatcataagatgtaaaaagagaaatcatagttttatattttagtttctcctacaatgggtatgttaaataactatatctatacttagatatagtgcattgtctgtgtcccttaaagtgttacaaagagtttctctcaaaaggtccttaaggagagtgagagatgagagaggtgccttctctgtattagactcacacacatcagtccagttgaagaattggtttaaacttttaaatgagaacagaaattataattagtacctgaccaattgtgcctagatattaaagtatgttctctttagtactttccgttcaattaaatatcagtatattagggatttttttctacaggtgtatattttgttgaagagtcactttcctcaaccatttttttgtactgggcctttaaaaaaataaatccatccaactttaacacaacatttctcagtgtagaaatcatgtcttcttaattgctgaaccttactgcaaaaacttgtgatgtaagaaatttgtatggtgtggcagtggtctattcctaaggaactaaatatcatatagttaatgtttatttaactcagcttgagactgtactacagttaggtttgaataaatattttcattaacttcaaaagtttgaattactttacattggcagtcttgtttagaaactgattaaattcctttgcaagtcagttctttttgggagtttgtacaatgctgaaaatcacagttttcttcttattcaattcatagttgtatgtactaagcactgaaaattcatatacaaataaaataagtttacttt

SEQ ID NO: 278233 - DNA, 5969 bp, Homo sapiens
agtgccgccactggaaccaggagatgcggcgcaggagctgtcgctgtgtttgctttaacctgagtcttgttccttattgtggttcctgctgtggttttgatcatgttgttaccctcggacgtagcccggcttgtattgggttacttacagcaagaaaacctcatttctacctgccagacttttattttggaaagttcagatttaaaagaatatgcagaacattgtacagatgaagggtttattccagcctgcttactgtccttatttggaaaaaacttgacaacaattttaaatgagtatgtagctatgaaaacaaaagaaacatcaaataatgtcccagcaataatgtcatctctatggaagaaattggaccatacactttctcagatcaggagcatgcaaagttccccaaggtttgctggcagtcagagagcccgaacgagaactggaattgcagaaatcaaacggcagagaaagcttgcatctcaaacagctccagccagtgcagagttgctcactttaccttacctttcaggacagtttaccactcctccttccacaggtacacaggttactcgaccaagtggccaaatttcagatccatcgaggtcatattttgtagtggtcaaccactcacagtcacaagatactgtaaccactggagaagctttaaatgtcattcctggtgctcaggaaaagaaagcacatgccagtttaatgtctcccggtagacgcaaaagtgaatctcagagaaaaagtaccactttgtctggccctcattcaacaatacggaatttccaagatccaaacgcttttgcagtagaaaaacaaatggttattgaaaatgcacgagaaaaaatactaagcaacaaatctcttcaagaaaagctagcagaaaacataaataaatttttaactagtgataacaatattgcccaagtacctaagcaaacagataacaaccctacggagccagagacttcaattgatgaattcctaggacttccgagtgaaattcacatgtctgaagaagctatacaggacatattggaacagacagaatcagacccagcatttcaggcactctttgatctctttgactatggcaaaacaaagaataataaaaatatatcacaaagtatttccagtcaacctatggaatccaatcccagtatagtcttagcagatgaaactaatctagcagttaaaggttcttttgaaacagaagaatctgatggtcagtctggtcagcccgctttttgtacatcctatcagaatgatgacccattaaatgctttgaagaatagcaacaaccatgatgtgcttagacaagaagaccaggaaaatttttcccaaataagtaccagcatacagaaaaaggcctttaaaacagctgtacccactgaacagaagtgtgacattgacattacctttgagtccgtgcctaatttgaatgactttaaccaaagagggaattctaatgctgaatgtaatccacattgtgctgaattatacaccaatcagatgtccactgaaactgaaatggctatagggattgaaaagaactctttgtcttcaaatgtaccgagtgaatctcagttacagcctgatcagcctgatataccaataacttcatttgtttcacttggttgtgaagctaacaatgaaaacttaattctctctgggaagagttctcaacttttatcccaagatacttcattaactggaaagccatctaaaaaaagtcaattttgtgaaaattctaatgatacagtaaaacttaaaattaattttcatggttccaagtcatcagattctagtgaaattcacaagagtaaaatagaaattaatgtgttagaaccagttatgtcacagctatcaaattgccaagataattcttgtcttcaaagtgaaatactacctgtgtctgttgaaagttcacatttaaatgtatctggacaagtagaaattcatcttggagattcgctgtcttctactaaacaaccatctaatgattcagcatctgttgagttaaatcatacagaaaatgaagctcaggcatccaagtctgagaattcacaggagccttcatcttctgtaaaagaagagaatactatttttctctctttaggtggaaatgctaactgtgagaaagttgcactgacgcctccagaaggcactcctgtagaaaacagtcactctcttcctccagaatctgtgtgttcttcagtgggagattctcaccctgagtcccaaaatactgatgataaaccttctagcaacaactcagcagagatagatgcatcaaatatcgtctctctcaaagttatcattagtgatgatccatttgtttcctcagatactgaacttaccagtgctgtttctagtattaatggagaaaacctgccaactataatcttgtcttctcctactaaatcacctactaaaaatgcagaactagttaaatgcctatcttcagaagaaactgtaggtgctgttgtatatgccgaagtaggggattcagcctcaatggaacagagtcttttaacattcaaatctgaagactctgcagtaaacaatactcagaatgaagatggcattgctttttcagctaatgttacaccatgtgtttccaaggatggaggatatatacagttgatgccagccacaagcacagcttttggcaattcaaataacattctgatagctacctgtgtgactgatccaacagcgttaggaacatctgtaagtcagtctaatgtagtggtgttgcctggaaattctgcacctatgactgctcaacctctaccacctcagttacagacaccaccaaggtcaaacagtgtatttgctgtcaaccaagctgtgtcaccaaacttttcacaaggatctgccataataattgcctctccagtccagcctgtactccaaggaatggtagggatgatcccagtatctgtggttggacagaatggaaataacttttctactcctcctcggcaggttcttcatatgcctttgacagcacctgtatgcaatagaagtatccctcaattccccgtccctccaaaatctcagaaggctcagggactaagaaacaagccttgtataggaaaacaagtaaataatttggtggattcgtcaggtcattcagttggatgtcatgcacaaaaaactgaagtttctgacaaaagtattgccacagatcttgggaaaaaatcagaagaaaccacagttcccttcccagaagagagtatagttccagctgctaaaccatgccacagacgtgtactctgtttcgacagcactactgctcctgtggcaaatacgcaggggccaaaccataagatggtgtcccaaaacaaagaaaggaatgcagtctcttttcctaatcttgactcacccaatgtgtcctccaccttaaaacccccttctaataatgctatcaaaagagagaaagagaagcctcctctgcctaagattttatctaaatcggaaagtgccattagccggcataccaccataagagaaactcaatcagaaaagaaagtttcaccaacagaaattgtgcttgaatctttccataaagcaacagctaataaggagaatgaattatgcagcgatgtagaaagacagaaaaatccagaaaattcaaaactatctattgggcagcaaaatgggggtttgcgaagtgagaaatctatagcttcactgcaagaaatgaccaaaaaacaaggcacatcttcaaacaataaaaatgtactttcagtaggtacagctgtgaaggatctaaaacaagaacaaactaaatccgccagttctttgattaccacagaaatgttacaggatatacagaggcacagctcagtaagtaggcttgctgatagtagtgatttacctgtgccccggacacctggctcaggggcaggggaaaaacataaagaagaacctatagatattatcaaggccccctctagtaggcgtttcagtgaagacagtagtacatcaaaagtaatggtccctcctgtcaccccagacttgcctgcctgcagccctgccagtgaaacaggaagtgaaaacagtgtaaatatggctgcccacacattaatgattctctccagggcagccatttctaggactacttcagcaactcctctgaaagataacacacaacagtttagagcatcttcaaggagcaccacaaaaaagcggaaaattgaggaattagatgaacgtgagcgaaactctcgtccttctagtaaaaatcttacaaattcatcaataccaatgaaaaagaagaaaattaagaaaaagaagcttcccagttcatttccagcaggaatggatgtagacaaatttttgttatcattgcattatgatgagtaaacattctggacacataagaacagtaggtgttaaaaactcatatcccttaaactgagtgtagggaatgggatattgacagaatctgaaagcatgacctgcactttcattgtactgaaacttcactttatatctaaatcatgctgtttctgaaacagcttcctagtttgtaaatagacttacttggtatatttttattttgggaaaaacgtttgcagaaatgtaagtaaagccaatctgcaaaactgtatagctttgacaattccatattgtaaatactgtgtaaatcttgttgaaatagaggttaaatcaacctaatgttcttacactgtgttttttgacttcttatgatccctaattctgagacttactcatctggaatagtttctcacttgttttggaggaaaatgatgcttattcttataaattaccttcagtaactattcaataagacatttaaatacacaatcactaagtactacaaaataataaccacctcaactgatagcaaaatatctaattagaaatcaacagtttgatgagtttttttcctagagtgaattactacccctttcttataattgctgtaagtattatatttctggaatttcacactttacctactctgatcactctgttctctttgttttaaagagagaattttgtaaaccatttattgaatgttctgatctttcatttataacttaagattttttacagaactttaagtggttagactattgagccataaaattttggtttgtagtagagatttctcggtatgtacttttcccctaaatgctggggatttaaagaattgcactaattcatagaactctttacattgtagtgaccaatgcacatataatttaaatcttgtgttctatgtgagagtttatgtggaggattatcttctggtgttgtgtccatcataagatgtaaaaagagaaatcatagttttatattttagtttctcctacaatgggtatgttaaataactatatctatacttagatatagtgcattgtctgtgtcccttaaagtgttacaaagagtttctctcaaaaggtccttaaggagagtgagagatgagagaggtgccttctctgtattagactcacacacatcagtccagttgaagaattggtttaaacttttaaatgagaacagaaattataattagtacctgaccaattgtgcctagatattaaagtatgttctctttagtactttccgttcaattaaatatcagtatattagggatttttttctacaggtgtatattttgttgaagagtcactttcctcaaccatttttttgtactgggcctttaaaaaaataaatccatccaactttaacacataacaaaaaaaccaatatctaacaacataaaaaaaaaaagacaagttataaaatacaaaacccacccaattactaacaaaaataaatagaccttaccactctaactccaaactatatcacaattaatactctttgtgggcctcctggcccgttttttatattttgctttttggggcgggccggacttgtggcctcttgggccaatcccgctttatgaggggggt

SEQ ID NO: 278234 - DNA, 4700 bp, Homo sapiens
agtgccgccactggaaccaggagatgcggcgcaggagctgtcgctgtgtttgctttaacctgagtcttgttccttattgtggttcctgctgtggttttgatcatgttgttaccctcggacgtagcccggcttgtattgggttacttacagcaagaaaacctcatttctacctgccagacttttattttggaaagttcagatttaaaagaatatgcagaacattgtacagatgaagggtttattccagcctgcttactgtccttatttggaaaaaacttgacaacaattttaaatgagtatgtagctatgaaaacaaaagaaacatcaaataatgtcccagcaataatgtcatctctatggaagaaattggaccatacactttctcagatcaggagcatgcaaagttccccaaggtttgctggcagtcagagagcccgaacgagaactggaattgcagaaatcaaacggcagagaaagcttgcatctcaaacagctccagccagtgcagagttgctcactttaccttacctttcaggacagtttaccactcctccttccacaggtacacaggttactcgaccaagtggccaaatttcagatccatcgaggtcatattttgtagtggtcaaccactcacagtcacaagatactgtaaccactggagaagctttaaatgtcattcctggtgctcaggaaaagaaagcacatgccagtttaatgtctcccggtagacgcaaaagtgaatctcagagaaaaagtaccactttgtctggccctcattcaacaatacggaatttccaagatccaaacgcttttgcagtagaaaaacaaatggttattgaaaatgcacgagaaaaaatactaagcaacaaatctcttcaagaaaagctagcagaaaacataaataaatttttaactagtgataacaatattgcccaagtacctaagcaaacagataacaaccctacggagccagagacttcaattgatgaattcctaggacttccgagtgaaattcacatgtctgaagaagctatacaggacatattggaacagacagaatcagacccagcatttcaggcactctttgatctctttgactatggcaaaacaaagaataataaaaatatatcacaaagtatttccagtcaacctatggaatccaatcccagtatagtcttagcagatgaaactaatctagcagttaaaggttcttttgaaacagaagaatctgatggtcagtctggtcagcccgctttttgtacatcctatcagaatgatgacccattaaatgctttgaagaatagcaacaaccatgatgtgcttagacaagaagaccaggaaaatttttcccaaataagtaccagcatacagaaaaaggcctttaaaacagctgtacccactgaacagaagtgtgacattgacattacctttgagtccgtgcctaatttgaatgactttaaccaaagagggaattctaatgctgaatgtaatccacattgtgctgaattatacaccaatcagatgtccactgaaactgaaatggctatagggattgaaaagaactctttgtcttcaaatgtaccgagtgaatctcagttacagcctgatcagcctgatataccaataacttcatttgtttcacttggttgtgaagctaacaatgaaaacttaattctctctgggaagagttctcaacttttatcccaagatacttcattaactggaaagccatctaaaaaaagtcaattttgtgaaaattctaatgatacagtaaaacttaaaattaattttcatggttccaagtcatcagattctagtgaaattcacaagagtaaaatagaaattaatgtgttagaaccagttatgtcacagctatcaaattgccaagataattcttgtcttcaaagtgaaatactacctgtgtctgttgaaagttcacatttaaatgtatctggacaagtagaaattcatcttggagattcgctgtcttctactaaacaaccatctaatgattcagcatctgttgagttaaatcatacagaaaatgaagctcaggcatccaagtctgagaattcacaggagccttcatcttctgtaaaagaagagaatactatttttctctctttaggtggaaatgctaactgtgagaaagttgcactgacgcctccagaaggcactcctgtagaaaacagtcactctcttcctccagaatctgtgtgttcttcagtgggagattctcaccctgagtcccaaaatactgatgataaaccttctagcaacaactcagcagagatagatgcatcaaatatcgtctctctcaaagttatcattagtgatgatccatttgtttcctcagatactgaacttaccagtgctgtttctagtattaatggagaaaacctgccaactataatcttgtcttctcctactaaatcacctactaaaaatgcagaactagttaaatgcctatcttcagaagaaactgtaggtgctgttgtatatgccgaagtaggggattcagcctcaatggaacagagtcttttaacattcaaatctgaagactctgcagtaaacaatactcagaatgaagatggcattgctttttcagctaatgttacaccatgtgtttccaaggatggaggatatatacagttgatgccagccacaagcacagcttttggcaattcaaataacattctgatagctacctgtgtgactgatccaacagcgttaggaacatctgtaagtcagtctaatgtagtggtgttgcctggaaattctgcacctatgactgctcaacctctaccacctcagttacagacaccaccaaggtcaaacagtgtatttgctgtcaaccaagctgtgtcaccaaacttttcacaaggatctgccataataattgcctctccagtccagcctgtactccaaggaatggtagggatgatcccagtatctgtggttggacagaatggaaataacttttctactcctcctcggcaggttcttcatatgcctttgacagcacctgtatgcaatagaagtatccctcaattccccgtccctccaaaatctcagaaggctcagggactaagaaacaagccttgtataggaaaacaagtaaataatttggtggattcgtcaggtcattcagttggatgtcatgcacaaaaaactgaagtttctgacaaaagtattgccacagatcttgggaaaaaatcagaagaaaccacagttcccttcccagaagagagtatagttccagctgctaaaccatgccacagacgtgtactctgtttcgacagcactactgctcctgtggcaaatacgcaggggccaaaccataagatggtgtcccaaaacaaagaaaggaatgcagtctcttttcctaatcttgactcacccaatgtgtcctccaccttaaaacccccttctaataatgctatcaaaagagagaaagagaagcctcctctgcctaagattttatctaaatcggaaagtgccattagccggcataccaccataagagaaactcaatcagaaaagaaagtttcaccaacagaaattgtgcttgaatctttccataaagcaacagctaataaggagaatgaattatgcagcgatgtagaaagacagaaaaatccagaaaattcaaaactatctattgggcagcaaaatgggggtttgcgaagtgagaaatctatagcttcactgcaagaaatgaccaaaaaacaaggcacatcttcaaacaataaaaatgtactttcagtaggtacagctgtgaaggatctaaaacaagaacaaactaaatccgccagttctttgattaccacagaaatgttacaggatatacagaggcacagctcagtaagtaggcttgctgatagtagtgatttacctgtgccccggacacctggctcaggggcaggggaaaaacataaagaagaacctatagatattatcaaggccccctctagtaggcgtttcagtgaagacagtagtacatcaaaagtaatggtccctcctgtcaccccagacttgcctgcctgcagccctgccagtgaaacaggaagtgaaaacagtgtaaatatggctgcccacacattaatgattctctccagggcagccatttctaggactacttcagcaactcctctgaaagataacacacaacagtttagagcatcttcaaggagcaccacaaaaaagcggaaaattgaggaattagatgaacgtgagcgaaactctcgtccttctagtaaaaatcttacaaattcatcaataccaatgaaaaagaagaaaattaagaaaaagaagcttcccagttcatttccagcaggaatggatgtagacaaatttttgttatcattgcattatgatgagtaaacattctggacacataagaacagtaggtgttaaaaactcatatcccttaaactgagtgtagggaatgggatattgacagaatctgaaagcatgacctgcactttcattgtactgaaacttcactttatatctaaatcatgctgtttctgaaacagcttcctagtttgtaaatagacttacttggtatatttttattttgggaaaaacgtttgcagaaatgtaagtaaagccaatctgcaaaactgtatagctttgacaattccatattgtaaatactgtgtaaatcttgttgaaatagaggttaaatcaaccta

SEQ ID NO: 278235 - DNA, 1573 bp, Homo sapiens
  misc_feature (1520)..(1520): n is a, c, g, or t
agtgccgccactggaaccaggagatgcggcgcaggagctgtcgctgtgtttgctttaacctgagtcttgttccttattgtggttcctgctgtggttttgatcatgttgttaccctcggacgtagcccggcttgtattgggttacttacagcaagaaaacctcatttctacctgccagacttttattttggaaagttcagatttaaaagaatatgcagaacattgtacagatgaagggtttattccagcctgcttactgtccttatttggaaaaaacttgacaacaattttaaatgagtatgtagctatgaaaacaaaagaaacatcaaataatgtcccagcaataatgtcatctctatggaagaaattggaccatacactttctcagatcaggagcatgcaaagttccccaaggtttgctggcagtcagagagcccgaacgagaactggaattgcagaaatcaaacggcagagaaagcttgcatctcaaacagctccagccagtgcagagttgctcactttaccttacctttcaggacagtttaccactcctccttccacaggtacacaggttactcgaccaagtggccaaatttcagatccatcgaggtcatattttgtagtggtcaaccactcacagtcacaagatactgtaaccactggagaagctttaaatgtcattcctggtgctcaggaaaagaaagcacatgccagtttaatgtctcccggtagacgcaaaagtgaatctcagagaaaaagtaccactttgtctggccctcattcaacaatacggaatttccaagatccaaacgcttttgcagtagaaaaacaaatggttattgaaaatgcacgagaaaaaatactaagcaacaaatctcttcaagaaaagctagcagaaaacataaataaatttttaactagtgataacaatattgcccaagtacctaagcaaacagataacaaccctacggagccagagacttcaattgatgaattcctaggacttccgagtgaaattcacatgtctgaagaagctatacaggacatattggaacagacagaatcagacccagcatttcaggcactctttgatctctttgactatggcaaaacaaagaataataaaaatatatcacaaagtatttccagtcaacctatggaatccaatcccagtatagtcttagcagatgaaactaatctagcagttaaaggttcttttgaaacagaagaatctgatggtcagtctggtcagcccgctttttgtacatcctatcagaatgatgacccattaaatgctttgaagaatagcaacaaccatgatgtgcttagacaagaagaccaggaaaatttttcccaaataagtaccagcatacagaaaaaggcctttaaaacagctgtacccactgaacagaagtgtgacattgacattacctttgagtccgtgcctaatttgaatgactttaaccaaagagggaattctaatgctgaatgtaatccacattgtgctgaatttttcccccntccacaattttcccttgaaacttgaaaattgggctttttgggggattggaaaa

SEQ ID NO: 278236 - DNA, 413 bp, Homo sapiens
ggtgggatggccaggcaggatggaaggacaggttgtagttctggctggcggacactaagagtctggaggagacccagccaccagacataggagaaccatgcagccttgctagggtggagttggcttgttgacattcaggtactgttcatcccccaaccgtgtccacaattcctattagccccgcttggattctgtggtctgctgttgcaggctcttatgctctcaaccccactgctctccctgccctcaccatcagatttactcagtaaaatctcggtggttagtcccccagcaactagagaaaaaacacagaattgtactgaacaatcccacttgaaatttataactatagttcttaaggggacccttgccaacctgaccagatttccctacttgatgctcagtcccaaccg

SEQ ID NO: 278237 - DNA, 825 bp, Homo sapiens
ccagtgcgcccttgaaactttcctcgccttccacctcctgctcatctgcttcacaagctgtcgctgtggtgtcggttcgcaggtcgtggcctctcatggccacggtgcttttggccctgctcgtctacctgggggcgctggtcgacgcctaccccatcaaacccgaggctcccggcgaagacgccttcctggggtagctgagccgctgctacgcctatcctcgccactacctcatcctggtcactcagccgtcgtgagcgcaggcgcggggcgggcggacggggacccctggggctctccccctacagccccgctccaccgggggcgtggctagatctgaccgcgcccggccaggccccgccctcaggtatgggaaactaggccgcccagtcgcgcgcctctccaaaacgttcttcccagactgcgaggaccgcctcggcaggtggcggtaaaagcgcccccatcaagtcacataacatcctgcctccgagagcgcggtctggccccaccctggtccatcacttacgacgtctcccaggcttgcctccccggatcggattcctttcccttcgatcccgcaggccggaggcgcagacctgtggtgaggacacccgaggcctcctgggagacctgcagaccacgcccacctcatttacatgttcactcccgaccctggaaacccggatttcgcctccggacagcggcgtctgggcagggttcgggtactgcagtcccgcgtctggatgcccccgccccctgagctgcagggctgtgtgtggtccttccctggtcccaaaataaagagcgaattgcacagaaacggaa

SEQ ID NO: 278238 - DNA, 1212 bp, Homo sapiens
tagaagtaaatgttttattcttccaactaaattccagtactacaagggcagtaaaacaatgatacactggaaaaaaaaaaatgcagcaataaacatttgttaaaaagactgatagaataaataaaactacaaaaaaaaaaaaaatcatacaaacccattctgaaaccccaagaagtcctggaatacagaaatgccctcctccttcactatttcacaggaagcactgcaggctatttgcttaatattgtcctgggattacattctaaaattagtaactggttacagctcggttgtagtgcacaattaaaatcacactaacttcatctgaagtgtcattctacagttttatttacacaaccagtgaagggcatgttctagaataccagctttaatccttttcaaacattaatataagaagccaaattgtaatgatacagcaaaatgaggccactggtattaatacaggtagcaaaggtccacatccaggtggtactgacatcagggaaatttccaaaaccagttgctgctgcctaagagtggttgccactgacgaaagcttgaaataacctgtattcacagaaggggtattggcattgctgcatgtcataattgggacctcttgcaacaactcaacaaggaacaaggcagcccacaaatgcaggatacgtgattcatgaaacatagctagcaggctgttctccatatcgtcgcattatttgatcatgcgtaaacttcacaaacgcatcatattgttctgcaagttttgtgttcaatatttcttcatattcttctcgaactttctcttcacgttctttcaacaaacgttcacagatcatcccaacctgccgtagagtaaataagggctgttctttttttaatggtgaggatgctgcagatgaagtccctggtgaagctggtccactgaggagaaatgcatgtggctgtgcatcagaagtacaacacggatctgtctgttggaaactcgtttctaaatgtcttctcttctgcattcgtttatactcttgttttatgttgtacagaagcatcagaagtacaacacggatctgtctgttggaaactcgtttctaaatgtcttctcttctgcattcgtttatactcttgtcttatgtcgtacagaattgttctgtggtgaggcgggaggagacgtcgccgaagggggatggctccattcggagatacttctgcggcgag

SEQ ID NO: 278239 - DNA, 1064 bp, Homo sapiens
cacctctatattaattccttaaaataaaaaagcttacatatctatataaacagtaaatctgtggctaaacattctatttatgttaccatacataataaattttatttacttaaattatcaaattttactgaattttttgataactaaaacaggactccagtttgatactccaatgacttacacagtgacagccaattagatattttaaatgtctacattgatggtaacgttatgaaaaatataaagtcaaaaaatccacaaccaaattgaggtaaactactaacatcagtttttagtacagggtacctactaatattactgctgatctacacggctagccaatactcttttcctcaggttaccaaggcgggcatgagctataagaaggttaattttctttcctgaactgaaattttctcattctcagagaatataccgcaccagtgtatagaaagtgaaattaaagtacacgtggaaaatgcatttcacacaactgagttcctcagaaactctaataaacacacctcatacctgcaagttttgtgttcaatatttcttcatattcttctcgaactttctcttcacgttctttcaacaaacgttcacagatcatcccaacctgccgtagagtaaataagggctgttctttttttaatggtgaggatgctgcagatgaagtccctatgtacaatgaggacaaaaaatagcacctggtttagagccatgatataaagcagtttctaaatgaagaggttttatttggatctcttcaatcttgatataaaagcattttaaaatcagattttaagcacagcatttcacaagtcttaaaacaaccaaaataataattccatcagctggtgacgctggaaaaacacggcaagatgtaattaagataaaaaagactaaaggtgagtagaaaaaactttaagacataagaaaggttgggcgtggtgctcaccgcctgtaatcaggccgaggtgggcggatcacctgaggtcaggagtttgaaaccagcctggccaacatggtgaaaccctgcctctactaaaaatacataaaaa

SEQ ID NO: 278240 - DNA, 1110 bp, Homo sapiens
tagaagtaaatgttttattcttccaactaaattccagtactacaagggcagtaaaacaatgatacactggaaaaaaaaaaatgcagcaataaacatttgttaaaaagactgatagaataaataaaactacaaaaaaaaaaaaaatcatacaaacccattctgaaaccccaagaagtcctggaatacagaaatgccctcctccttcactatttcacaggaagcactgcaggctatttgcttaatattgtcctgggattacattctaaaattagtaactggttacagctcggttgtagtgcacaattaaaatcacactaacttcatctgaagtgtcattctacagttttatttacacaaccagtgaagggcatgttctagaataccagctttaatccttttcaaacattaatataagaagccaaattgtaatgatacagcaaaatgaggccactggtattaatacaggtagcaaaggtccacatccaggtggtactgacatcagggaaatttccaaaaccagttgctgctgcctaagagtggttgccactgacgaaagcttgaaataacctgtattcacagaaggggtattggcattgctgcatgtcataattgggacctcttgcaacaactcaacaaggaacaaggcagcccacaaatgcaggatacgtgattcatgaaacatagctagcaggctgttctccatatcgtcgcattatttgatcatgcgtaaacttcacaaacgcatcatattgttctgcaagttttgtgttcaatatttcttcatattcttctcgaactttctcttcacgttctttcaacaaacgttcacagatcatcccaacctgccgtagagtaaataagggctgttctttttttaatggtgaggatgctgcagatgaagtccctggtgaagctggtccactgaggagaaatgcatgtggctgtgcatcagaagtacaacacggatctgtctgttggaaactcgtttctaaatgtcttctcttctgcattcgtttatactcttgttttatgttgtacagaactgtggtgaggcgggaggagacgtcgccgaagggggatggctccattcggagatacttctgcggcgag

SEQ ID NO: 278241 - DNA, 451 bp, Homo sapiens
caaaccatgtctctaataaaaatacaaagattggctgggagtggtggttgtctctggttagtgggaatccagtggtaactccttattttgtaccatattattttttaagatgtcatgcattacttgtataaatgtttttttaaaactcagaggagatacagtagcttaaatgactaaagacaacttggattagacttttcccactctaaataataaactttgtaaatgacaagaaatgttattacctggtgaagctggtccactgaggagaaatgcatgtggctgtgcatcagaagtacaacacggatctgtctgttggaaactcgtttctaaatgtcttctcttctgcattcgtttatactcttgttttatgttgtacagaactgtggtgaggcgggaggagacgtcgccgaagggggatggctccattcggagatacttctgcggcgag

SEQ ID NO: 278242 - DNA, 907 bp, Homo sapiens
cagtatggacccctatgggtagcctcagctggtcatggggtcggtggcggatgcgaaaggaagaaactgcatcctagtaatgctagggccatacgagcaatttctggtgcatggcgttgaccatttcggcctgggaggccagataccaccatgtaagcatccccaatcgtctccacctgattgagagggggattaaaaggtcacctctatttatatccatggggatgggaaaaagtagagggagacaagcttgacaccatcattaatcatcctgacatgctggagaccagaatattgactagaaaataagtgccatggtcctgagtctaggggagaggagatgtctagggaatctttaagtcttctttctccacccagcacctggtgaatactcagtaaacatttgcggaatgaatgaacaccctgtctgcagcaggacatggacaaataggctctgccatcaggaaatgggaagcaagaaaacggtaactcaagaggacagaggctggtgaggaggtaaagcaggcccagtgaaatggacctgacagcccaaactgtcagagaggaggaaagcaggcatttgattttggtaattgtgccaaagctatgtaagagaataaatgccattgttttaaggaaatacacagtgaagtttttaggaaatacacactaagtatttagggataaagtagttatccctaaatagtagtctgccacatgccaaacaatgttaggtactttccatacaacgaatctattattcccatcttacagataaaacaactgaggctcagggagattctgtgacttacctaaggccacacagttagcaacaagccaatattcaaatccagatgatttttactcccaaggacaataaatccaactcaataacttcaaaaaaaag

SEQ ID NO: 278243 - DNA, 2637 bp, Homo sapiens
ggccccgcagaggacttgcctccaccgccacctgcaagtccgcccagctggacttctgcgcaggctccaggagttgtttgctgtctctatggcaacccagtagctggagtctgaagatggagaccaacgagtctacggagggatcgcggtcgcggtcgcgatctttagacatacagcccagctccgaaggactggggcccacttcggaaccgtttccttcttcagatgacagtcccaggtcggccctggcagctgcaaccgcagcagctgcagcggctgcatcagctgctgcagctactgcagccttcaccactgccaaagcagctgcattatctacaaagaccccagcgccctgttctgagttcatggagccgtcctctgaccccagccttcttggggagccctgtgcgggacccggctttacccacaatatagcccatgggagtcttggctttgagcccgtctatgtttcctgtattgctcaggacacttgcactacaactgaccatagttctaatcctggccctgttccaggctctagctctgggcctgttcttggttccagctcaggtgctggccatggctctggctctggctctggtcctggctgtggctctgtccctggctctggctctggtcctggtcctggctctggtcctggctctggtcctggtcatggctctggctctcatcctggtcctgcctctgggcctggtccagacactggccctgactctgagctcagcccctgtattcctccagggttcagaaacctggtggcagatcgggtccctaactatacctcctggagtcagcactgcccctgggagccccagaaacaaccaccttgggaatttttgcaagtcttagaaccgggtgcccgaggactatggaaacccccagacattaaagggaagcttatggtttgctatgaaactttgccgcggggccagtgcctcctctacaactgggaggaagagagagccaccaaccacctggatcaagtcccaagcatgcaggatggctctgagagttttttcttccgacacggacaccggggactgctgactatgcaactaaagtcacccatgccctccagcaccacccagaaagactcgtaccagccaccaggaaacgtctattggccacttcgagggaagcgtgaagccatgctggagatgctcctgcagcatcagatctgtaaagaggtgcaggcagaacaggaacccacaaggaagctcttcgaggttgagtctgtgacacaccatgactaccgaatggagctggcacaagcagggactcctgccccaacaaagcctcacgactaccgccaggagcaacctgagaccttctggatacagagggcaccacagctgccgggtgtcagtaacatcaggacattggacacaccattccggaagaactgcagcttctcaacaccagtacccttgtctctggggaaacttttgccctatgaacctgagaattacccctaccaattgggagaaatatcttcccttccctgtcccggaggaaggctgggtggtggaggggggagaatgactcctttctgaggggtgaggagggaagtggggtatggaatatggaatctatttctgtctgcactagagaggtcgggaggaagttaattctcactgtacttgaagaggctttacataaagggttctctctcatcccaagactgctaatttagtgattctgtgagtcactgtgtgcataccccataacctttccttgggattgcccctatcccacactatgacatcagaactttttttattattgttttatatttgaccaaaatattctggtttagatacagatatttacagaaagtagggaggaaggggaccaagccagacagggacaggtatatgtacagggctgagctgcagagggctacaacttccatataaggtagctttttttgtggctcttttccattgcatatgaaaatgtccatttctggtgtgtgcagacatggtggccattgcccacccaggtaccagcagcagaagactatctgacttggaaagaatgggggtttacaggagtccaggaggtcctttccgctctcctaagagccacacctggtgaatactcagtaaacatttgcggaatgaatgaacaccctgtctgcagcaggacatggacaaataggctctgccatcaggaaatgggaagcaagaaaacggtaactcaagaggacagaggctggtgaggaggtaaagcaggcccagtgaaatggacctgacagcccaaactgtcagagaggaggaaagcaggcatttgattttggtaattgtgccaaagctatgtaagagaataaatgccattgttttaaggaaatacacagtgaagtttttaggaaatacacactaagtatttagggataaagtagttatccctaaatagtagtctgccacatgccaaacaatgttaggtactttccatacaacgaatctattattcccatcttacagataaaacaactgaggctcagggagattctgtgacttacctaaggccacacagttagcaacaagccaatattcaaatccagatgatttttactcccaaggacaataaatccaactcaataacttcaaaaaaaag

SEQ ID NO: 278244 - DNA, 2963 bp, Homo sapiens
ggccccgcagaggacttgcctccaccgccacctgcaagtccgcccagctggacttctgcgcaggctccaggagttgtttgctgtctctatggcaacccagtagctggagtctgaagatggagaccaacgagtctacggagggatcgcggtcgcggtcgcgatctttagacatacagcccagctccgaaggactggggcccacttcggaaccgtttccttcttcagatgacagtcccaggtcggccctggcagctgcaaccgcagcagctgcagcggctgcatcagctgctgcagctactgcagccttcaccactgccaaagcagctgcattatctacaaagaccccagcgccctgttctgagttcatggagccgtcctctgaccccagccttcttggggagccctgtgcgggacccggctttacccacaatatagcccatgggagtcttggctttgagcccgtctatgtttcctgtattgctcaggacacttgcactacaactgaccatagttctaatcctggccctgttccaggctctagctctgggcctgttcttggttccagctcaggtgctggccatggctctggctctggctctggtcctggctgtggctctgtccctggctctggctctggtcctggtcctggctctggtcctggctctggtcctggtcatggctctggctctcatcctggtcctgcctctgggcctggtccagacactggccctgactctgagctcagcccctgtattcctccagggttcagaaacctggtggcagatcgggtccctaactatacctcctggagtcagcactgcccctgggagccccagaaacaaccaccttgggaatttttgcaagtcttagaaccgggtgcccgaggactatggaaacccccagacattaaagggaagcttatggtttgctatgaaactttgccgcggggccagtgcctcctctacaactgggaggaagagagagccaccaaccacctggatcaagtcccaagcatgcaggatggctctgagagttttttcttccgacacggacaccggggactgctgactatgcaactaaagtcacccatgccctccagcaccacccagaaagactcgtaccagccaccaggaaacgtctattggccacttcgagggaagcgtgaagccatgctggagatgctcctgcagcatcagatctggtaagggattgggtaaaggggaagagggatggggaggagaaaaattgggtgagaatggccttgacacccctcgggctacatagtaaagaggtgcaggcagaacaggaacccacaaggaagctcttcgaggttgagtctgtgacacaccatgactaccgaatggagctggcacaagcagggactcctgccccaacaaaggtgagaacccaccccccatcccccgccacttgcaccagctgggctctgacaggctgtggccaagtaccaagcccagaggttgagagagagggctgaaggccaggagttactcagtaccctccctcacagcctcacgactaccgccaggagcaacctgagaccttctggatacagagggcaccacagctgccggtgtgtgagggtgactaggtgttgggggcagagcggggcaggaaaggtagggcagagttgttttgttctggcttggggagagtgggatccatcctcatcctggcactcctccagggtgtcagtaacatcaggacattggacacaccattccggaagaactgcagcttctcaacaccagtacccttgtctctggggaaacttttgccctatgaacctgagaattacccctaccaattgggagaaatatcttcccttccctgtcccggaggaaggctgggtggtggaggggggagaatgactcctttctgaggggtgaggagggaagtggggtatggaatatggaatctatttctgtctgcactagagaggtcgggaggaagttaattctcactgtacttgaagaggctttacataaagggttctctctcatcccaagactgctaatttagtgattctgtgagtcactgtgtgcataccccataacctttccttgggattgcccctatcccacactatgacatcagaactttttttattattgttttatatttgaccaaaatattctggtttagatacagatatttacagaaagtagggaggaaggggaccaagccagacagggacaggtatatgtacagggctgagctgcagagggctacaacttccatataaggtagctttttttgtggctcttttccattgcatatgaaaatgtccatttctggtgtgtgcagacatggtggccattgcccacccaggtaccagcagcagaagactatctgacttggaaagaatgggggtttacaggagtccaggaggtcctttccgctctcctaagagccacacctggtgaatactcagtaaacatttgcggaatgaatgaacaccctgtctgcagcaggacatggacaaataggctctgccatcaggaaatgggaagcaagaaaacggtaactcaagaggacagaggctggtgaggaggtaaagcaggcccagtgaaatggacctgacagcccaaactgtcagagaggaggaaagcaggcatttgattttggtaattgtgccaaagctatgtaagagaataaatgccattgttttaaggaaatacacagtgaagtttttaggaaatacacactaagtatttagggataaagtagttatccctaaatagtagtctgccacatgccaaacaatgttaggtactttccatacaacgaatctattattcccatcttacagataaaacaactgaggctcagggagattctgtgacttacctaaggccacacagttagcaacaagccaatattcaaatccagatgatttttactcccaaggacaataaatccaactcaataacttcaaaaaaaag

SEQ ID NO: 278245 - DNA, 1845 bp, Homo sapiens
ggccccgcagaggacttgcctccaccgccacctgcaagtccgcccagctggacttctgcgcaggctccaggagttgtttgctgtctctatggcaacccagtagctggagtctgaagatggagaccaacgagtctacggagggatcgcggtcgcggtcgcgatctttagacatacagcccagctccgaaggactggggcccacttcggaaccgtttccttcttcagatgacagtcccaggtcggccctggcagctgcaaccgcagcagctgcagcggctgcatcagctgctgcagctactgcagccttcaccactgccaaagcagctgcattatctacaaagaccccagcgccctgttctgagttcatggagccgtcctctgaccccagccttcttggggagccctgtgcgggacccggctttacccacaatatagcccatgggagtcttggctttgagcccgtctatgtttcctgtattgctcaggacacttgcactacaactgaccatagttctaatcctggccctgttccaggctctagctctgggcctgttcttggttccagctcaggtgctggccatggctctggctctggctctggtcctggctgtggctctgtccctggctctggctctggtcctggtcctggctctggtcctggctctggtcctggtcatggctctggctctcatcctggtcctgcctctgggcctggtccagacactggccctgactctgagctcagcccctgtattcctccagggttcagaaacctggtggcagatcgggtccctaactatacctcctggagtcagcactgcccctgggagccccagaaacaaccaccttgggaatttttgcaagtcttagaaccgggtgcccgaggactatggaaacccccagacattaaagggaagcttatggtttgctatgaaactttgccgcggggccagtgcctcctctacaactgggaggaagagagagccaccaaccacctggatcaagtcccaagcatgcaggatggctctgagagttttttcttccgacacggacaccggggactgctgactatgcaactaaagtcacccatgccctccagcaccacccagaaagactcgtaccagccaccaggaaacgtctattggccacttcgagggaagcgtgaagccatgctggagatgctcctgcagcatcagatctgtaaagaggtgcaggcagaacaggaacccacaaggaagctcttcgaggttgagtctgtgacacaccatgactaccgaatggagctggcacaagcagggactcctgccccaacaaagcacctggtgaatactcagtaaacatttgcggaatgaatgaacaccctgtctgcagcaggacatggacaaataggctctgccatcaggaaatgggaagcaagaaaacggtaactcaagaggacagaggctggtgaggaggtaaagcaggcccagtgaaatggacctgacagcccaaactgtcagagaggaggaaagcaggcatttgattttggtaattgtgccaaagctatgtaagagaataaatgccattgttttaaggaaatacacagtgaagtttttaggaaatacacactaagtatttagggataaagtagttatccctaaatagtagtctgccacatgccaaacaatgttaggtactttccatacaacgaatctattattcccatcttacagataaaacaactgaggctcagggagattctgtgacttacctaaggccacacagttagcaacaagccaatattcaaatccagatgatttttactcccaaggacaataaatccaactcaataacttcaaaaaaaag

SEQ ID NO: 278246 - DNA, 2221 bp, Homo sapiens
ggccccgcagaggacttgcctccaccgccacctgcaagtccgcccagctggacttctgcgcaggctccaggagttgtttgctgtctctatggcaacccagtagctggagtctgaagatggagaccaacgagtctacggagggatcgcggtcgcggtcgcgatctttagacatacagcccagctccgaaggactggggcccacttcggaaccgtttccttcttcagatgacagtcccagagagccaccaaccacctggatcaagtcccaagcatgcaggatggctctgagagttttttcttccgacacggacaccggggactgctgactatgcaactaaagtcacccatgccctccagcaccacccagaaagactcgtaccagccaccaggaaacgtctattggccacttcgagggaagcgtgaagccatgctggagatgctcctgcagcatcagatctggtaagggattgggtaaaggggaagagggatggggaggagaaaaattgggtgagaatggccttgacacccctcgggctacatagtaaagaggtgcaggcagaacaggaacccacaaggaagctcttcgaggttgagtctgtgacacaccatgactaccgaatggagctggcacaagcagggactcctgccccaacaaaggtgagaacccaccccccatcccccgccacttgcaccagctgggctctgacaggctgtggccaagtaccaagcccagaggttgagagagagggctgaaggccaggagttactcagtaccctccctcacagcctcacgactaccgccaggagcaacctgagaccttctggatacagagggcaccacagctgccggtgtgtgagggtgactaggtgttgggggcagagcggggcaggaaaggtagggcagagttgttttgttctggcttggggagagtgggatccatcctcatcctggcactcctccagggtgtcagtaacatcaggacattggacacaccattccggaagaactgcagcttctcaacaccagtacccttgtctctggggaaacttttgccctatgaacctgagaattacccctaccaattgggagaaatatcttcccttccctgtcccggaggaaggctgggtggtggaggggggagaatgactcctttctgaggggtgaggagggaagtggggtatggaatatggaatctatttctgtctgcactagagaggtcgggaggaagttaattctcactgtacttgaagaggctttacataaagggttctctctcatcccaagactgctaatttagtgattctgtgagtcactgtgtgcataccccataacctttccttgggattgcccctatcccacactatgacatcagaactttttttattattgttttatatttgaccaaaatattctggtttagatacagatatttacagaaagtagggaggaaggggaccaagccagacagggacaggtatatgtacagggctgagctgcagagggctacaacttccatataaggtagctttttttgtggctcttttccattgcatatgaaaatgtccatttctggtgtgtgcagacatggtggccattgcccacccaggtaccagcagcagaagactatctgacttggaaagaatgggggtttacaggagtccaggaggtcctttccgctctcctaagagccacacctggtgaatactcagtaaacatttgcggaatgaatgaacaccctgtctgcagcaggacatggacaaataggctctgccatcaggaaatgggaagcaagaaaacggtaactcaagaggacagaggctggtgaggaggtaaagcaggcccagtgaaatggacctgacagcccaaactgtcagagaggaggaaagcaggcatttgattttggtaattgtgccaaagctatgtaagagaataaatgccattgttttaaggaaatacacagtgaagtttttaggaaatacacactaagtatttagggataaagtagttatccctaaatagtagtctgccacatgccaaacaatgttaggtactttccatacaacgaatctattattcccatcttacagataaaacaactgaggctcagggagattctgtgacttacctaaggccacacagttagcaacaagccaatattcaaatccagatgatttttactcccaaggacaataaatccaactcaataacttcaaaaaaaag

SEQ ID NO: 278247 - DNA, 427 bp, Homo sapiens
ctggctctggctctggtcctggctgtggctctgtccctggctctggctctggtcctggtcctggctctggtcctggctctggtcctggtcatggctctggctctcatcctggtcctgcctctgggcctggtccagacactggccctgactctgagctcagcccctgtattcctccagggttcagaaacctggtggcagatcgggtccctaactatacctcctggagtcagcactgcccctgggagccccagaaacaaccaccttgggaatttttgcaagtcttagaaccgggtgcccgaggactatggaaacccccagacattaaagggaagcttatggtttgctatgaaactttgccgcggggccagtgcctcctctacaactgggaggaagaggtattaaagttttggcctgctcccttttcttg

SEQ ID NO: 278248 - DNA, 2751 bp, Homo sapiens
ggccccgcagaggacttgcctccaccgccacctgcaagtccgcccagctggacttctgcgcaggctccaggagttgtttgctgtctctatggcaacccagtagctggagtctgaagatggagaccaacgagtctacggagggatcgcggtcgcggtcgcgatctttagacatacagcccagctccgaaggactggggcccacttcggaaccgtttccttcttcagatgacagtcccaggtcggccctggcagctgcaaccgcagcagctgcagcggctgcatcagctgctgcagctactgcagccttcaccactgccaaagcagctgcattatctacaaagaccccagcgccctgttctgagttcatggagccgtcctctgaccccagccttcttggggagccctgtgcgggacccggctttacccacaatatagcccatgggagtcttggctttgagcccgtctatgtttcctgtattgctcaggacacttgcactacaactgaccatagttctaatcctggccctgttccaggctctagctctgggcctgttcttggttccagctcaggtgctggccatggctctggctctggctctggtcctggctgtggctctgtccctggctctggctctggtcctggtcctggctctggtcctggctctggtcctggtcatggctctggctctcatcctggtcctgcctctgggcctggtccagacactggccctgactctgagctcagcccctgtattcctccagggttcagaaacctggtggcagatcgggtccctaactatacctcctggagtcagcactgcccctgggagccccagaaacaaccaccttgggaatttttgcaagtcttagaaccgggtgcccgaggactatggaaacccccagacattaaagggaagcttatggtttgctatgaaactttgccgcggggccagtgcctcctctacaactgggaggaagagagagccaccaaccacctggatcaagtcccaagcatgcaggatggctctgagagttttttcttccgacacggacaccggggactgctgactatgcaactaaagtcacccatgccctccagcaccacccagaaagactcgtaccagccaccaggaaacgtctattggccacttcgagggaagcgtgaagccatgctggagatgctcctgcagcatcagatctgtaaagaggtgcaggcagaacaggaacccacaaggaagctcttcgaggttgagtctgtgacacaccatgactaccgaatggagctggcacaagcagggactcctgccccaacaaagcctcacgactaccgccaggagcaacctgagaccttctggatacagagggcaccacagctgccggtgtgtgagggtgactaggtgttgggggcagagcggggcaggaaaggtagggcagagttgttttgttctggcttggggagagtgggatccatcctcatcctggcactcctccagggtgtcagtaacatcaggacattggacacaccattccggaagaactgcagcttctcaacaccagtacccttgtctctggggaaacttttgccctatgaacctgagaattacccctaccaattgggagaaatatcttcccttccctgtcccggaggaaggctgggtggtggaggggggagaatgactcctttctgaggggtgaggagggaagtggggtatggaatatggaatctatttctgtctgcactagagaggtcgggaggaagttaattctcactgtacttgaagaggctttacataaagggttctctctcatcccaagactgctaatttagtgattctgtgagtcactgtgtgcataccccataacctttccttgggattgcccctatcccacactatgacatcagaactttttttattattgttttatatttgaccaaaatattctggtttagatacagatatttacagaaagtagggaggaaggggaccaagccagacagggacaggtatatgtacagggctgagctgcagagggctacaacttccatataaggtagctttttttgtggctcttttccattgcatatgaaaatgtccatttctggtgtgtgcagacatggtggccattgcccacccaggtaccagcagcagaagactatctgacttggaaagaatgggggtttacaggagtccaggaggtcctttccgctctcctaagagccacacctggtgaatactcagtaaacatttgcggaatgaatgaacaccctgtctgcagcaggacatggacaaataggctctgccatcaggaaatgggaagcaagaaaacggtaactcaagaggacagaggctggtgaggaggtaaagcaggcccagtgaaatggacctgacagcccaaactgtcagagaggaggaaagcaggcatttgattttggtaattgtgccaaagctatgtaagagaataaatgccattgttttaaggaaatacacagtgaagtttttaggaaatacacactaagtatttagggataaagtagttatccctaaatagtagtctgccacatgccaaacaatgttaggtactttccatacaacgaatctattattcccatcttacagataaaacaactgaggctcagggagattctgtgacttacctaaggccacacagttagcaacaagccaatattcaaatccagatgatttttactcccaaggacaataaatccaactcaataacttcaaaaaaaag

SEQ ID NO: 278249 - DNA, 2619 bp, Homo sapiens
ggccccgcagaggacttgcctccaccgccacctgcaagtccgcccagctggacttctgcgcaggctccaggagttgtttgctgtctctatggcaacccagtagctggagtctgaagatggagaccaacgagtctacggagggatcgcggtcgcggtcgcgatctttagacatacagcccagctccgaaggactggggcccacttcggaaccgtttccttcttcagatgacagtcccaggtcggccctggcagctgcaaccgcagcagctgcagcggctgcatcagctgctgcagctactgcagccttcaccactgccaaagcagctgcattatctacaaagaccccagcgccctgttctgagttcatggagccgtcctctgaccccagccttcttggggagccctgtgcgggacccggctttacccacaatatagcccatgggagtcttggctttgagcccgtctatgtttcctgtattgctcaggacacttgcactacaactgaccatagttctaatcctggccctgttccaggctctagctctgggcctgttcttggttccagctcaggtgctggccatggctctggctctggctctggtcctggctgtggctctgtccctggctctggctctggtcctggtcctggctctggtcctggctctggtcctggtcatggctctggctctcatcctggtcctgcctctgggcctggtccagacactggccctgactctgagctcagcccctgtattcctccagggttcagaaacctggtggcagatcgggtccctaactatacctcctggagtcagcactgcccctgggagccccagaaacaaccaccttgggaatttttgcaagtcttagaaccgggtgcccgaggactatggaaacccccagacattaaagggaagcttatggtttgctatgaaactttgccgcggggccagtgcctcctctacaactgggaggaagagagagccaccaaccacctggatcaagtcccaagcatgcaggatggctctgagagttttttcttccgacacggacaccggggactgctgactatgcaactaaagtcacccatgccctccagcaccacccagaaagactcgtaccagccaccaggaaacgtctattggccacttcgagggaagcgtgaagccatgctggagatgctcctgcagcatcagatctgtaaagaggtgcaggcagaacaggaacccacaaggaagctcttcgaggttgagtctgtgacacaccatgactaccgaatggagctggcacaagcagggactcctgccccaacaaaggagcaacctgagaccttctggatacagagggcaccacagctgccgggtgtcagtaacatcaggacattggacacaccattccggaagaactgcagcttctcaacaccagtacccttgtctctggggaaacttttgccctatgaacctgagaattacccctaccaattgggagaaatatcttcccttccctgtcccggaggaaggctgggtggtggaggggggagaatgactcctttctgaggggtgaggagggaagtggggtatggaatatggaatctatttctgtctgcactagagaggtcgggaggaagttaattctcactgtacttgaagaggctttacataaagggttctctctcatcccaagactgctaatttagtgattctgtgagtcactgtgtgcataccccataacctttccttgggattgcccctatcccacactatgacatcagaactttttttattattgttttatatttgaccaaaatattctggtttagatacagatatttacagaaagtagggaggaaggggaccaagccagacagggacaggtatatgtacagggctgagctgcagagggctacaacttccatataaggtagctttttttgtggctcttttccattgcatatgaaaatgtccatttctggtgtgtgcagacatggtggccattgcccacccaggtaccagcagcagaagactatctgacttggaaagaatgggggtttacaggagtccaggaggtcctttccgctctcctaagagccacacctggtgaatactcagtaaacatttgcggaatgaatgaacaccctgtctgcagcaggacatggacaaataggctctgccatcaggaaatgggaagcaagaaaacggtaactcaagaggacagaggctggtgaggaggtaaagcaggcccagtgaaatggacctgacagcccaaactgtcagagaggaggaaagcaggcatttgattttggtaattgtgccaaagctatgtaagagaataaatgccattgttttaaggaaatacacagtgaagtttttaggaaatacacactaagtatttagggataaagtagttatccctaaatagtagtctgccacatgccaaacaatgttaggtactttccatacaacgaatctattattcccatcttacagataaaacaactgaggctcagggagattctgtgacttacctaaggccacacagttagcaacaagccaatattcaaatccagatgatttttactcccaaggacaataaatccaactcaataacttcaaaaaaaag

SEQ ID NO: 278250 - DNA, 1895 bp, Homo sapiens
ggccccgcagaggacttgcctccaccgccacctgcaagtccgcccagctggacttctgcgcaggctccaggagttgtttgctgtctctatggcaacccagtagctggagtctgaagatggagaccaacgagtctacggagggatcgcggtcgcggtcgcgatctttagacatacagcccagctccgaaggactggggcccacttcggaaccgtttccttcttcagatgacagtcccagagagccaccaaccacctggatcaagtcccaagcatgcaggatggctctgagagttttttcttccgacacggacaccggggactgctgactatgcaactaaagtcacccatgccctccagcaccacccagaaagactcgtaccagccaccaggaaacgtctattggccacttcgagggaagcgtgaagccatgctggagatgctcctgcagcatcagatctgtaaagaggtgcaggcagaacaggaacccacaaggaagctcttcgaggttgagtctgtgacacaccatgactaccgaatggagctggcacaagcagggactcctgccccaacaaagcctcacgactaccgccaggagcaacctgagaccttctggatacagagggcaccacagctgccgggtgtcagtaacatcaggacattggacacaccattccggaagaactgcagcttctcaacaccagtacccttgtctctggggaaacttttgccctatgaacctgagaattacccctaccaattgggagaaatatcttcccttccctgtcccggaggaaggctgggtggtggaggggggagaatgactcctttctgaggggtgaggagggaagtggggtatggaatatggaatctatttctgtctgcactagagaggtcgggaggaagttaattctcactgtacttgaagaggctttacataaagggttctctctcatcccaagactgctaatttagtgattctgtgagtcactgtgtgcataccccataacctttccttgggattgcccctatcccacactatgacatcagaactttttttattattgttttatatttgaccaaaatattctggtttagatacagatatttacagaaagtagggaggaaggggaccaagccagacagggacaggtatatgtacagggctgagctgcagagggctacaacttccatataaggtagctttttttgtggctcttttccattgcatatgaaaatgtccatttctggtgtgtgcagacatggtggccattgcccacccaggtaccagcagcagaagactatctgacttggaaagaatgggggtttacaggagtccaggaggtcctttccgctctcctaagagccacacctggtgaatactcagtaaacatttgcggaatgaatgaacaccctgtctgcagcaggacatggacaaataggctctgccatcaggaaatgggaagcaagaaaacggtaactcaagaggacagaggctggtgaggaggtaaagcaggcccagtgaaatggacctgacagcccaaactgtcagagaggaggaaagcaggcatttgattttggtaattgtgccaaagctatgtaagagaataaatgccattgttttaaggaaatacacagtgaagtttttaggaaatacacactaagtatttagggataaagtagttatccctaaatagtagtctgccacatgccaaacaatgttaggtactttccatacaacgaatctattattcccatcttacagataaaacaactgaggctcagggagattctgtgacttacctaaggccacacagttagcaacaagccaatattcaaatccagatgatttttactcccaaggacaataaatccaactcaataacttcaaaaaaaag

SEQ ID NO: 278251 - DNA, 1978 bp, Homo sapiens
ggccccgcagaggacttgcctccaccgccacctgcaagtccgcccagctggacttctgcgcaggctccaggagttgtttgctgtctctatggcaacccagtagctggagtctgaagatggagaccaacgagtctacggagggatcgcggtcgcggtcgcgatctttagacatacagcccagctccgaaggactggggcccacttcggaaccgtttccttcttcagatgacagtcccagagagccaccaaccacctggatcaagtcccaagcatgcaggatggctctgagagttttttcttccgacacggacaccggggactgctgactatgcaactaaagtcacccatgccctccagcaccacccagaaagactcgtaccagccaccaggaaacgtctattggccacttcgagggaagcgtgaagccatgctggagatgctcctgcagcatcagatctggtaagggattgggtaaaggggaagagggatggggaggagaaaaattgggtgagaatggccttgacacccctcgggctacatagtaaagaggtgcaggcagaacaggaacccacaaggaagctcttcgaggttgagtctgtgacacaccatgactaccgaatggagctggcacaagcagggactcctgccccaacaaagcctcacgactaccgccaggagcaacctgagaccttctggatacagagggcaccacagctgccgggtgtcagtaacatcaggacattggacacaccattccggaagaactgcagcttctcaacaccagtacccttgtctctggggaaacttttgccctatgaacctgagaattacccctaccaattgggagaaatatcttcccttccctgtcccggaggaaggctgggtggtggaggggggagaatgactcctttctgaggggtgaggagggaagtggggtatggaatatggaatctatttctgtctgcactagagaggtcgggaggaagttaattctcactgtacttgaagaggctttacataaagggttctctctcatcccaagactgctaatttagtgattctgtgagtcactgtgtgcataccccataacctttccttgggattgcccctatcccacactatgacatcagaactttttttattattgttttatatttgaccaaaatattctggtttagatacagatatttacagaaagtagggaggaaggggaccaagccagacagggacaggtatatgtacagggctgagctgcagagggctacaacttccatataaggtagctttttttgtggctcttttccattgcatatgaaaatgtccatttctggtgtgtgcagacatggtggccattgcccacccaggtaccagcagcagaagactatctgacttggaaagaatgggggtttacaggagtccaggaggtcctttccgctctcctaagagccacacctggtgaatactcagtaaacatttgcggaatgaatgaacaccctgtctgcagcaggacatggacaaataggctctgccatcaggaaatgggaagcaagaaaacggtaactcaagaggacagaggctggtgaggaggtaaagcaggcccagtgaaatggacctgacagcccaaactgtcagagaggaggaaagcaggcatttgattttggtaattgtgccaaagctatgtaagagaataaatgccattgttttaaggaaatacacagtgaagtttttaggaaatacacactaagtatttagggataaagtagttatccctaaatagtagtctgccacatgccaaacaatgttaggtactttccatacaacgaatctattattcccatcttacagataaaacaactgaggctcagggagattctgtgacttacctaaggccacacagttagcaacaagccaatattcaaatccagatgatttttactcccaaggacaataaatccaactcaataacttcaaaaaaaag

SEQ ID NO: 278252 - DNA, 5528 bp, Homo sapiens
ggcctccgcccgccagccgctctcctcccgctcgccgttagggaggctctgcacctcagccgccgcctctgtcgccactctctccccctgttccgcgtctgcgtcgccaccaccgccgggggtatccggggggtcgcttaccgggctggccccgcgccacagccgtagctttaacctccccgtcagcggccgccccaggaagaggcttctcggccgcggagccacttggggcctcagttctcgccctcttgccgtcgccgcgggtcctggagaagcggccgcggccagggaacggggcatcgcggttccaacgattaactgctgaagtactgatcgagttctgcatttcttcaatgaggaactacaggctgatcttctgccataatctcaaacagccataaatgacaaaagaatgcttgctcagtgagggtagctggtgcagaagccattttttaaacttaggtatttaagtactgaaagaaaagacagctttgatttctggctgcaaaaaagatatgaggaagagctcctccccttccttgagtaactgcaactccgttcttgctaacaaaatatttggaattccacttgatgagctgcagcagggaggacatccagacaatgaggttccattcatagtccgccacgttgtggactatattgaggaacatggaggtctggagcaacaaggactttttcaagtcaatggaaatgctgagacagtggagtggcttcggcagagatacgacagcggagaagaggtggatttggttaaggaagcagatgttccctcagctattagccttcttagattttttcttcaagaacttcctgaacctgttatccctggcagtttacatattcacttgatgcagctttctcaagattataataatgaagatgaatttggaagaaagttgaggttcctcttgcaacagcttccacctgttaattatagtttgttaaagtttctgtgtagatttttagccaatgtagcatcacatcatgaagaaatttggtctgcaaattctttggctgctgtctttggtccagatgtcttccacatttacacagatgtggaagacatgaaagagcaagaaatagtgagcaggataatggctggacttctggaaaactactatgagttttttgagaatgaagaggaagatttttcatctaatgatttgagttcaattactgaacaggttaatgaactttctgaggaagaagaggaagatgaaaagctggaacatattgaagaacttccagaagagggtgcagaaaaatcaaatgacatgccagaggtggtacaattaaggatgactgaaaacatcctggaatcaaatagtgttacggcaacaagcacccatatatctcccatcagcatcctaccagcctctacagatattttagaaagaacaattagagcagctgtggaacagcacctttttgatcttcagagcagcatagatcatgatcttaagaatttacaacagcaaagtgtggtgtgtaataatgaagcagaaagtattcattgtgatggggaaggatctaataaccagattgatattgctgatgatattattaatgccagtgaaagtaacagagactgttcaaaacctgtggctagcactaatttagacaatgaagctatgcagcaagattgtgtatttgagaatgaagaaaatacccagtctgtaggtatattgttagagccatgcagtgaccgtggtgatagtgaagatggctgtcttgagagggaagaatatttgttatttgacagtgataaattgtcacacttgattctggattctagtagcaagatatgtgatttgaatgccaacactgaatcagaagtaccaggaggtcagagtgttggtgttcaaggggaagcagcgtgtgtcagtattccacatttagatctgaagaatgtttctgatggtgataaatgggaagagccatttcctgcttttaagtcttggcaggaggactctgagtctggagaagctcagctgtctccacaagctggaagaatgaatcatcaccccttggaagaggactgtcctccagtattatcacaccgcagtttagattttggtcaaagccagcgtttcctacatgatccagaaaagttggattcctcatctaaagcactgtcttttactagaattcgaagatcatcctttagttcaaaagatgaaaagagagaggacagaacaccttatcagctggtcaagaaacttcagaagaaaatcagacaatttgaggaacagtttgaaagggaaagaaatagcaagccctcctacagtgatattgctgccaatccaaaggtattaaaatggatgacagagcttacaaaactgcggaagcaaattaaagatgcaaaacacaaaaattctgatggagaatttgtacctcagacacgtccacgtagtaacacacttccaaaaagctttggctcttctctagaccatgaagatgaagagaatgaagatgaacccaaggtcattcagaaggagaaaaaaccatctaaagaagcaacccttgaacttattcttaaaagactgaaagaaaaacgtattgagaggtgtcttccagaagatatcaagaaaatgaccaaagatcatttggtagaagagaaagcttctcttcagaaaagtcttctttactatgaaagtcaacatggaaggccggtgaccaaggaagaaaggcacattgttaaacctctctatgatagatacaggcttgtaaaacaaatgctgacaagagctagcatcactcctgtccttggatctccatccaccaagcgaaggggtcagatgttacagccaatcatagaaggagaaactgcacatttttttgaagaaatcaaggaggaagaagaagatggtgttaatctgtcctctgagttaggtgatatgttgaaaactgcagtacaggtacagtcttcattagaaaactctgaatctgatgttgaagaaaatcaagaaaaactggctctggatctccgattgtcaagttctcgagcagcttctatgcctgaattattggaacaactttggaaagccagagctgaaaaaaagaaactacgcaaaacgttgcgggaatttgaagaagcattttatcaacaaaatggaaggaatgcccagaaagaggatcgtgttccagtgcttgaggagtacagagagtacaagaaaattaaagccaagcttaggcttcttgaagttcttataagcaaacaagattcttcaaaatccatataagatacgttccttgaaaattcatatcataaagtcagttgtattccttgaagctatcatcgtgtgtacttggctggtacttaaattcgttttgtcaggcactcagagaatctcattttgtacttggttgtggtgccactaaacaaaacaaatgatgggagagtaagtaggccctctcaagggagcgtaagtgatgttccatattaaccacagactgtcctctccacctttagcaaacatatggtttacttcattgttttgtactacagatacatccttttagcaaaagactggaattttatcctttcaacttcaagaactttggaaatgcaagctttttgttattaccaactttttgtttctcattactgaagaaaattggaggaaaatcttcatactgaattcttctgttgcctttttcttacagaatgactgaaaatttgaaagaaaagcctataaaagtgcacatacgcaactgtgttctctgttttcctagaaaaccaaaatcaaactgagatttcaagtcgtactatggaacacctttctgtttaattcccaaagtgacatcttctcacaggtagtatgttagtaaaattttgcaattcgctggtcacacagctcccggatgaagataacagttggtagaccaaaaggtgacctcgcttagtatattgaaaacacacaccacacatcacacacagaactgaatcataccacgtgctgcctatgggacttcagttactgtttcctgagttactgtttatccgctggcaatggtgtgatttgtctggatcagatccgcgctattccccaacccacctccagataatgtgagaaaatagccatgtcagtatgtaggaactctgatggtgctcagatttgtgtgttcaatcaatgggcttaaatcagcaaaatattatgcctaaagtaaatctgttcttaacaagggctctaccactgcattttcacatgtaccttcagggggttatctttttttttttcccctcctattttaatcagcaaaatccataccaaaacaacgacaacaacgccctcttaagggaccaccctttggtcaatcataacatgctgtttaaagcagctgtttacaggatgtgtagtggtatgccccttgtcatatactcttagcatatctttttttcctttggctttgcatggcttttcttcaggtactgtctcggtatcattctgctaatcattgttacagaatggtgacttcatttgtgctaacagtacaacagcagatttgggtcaggcttaatctaagtgttaacttttttttctggtgcttttttggattgatgactgtctcactttgactatacccatgttttgcatgcaatgactcatgcatggttttcttaactagctaatattaacaatttattccatataaaaatggaattttgcaacatcctttaataaggtgagggaagcatgaacctcagacttctggcactattacatagtaagcacatgaagtagtttgataataaatagcagttctagtacttcacatttcacccgtgtgtgcaatgcctttttctggggggtggggggtgagggaaaacctggtagtgaatgtgtagttggggaataaagaaaagcactaaatcctgccctttttgtgtggtttccttttgatacaactaggttattcataatgtatacctagaaaagtgaaattgaaaataccaaaagatgtatcatttttatttgaatccatcatgcagtgtacatttcagataatttccttcagtctccagataggagtgtatccaaacatctaattttatgtgcactgtgtatcttatatgaatgttttattttatataccacatgcaaaaatgtccatatgcactatttaaatgttttaaataatatattccttctttataatgctaaatctatatgagtaccatatttttataagtcagtggtctgactggtttcattttagaattaacagctgcttcaatatgttattcaatgttaatgtttggctgtgagtagaatatgtaaaagtggcatggcagcacttatgctctgtgacagtattgtgtgtcatagttgagcagtagctggtagaattaggcagttggtgatagttttactttggtacaaataaaaactgtatatctatatacaaataatatatagatatatatgtccaccagtataatggcattgctgtgtctggcacttcattgtacagacttttataataaaagaacttgaaagttctaa

SEQ ID NO: 278253 - DNA, 432 bp, Homo sapiens
taccaaatggctgtggatggtagtggtgatacatattacctaatagagagaaatgcagagtacctgctatacttcatatgacccaggttttgagggaagataaattactctctgtaaaaagagatgctaagtactacagactattataaatgatagctaattaggggtgtttgactaatctgtattctaatatcctaatttagattggcaacttctcttatctgagtattgggagctccattaatacatggtagtgttctttttgtcagtctgtaggtatattgttagagccatgcagtgaccgtggtgatagtgaagatggctgtcttgagaggtaagcattttttcttgttgctaattaatcattttgagaattggagctcctcacagatttttgaggtgatttttttagatgaatgtcctaataaatat

SEQ ID NO: 278254 - DNA, 5568 bp, Homo sapiens
ggcctccgcccgccagccgctctcctcccgctcgccgttagggaggctctgcacctcagccgccgcctctgtcgccactctctccccctgttccgcgtctgcgtcgccaccaccgccgggggtatccggggggtcgcttaccgggctggccccgcgccacagccgtagctttaacctccccgtcagcggccgccccaggaagaggcttctcggccgcggagccacttggggcctcagttctcgccctcttgccgtcgccgcgggtcctggagaagcggccgcggccagggaacggggcatcgcggttccaacgattaactgctgaagtactgatcgagttctgcatttcttcaatgaggaactacaggctgatcttctgccataatctcaaacagccataaatgacaaaagaatgcttgctcagtgagggtagctggtgcagaagccattttttaaacttaggtatttaagtactgaaagaaaagacagctttgatttctggctgcaaaaaagatatgaggaagagctcctccccttccttgagtaactgcaactccgttcttgctaacaaaatatttggaattccacttgatgagctgcagcagggaggacatccagacaatgaggttccattcatagtccgccacgttgtggactatattgaggaacatggaggtctggagcaacaaggactttttcaagtcaatggaaatgctgagacagtggagtggcttcggcagagatacgacagcggagaagaggtggatttggttaaggaagcagatgttccctcagctattagccttcttagattttttcttcaagaacttcctgaacctgttatccctggcagtttacatattcacttgatgcagctttctcaagattataataatgaagatgaatttggaagaaagttgaggttcctcttgcaacagcttccacctgttaattatagtttgttaaagtttctgtgtagatttttagccaatgtagcatcacatcatgaagaaatttggtctgcaaattctttggctgctgtctttggtccagatgtcttccacatttacacagatgtggaagacatgaaagagcaagaaatagtgagcaggataatggctggacttctggaaaactactatgagttttttgagaatgaagaggaagatttttcatctaatgatttgagttcaattactgaacaggttaatgaactttctgaggaagaagaggaagatgaaaagctggaacatattgaagaacttccagaagagggtgcagaaaaatcaaatgacatgccagaggtggtacaattaaggatgactgaaaacatcctggaatcaaatagtgttacggcaacaagcacccatatatctcccatcagcatcctaccagcctctacagatattttagaaagaacaattagagcagctgtggaacagcacctttttgatcttcagagcagcatagatcatgatcttaagaatttacaacagcaaagtgtggtgtgtaataatgaagcagaaagtattcattgtgatggggaaggatctaataaccagattgatattgctgatgatattattaatgccagtgaaagtaacagagactgttcaaaacctgtggctagcactaatttagacaatgaagctatgcagcaagattgtgtatttgagaatgaagaaaatacccagtctgtaggtatattgttagagccatgcagtgaccgtggtgatagtgaagatggctgtcttgagagggaagaatatttgttatttgacagtgataaattgtcacacttgattctggattctagtagcaagatatgtgatttgaatgccaacactgaatcagaagtaccaggaggtcagagtgttggtgttcaaggggaagcagcgtgtgtcagtattccacatttagatctgaagaatgtttctgatggtgataaatgggaagagccatttcctgcttttaagtcttggcaggaggactctgagtctggagaagctcagctgtctccacaagctggaagaatgaatcatcaccccttggaagaggactgtcctccagtattatcacaccgcagtttagattttggtcaaagccagcgtttcctacatgatccagaaaagttggattcctcatctaaagcactgtcttttactagaattcgaagatcatcctttagttcaaaagatgaaaagagagaggacagaacaccttatcagctggtcaagaaacttcagaagaaaatcagacaatttgaggaacagtttgaaagggaaagaaatagcaagccctcctacagtgatattgctgccaatccaaaggtattaaaatggatgacagagcttacaaaactgcggaagcaaattaaagatgcaaaacacaaaaattctgatggagaatttgtacctcagacacgtccacgtagtaacacacttccaaaaagctttggctcttctctagaccatgaagatgaagagaatgaagatgaacccaaggtcattcagaaggagaaaaaaccatctaaagaagcaacccttgaacttattcttaaaagactgaaagaaaaacgtattgagaggtgtcttccagaagatatcaagaaaatgaccaaagatcatttggtagaagagaaagcttctcttcagaaaagtcttctttactatgaaagtcaacatggaaggccggtgaccaaggaagaaaggcacattgttaaacctctctatgatagatacaggcttgtaaaacaaatgctgacaagagctagcatcactcctgtccttggatctccatccaccaagcgaaggggtcagatgttacagccaatcatagaaggagaaactgcacatttttttgaagaaatcaaggaggaagaagaagatggtgttaatctgtcctctgagttaggtgatatgttgaaaactgcagtacaggtacagtcttcattagaaaactctgaatctgatgttgaagaaaatcaagaaaaactggctctggatctccgattgtcaagttctcgagcagcttctatgcctgaattattggaacaactttggaaagccagagctgaaaaaaagaaactacgcaaaacgttgcgggaatttgaagaagcattttatcaacaaaatggaaggaatgcccagaaagaggatcgtgttccagtgcttgaggagtacagagagtacaagaaaattaaagccaagcttaggcttcttgaagttcttataagcaaacaagattcttcaaaatccatataagatacgttccttgaaaattcatatcataaagtcagttgtattccttgaagctatcatcgtgtgtacttggctggtacttaaattcgttttgtcaggcactcagagaatctcattttgtacttggttgtggtgccactaaacaaaacaaatgatgggagagtaagtaggccctctcaagggagcgtaagtgatgttccatattaaccacagactgtcctctccacctttagcaaacatatggtttacttcattgttttgtactacagatacatccttttagcaaaagactggaattttatcctttcaacttcaagaactttggaaatgcaagctttttgttattaccaactttttgtttctcattactgaagaaaattggaggaaaatcttcatactgaattcttctgttgcctttttcttacagaatgactgaaaatttgaaagaaaagcctataaaagtgcacatacgcaactgtgttctctgttttcctagaaaaccaaaatcaaactgagatttcaagtcgtactatggaacacctttctgtttaattcccaaagtgacatcttctcacaggtagtatgttagtaaaattttgcaattcgctggtcacacagctcccggatgaagataacagttggtagaccaaaaggtgacctcgcttagtatattgaaaacacacaccacacatcacacacagaactgaatcataccacgtgctgcctatgggacttcagttactgtttcctgagttactgtttatccgctggcaatggtgtgatttgtctggatcagatccgcgctattccccaacccacctccagataatgtgagaaaatagccatgtcagtatgtaggaactctgatggtgctcagatttgtgtgttcaatcaatgggcttaaatcagcaaaatattatgcctaaagtaaatctgttcttaacaagggctctaccactgcattttcacatgtaccttcagggggttatctttttttttttcccctcctattttaatcagcaaaatccataccaaaacaacgacaacaacgccctcttaagggaccaccctttggtcaatcataacatgctgtttaaagcagctgtttacaggatgtgtagtggtatgccccttgtcatatactcttagcatatctttttttcctttggctttgcatggcttttcttcaggtactgtctcggtatcattctgctaatcattgttacagaatggtgacttcatttgtgctaacagtacaacagcagatttgggtcaggcttaatctaagtgttaacttttttttctggtgcttttttggattgatgactgtctcactttgactatacccatgttttgcatgcaatgactcatgcatggttttcttaactagctaatattaacaatttattccatataaaaatggaattttgcaacatcctttaataaggtgagggaagcatgaacctcagacttctggcactattacatagtaagcacatgaagtagtttgataataaatagcagttctagtacttcacatttcacccgtgtgtgcaatgcctttttctggggggtggggggtgagggaaaacctggtagtgaatgtgtagttggggaataaagaaaagcactaaatcctgccctttttgtgtggtttccttttgatacaactaggttattcataatgtatacctagaaaagtgaaattgaaaataccaaaagatgtatcatttttatttgaatccatcatgcagtgtacatttcagataatttccttcagtctccagataggagtgtatccaaacatctaattttatgtgcactgtgtatcttatatgaatgttttattttatataccacatgcaaaaatgtccatatgcactatttaaatgttttaaataatatattccttctttataatgctaaatctatatgagtaccatatttttataagtcagtggtctgactggtttcattttagaattaacagctgcttcaatatgttattcaatgttaatgtttggctgtgagtagaatatgtaaaagtggcatggcagcacttatgctctgtgacagtattgtgtgtcatagttgagcagtagctggtagaattaggcagttggtgatagttttactttggtacaaataaaaactgtatatctatatacaaataatatatagatatatatgtccaccagtataatggcattgctgtgtctggcacttcattgtacagacttttataataaaagaacttgaaagttctaagtcattgtaaatgtatgtttgtttttccactgggcttaaa

SEQ ID NO: 278255 - DNA, 5376 bp, Homo sapiens
ggcctccgcccgccagccgctctcctcccgctcgccgttagggaggctctgcacctcagccgccgcctctgtcgccactctctccccctgttccgcgtctgcgtcgccaccaccgccgggggtatccggggggtcgcttaccgggctggccccgcgccacagccgtagctttaacctccccgtcagcggccgccccaggaagaggcttctcggccgcggagccacttggggcctcagttctcgccctcttgccgtcgccgcgggtcctggagaagcggccgcggccagggaacggggcatcgcggttccaacgattaactgctgaagtactgatcgagttctgcatttcttcaatgaggaactacaggctgatcttctgccataatctcaaacagccataaatgacaaaagaatgcttgctcagtgagggtagctggtgcagaagccattttttaaacttaggtatttaagtactgaaaggaggtctggagcaacaaggactttttcaagtcaatggaaatgctgagacagtggagtggcttcggcagagatacgacagcggagaagaggtggatttggttaaggaagcagatgttccctcagctattagccttcttagattttttcttcaagaacttcctgaacctgttatccctggcagtttacatattcacttgatgcagctttctcaagattataataatgaagatgaatttggaagaaagttgaggttcctcttgcaacagcttccacctgttaattatagtttgttaaagtttctgtgtagatttttagccaatgtagcatcacatcatgaagaaatttggtctgcaaattctttggctgctgtctttggtccagatgtcttccacatttacacagatgtggaagacatgaaagagcaagaaatagtgagcaggataatggctggacttctggaaaactactatgagttttttgagaatgaagaggaagatttttcatctaatgatttgagttcaattactgaacaggttaatgaactttctgaggaagaagaggaagatgaaaagctggaacatattgaagaacttccagaagagggtgcagaaaaatcaaatgacatgccagaggtggtacaattaaggatgactgaaaacatcctggaatcaaatagtgttacggcaacaagcacccatatatctcccatcagcatcctaccagcctctacagatattttagaaagaacaattagagcagctgtggaacagcacctttttgatcttcagagcagcatagatcatgatcttaagaatttacaacagcaaagtgtggtgtgtaataatgaagcagaaagtattcattgtgatggggaaggatctaataaccagattgatattgctgatgatattattaatgccagtgaaagtaacagagactgttcaaaacctgtggctagcactaatttagacaatgaagctatgcagcaagattgtgtatttgagaatgaagaaaatacccagtctgtaggtatattgttagagccatgcagtgaccgtggtgatagtgaagatggctgtcttgagagggaagaatatttgttatttgacagtgataaattgtcacacttgattctggattctagtagcaagatatgtgatttgaatgccaacactgaatcagaagtaccaggaggtcagagtgttggtgttcaaggggaagcagcgtgtgtcagtattccacatttagatctgaagaatgtttctgatggtgataaatgggaagagccatttcctgcttttaagtcttggcaggaggactctgagtctggagaagctcagctgtctccacaagctggaagaatgaatcatcaccccttggaagaggactgtcctccagtattatcacaccgcagtttagattttggtcaaagccagcgtttcctacatgatccagaaaagttggattcctcatctaaagcactgtcttttactagaattcgaagatcatcctttagttcaaaagatgaaaagagagaggacagaacaccttatcagctggtcaagaaacttcagaagaaaatcagacaatttgaggaacagtttgaaagggaaagaaatagcaagccctcctacagtgatattgctgccaatccaaaggtattaaaatggatgacagagcttacaaaactgcggaagcaaattaaagatgcaaaacacaaaaattctgatggagaatttgtacctcagacacgtccacgtagtaacacacttccaaaaagctttggctcttctctagaccatgaagatgaagagaatgaagatgaacccaaggtcattcagaaggagaaaaaaccatctaaagaagcaacccttgaacttattcttaaaagactgaaagaaaaacgtattgagaggtgtcttccagaagatatcaagaaaatgaccaaagatcatttggtagaagagaaagcttctcttcagaaaagtcttctttactatgaaagtcaacatggaaggccggtgaccaaggaagaaaggcacattgttaaacctctctatgatagatacaggcttgtaaaacaaatgctgacaagagctagcatcactcctgtccttggatctccatccaccaagcgaaggggtcagatgttacagccaatcatagaaggagaaactgcacatttttttgaagaaatcaaggaggaagaagaagatggtgttaatctgtcctctgagttaggtgatatgttgaaaactgcagtacaggtacagtcttcattagaaaactctgaatctgatgttgaagaaaatcaagaaaaactggctctggatctccgattgtcaagttctcgagcagcttctatgcctgaattattggaacaactttggaaagccagagctgaaaaaaagaaactacgcaaaacgttgcgggaatttgaagaagcattttatcaacaaaatggaaggaatgcccagaaagaggatcgtgttccagtgcttgaggagtacagagagtacaagaaaattaaagccaagcttaggcttcttgaagttcttataagcaaacaagattcttcaaaatccatataagatacgttccttgaaaattcatatcataaagtcagttgtattccttgaagctatcatcgtgtgtacttggctggtacttaaattcgttttgtcaggcactcagagaatctcattttgtacttggttgtggtgccactaaacaaaacaaatgatgggagagtaagtaggccctctcaagggagcgtaagtgatgttccatattaaccacagactgtcctctccacctttagcaaacatatggtttacttcattgttttgtactacagatacatccttttagcaaaagactggaattttatcctttcaacttcaagaactttggaaatgcaagctttttgttattaccaactttttgtttctcattactgaagaaaattggaggaaaatcttcatactgaattcttctgttgcctttttcttacagaatgactgaaaatttgaaagaaaagcctataaaagtgcacatacgcaactgtgttctctgttttcctagaaaaccaaaatcaaactgagatttcaagtcgtactatggaacacctttctgtttaattcccaaagtgacatcttctcacaggtagtatgttagtaaaattttgcaattcgctggtcacacagctcccggatgaagataacagttggtagaccaaaaggtgacctcgcttagtatattgaaaacacacaccacacatcacacacagaactgaatcataccacgtgctgcctatgggacttcagttactgtttcctgagttactgtttatccgctggcaatggtgtgatttgtctggatcagatccgcgctattccccaacccacctccagataatgtgagaaaatagccatgtcagtatgtaggaactctgatggtgctcagatttgtgtgttcaatcaatgggcttaaatcagcaaaatattatgcctaaagtaaatctgttcttaacaagggctctaccactgcattttcacatgtaccttcagggggttatctttttttttttcccctcctattttaatcagcaaaatccataccaaaacaacgacaacaacgccctcttaagggaccaccctttggtcaatcataacatgctgtttaaagcagctgtttacaggatgtgtagtggtatgccccttgtcatatactcttagcatatctttttttcctttggctttgcatggcttttcttcaggtactgtctcggtatcattctgctaatcattgttacagaatggtgacttcatttgtgctaacagtacaacagcagatttgggtcaggcttaatctaagtgttaacttttttttctggtgcttttttggattgatgactgtctcactttgactatacccatgttttgcatgcaatgactcatgcatggttttcttaactagctaatattaacaatttattccatataaaaatggaattttgcaacatcctttaataaggtgagggaagcatgaacctcagacttctggcactattacatagtaagcacatgaagtagtttgataataaatagcagttctagtacttcacatttcacccgtgtgtgcaatgcctttttctggggggtggggggtgagggaaaacctggtagtgaatgtgtagttggggaataaagaaaagcactaaatcctgccctttttgtgtggtttccttttgatacaactaggttattcataatgtatacctagaaaagtgaaattgaaaataccaaaagatgtatcatttttatttgaatccatcatgcagtgtacatttcagataatttccttcagtctccagataggagtgtatccaaacatctaattttatgtgcactgtgtatcttatatgaatgttttattttatataccacatgcaaaaatgtccatatgcactatttaaatgttttaaataatatattccttctttataatgctaaatctatatgagtaccatatttttataagtcagtggtctgactggtttcattttagaattaacagctgcttcaatatgttattcaatgttaatgtttggctgtgagtagaatatgtaaaagtggcatggcagcacttatgctctgtgacagtattgtgtgtcatagttgagcagtagctggtagaattaggcagttggtgatagttttactttggtacaaataaaaactgtatatctatatacaaataatatatagatatatatgtccaccagtataatggcattgctgtgtctggcacttcattgtacagacttttataataaaagaacttgaaagttctaagtcattgtaaatgtatgtttgtttttccactgggcttaaa

SEQ ID NO: 278256 - DNA, 5474 bp, Homo sapiens
ggcctccgcccgccagccgctctcctcccgctcgccgttagggaggctctgcacctcagccgccgcctctgtcgccactctctccccctgttccgcgtctgcgtcgccaccaccgccgggggtatccggggggtcgcttaccgggctggccccgcgccacagccgtagctttaacctccccgtcagcggccgccccaggaagaggcttctcggccgcggagccacttggggcctcagttctcgccctcttgccgtcgccgcgggtcctggagaagcggccgcggccagggaacggggcatcgcggttccaacgattaactgctgaagtactgatcgagttctgcatttcttcaatgaggaactacaggctgatcttctgccataatctcaaacagccataaatgacaaaagaatgcttgctcagtgagggtagctggtgcagaagccattttttaaacttaggtatttaagtactgaaagaaaagacagctttgatttctggctgcaaaaaagatatgaggaagagctcctccccttccttgagtaactgcaactccgttcttgctaacaaaatatttggaattccacttgatgagctgcagcagggaggacatccagacaatgaggttccattcatagtccgccacgttgtggactatattgaggaacatggaggtctggagcaacaaggactttttcaagtcaatggaaatgctgagacagtggagtggcttcggcagagatacgacagcggagaagaggtggatttggttaaggaagcagatgttccctcagctattagccttcttagattttttcttcaagaacttcctgaacctgttatccctggcagtttacatattcacttgatgcagctttctcaagattataataatgaagatgaatttggaagaaagttgaggttcctcttgcaacagcttccacctgttaattatagtttgttaaagtttctgtgtagatttttagccaatgtagcatcacatcatgaagaaatttggtctgcaaattctttggctgctgtctttggtccagatgtcttccacatttacacagatgtggaagacatgaaagagcaagaaatagtgagcaggataatggctggacttctggaaaactactatgagttttttgagaatgaagaggaagatttttcatctaatgatttgagttcaattactgaacaggttaatgaactttctgaggaagaagaggaagatgaaaagctggaacatattgaagaacttccagaagagggtgcagaaaaatcaaatgacatgccagaggtggtacaattaaggatgactgaaaacatcctggaatcaaatagtgttacggcaacaagcacccatatatctcccatcagcatcctaccagcctctacagatattttagaaagaacaattagagcagctgtggaacagcacctttttgatcttcagagcagcatagatcatgatcttaagaatttacaacagcaaagtgtggtgtgtaataatgaagcagaaagtattcattgtgatggggaaggatctaataaccagattgatattgctgatgatattattaatgccagtgaaagtaacagagactgttcaaaacctgtggctagcactaatttagacaatgaagctatgcagcaagattgtgtatttgagaatgaagaaaatacccagtctgtaggtatattgttagagccatgcagtgaccgtggtgatagtgaagatggctgtcttgagagggaagaatatttgttatttgacagtgataaattgtcacacttgattctggattctagtagcaagatatgtgatttgaatgccaacactgaatcagaagtaccaggaggtcagagtgttggtgttcaaggggaagcagcgtgtgtcagtattccacatttagatctgaagaatgtttctgatggtgataaatgggaagagccatttcctgcttttaagtcttggcaggaggactctgagtctggagaagctcagctgtctccacaagctggaagaatgaatcatcaccccttggaagaggactgtcctccagtattatcacaccgcagtttagattttggtcaaagccagcgtttcctacatgatccagaaaagttggattcctcatctaaagcactgtcttttactagaattcgaagatcatcctttagttcaaaagatgaaaagagagaggacagaacaccttatcagctggtcaagaaacttcagaagaaaatcagacaatttgaggaacagtttgaaagggaaagaaatagcaagccctcctacagtgatattgctgccaatccaaaggtattaaaatggatgacagagcttacaaaactgcggaagcaaattaaagatgcaaaacacaaaaattctgatggagaatttgtacctcagacacgtccacgtagtaacacacttccaaaaagctttggctcttctctagaccatgaagatgaagagaatgaagatgaacccaaggtcattcagaaggagaaaaaaccatctaaagaagcaacccttgaacttattcttaaaagactgaaagaaaaacgtattgagaggtgtcttccagaagatatcaagaaaatgaccaaagatcatttggtagaagagaaagcttctcttcagaaaagtcttctttactatgaaagtcaacatggaaggccggtgaccaaggaagaaaggcacattgttaaacctctctatgatagatacaggcttgtaaaacaaatgctgacaagagctagcatcactcctgtccttggatctccatccaccaagcgaaggggtcagatgttacagccaatcatagaaggagaaactgcacatttttttgaagaaatcaaggaggaagaagaagatggtgttaatctgtcctctgagttaggtgatatgttgaaaactgcagtacaggtacagtcttcattagaaaactctgaatctgatgttgaagaaaatcaagaaaaactggctctggatctccgattgtcaagttctcgagcagcttctatgcctgaattattggaacaactttggaaagccagagctgaaaaaaagaaactacgcaaaacgttgcgggaatttgaagaagcattttatcaacaaaatggaaggaatgcccagaaagaggatcgtgttccagtgcttgaggagtacagagagtacaagaaaattaaagccaagcttaggcttcttgaagttcttataagcaaacaagattcttcaaaatccatataagatacgttccttgaaaattcatatcataaagtcagttgtattccttgaagctatcatcgtgtgtacttggctggtacttaaattcgttttgtcaggcactcagagaatctcattttgtacttggttgtggtgccactaaacaaaacaaatgatgggagagtaagtaggccctctcaagggagcgtaagtgatgttccatattaaccacagactgtcctctccacctttagcaaacatatggtttacttcattgttttgtactacagatacatccttttagcaaaagactggaattttatcctttcaacttcaagaactttggaaatgcaagctttttgttattaccaactttttgtttctcattactgaagaaaattggaggaaaatcttcatactgaattcttctgttgcctttttcttacagaatgactgaaaatttgaaagaaaagcctataaaagtgcacatacgcaactgtgttctctgttttcctagaaaaccaaaatcaaactgagatttcaagtcgtactatggaacacctttctgtttaattcccaaagtgacatcttctcacaggtagtatgttagtaaaattttgcaattcgctggtcacacagctcccggatgaagataacagttggtagaccaaaaggtgacctcgcttagtatattgaaaacacacaccacacatcacacacagaactgaatcataccacgtgctgcctatgggacttcagttactgtttcctgagttactgtttatccgctggcaatggtgtgatttgtctggatcagatccgcgctattccccaacccacctccagataatgtgagaaaatagccatgtcagtatgtaggaactctgatggtgctcagatttgtgtgttcaatcaatgggcttaaatcagcaaaatattatgcctaaagtaaatctgttcttaacaagggctctaccactgcattttcacatgtaccttcagggggttatctttttttttttcccctcctattttaatcagcaaaatccataccaaaacaacgacaacaacgccctcttaagggaccaccctttggtcaatcataacatgctgtttaaagcagctgtttacaggatgtgtagtggtatgccccttgtcatatactcttagcatatctttttttcctttggctttgcatggcttttcttcaggtactgtctcggtatcattctgctaatcattgttacagaatggtgacttcatttgtgctaacagtacaacagcagatttgggtcaggcttaatctaagtgttaacttttttttctggtgcttttttggattgatgactgtctcactttgactatacccatgttttgcatgcaatgactcatgcatggttttcttaactagctaatattaacaatttattccatatacttctggcactattacatagtaagcacatgaagtagtttgataataaatagcagttctagtacttcacatttcacccgtgtgtgcaatgcctttttctggggggtggggggtgagggaaaacctggtagtgaatgtgtagttggggaataaagaaaagcactaaatcctgccctttttgtgtggtttccttttgatacaactaggttattcataatgtatacctagaaaagtgaaattgaaaataccaaaagatgtatcatttttatttgaatccatcatgcagtgtacatttcagataatttccttcagtctccagataggagtgtatccaaacatctaattttatgtgcactgtgtatcttatatgaatgttttattttatataccacatgcaaaaatgtccatatgcactatttaaatgttttaaataatatattccttctttataatgctaaatctatatgagtaccatatttttataagtcagtggtctgactggtttcattttagaattaacagctgcttcaatatgttattcaatgttaatgtttggctgtgagtagaatatgtaaaagtggcatggcagcacttatgctctgtgacagtattgtgtgtcatagttgagcagtagctggtagaattaggcagttggtgatagttttactttggtacaaataaaaactgtatatctatatacaaataatatatagatatatatgtccaccagtataatggcattgctgtgtctggcacttcattgtacagacttttataataaaagaacttgaaagttctaa

SEQ ID NO: 278257 - DNA, 5836 bp, Homo sapiens
ggcctccgcccgccagccgctctcctcccgctcgccgttagggaggctctgcacctcagccgccgcctctgtcgccactctctccccctgttccgcgtctgcgtcgccaccaccgccgggggtatccggggggtcgcttaccgggctggccccgcgccacagccgtagctttaacctccccgtcagcggccgccccaggaagaggcttctcggccgcggagccacttggggcctcagttctcgccctcttgccgtcgccgcgggtcctggagaagcggccgcggccagggaacggggcatcgcggttccaacgattaactgctgaagtactgatcgagttctgcatttcttcaatgaggaactacaggctgatcttctgccataatctcaaacagccataaatgacaaaagaatgcttgctcagtgagggtagctggtgcagaagccattttttaaacttaggtatttaagtactgaaagaaaagacagctttgatttctggctgcaaaaaagatatgaggaagagctcctccccttccttgagtaactgcaactccgttcttgctaacaaaatatttggaattccacttgatgagctgcagcagggaggacatccagacaatgaggttccattcatagtccgccacgttgtggactatattgaggaacatggaggtctggagcaacaaggactttttcaagtcaatggaaatgctgagacagtggagtggcttcggcagagatacgacagcggagaagaggtggatttggttaaggaagcagatgttccctcagctattagccttcttagattttttcttcaagaacttcctgaacctgttatccctggcagtttacatattcacttgatgcagctttctcaagattataataatgaagatgaatttggaagaaagttgaggttcctcttgcaacagcttccacctgttaattatagtttgttaaagtttctgtgtagatttttagccaatgtagcatcacatcatgaagaaatttggtctgcaaattctttggctgctgtctttggtccagatgtcttccacatttacacagatgtggaagacatgaaagagcaagaaatagtgagcaggataatggctggacttctggaaaactactatgagttttttgagaatgaagaggaagatttttcatctaatgatttgagttcaattactgaacaggttaatgaactttctgaggaagaagaggaagatgaaaagctggaacatattgaagaacttccagaagagggtgcagaaaaatcaaatgacatgccagaggtggtacaattaaggatgactgaaaacatcctggaatcaaatagtgttacggcaacaagcacccatatatctcccatcagcatcctaccagcctctacagatattttagaaagaacaattagagcagctgtggaacagcacctttttgatcttcagagcagcatagatcatgatcttaagaatttacaacagcaaagtgtggtgtgtaataatgaagcagaaagtattcattgtgatggggaaggatctaataaccagattgatattgctgatgatattattaatgccagtgaaagtaacagagactgttcaaaacctgtggctagcactaatttagacaatgaagctatgcagcaagattgtgtatttgagaatgaagaaaatacccagtctgtaggtatattgttagagccatgcagtgaccgtggtgatagtgaagatggctgtcttgagagggaagaatatttgttatttgacagtgataaattgtcacacttgattctggattctagtagcaagatatgtgatttgaatgccaacactgaatcagaagtaccaggaggtcagagtgttggtgttcaaggggaagcagcgtgtgtcagtattccacatttagatctgaagaatgtttctgatggtgataaatgggaagagccatttcctgcttttaagtcttggcaggaggactctgagtctggagaagctcagctgtctccacaagctggaagaatgaatcatcaccccttggaagaggactgtcctccagtattatcacaccgcagtttagattttggtcaaagccagcgtttcctacatgatccagaaaagttggattcctcatctaaagcactgtcttttactagaattcgaagatcatcctttagttcaaaagatgaaaagagagaggacagaacaccttatcagctggtcaagaaacttcagaagaaaatcagacaatttgaggaacagtttgaaagggaaagaaatagcaagccctcctacagtgatattgctgccaatccaaaggtattaaaatggatgacagagcttacaaaactgcggaagcaaattaaagatgcaaaacacaaaaattctgatggagaatttgtacctcagacacgtccacgtagtaacacacttccaaaaagctttggctcttctctagaccatgaagatgaagagaatgaagatgaacccaaggtcattcagaaggagaaaaaaccatctaaagaagcaacccttgaacttattcttaaaagactgaaagaaaaacgtattgagaggtgtcttccagaagatatcaagaaaatgaccaaagatcatttggtagaagagaaagcttctcttcagaaaagtcttctttactatgaaagtcaacatggaaggccggtgaccaaggaagaaaggcacattgttaaacctctctatgatagatacaggcttgtaaaacaaatgctgacaagagctagcatcactcctgtccttggatctccatccaccaagcgaaggggtcagatgttacagccaatcatagaaggagaaactgcacatttttttgaagaaatcaaggaggaagaagaagatggtgttaatctgtcctctgagttaggtgatatgttgaaaactgcagtacaggtacagtcttcattagaaaactctgaatctgatgttgaagaaaatcaagaaaaactggctctggatctccgattgtcaagttctcgagcagcttctatgcctgaattattggaacaactttggaaagccagagctgaaaaaaagaaactacgcaaaacgttgcgggaatttgaagaagcattttatcaacaaaatggaaggaatgcccagaaagaggatcgtgttccagtgcttgaggagtacagagagtacaagaaaattaaagccaagcttaggcttcttgaagttcttataagcaaacaagattcttcaaaatccatataagatacgttccttgaaaattcatatcataaagtcagttgtattccttgaagctatcatcgtgtgtacttggctggtacttaaattcgttttgtcaggcactcagagaatctcattttgtacttggttgtggtgccactaaacaaaacaaatgatgggagagtaagtaggccctctcaagggagcgtaagtgatgttccatattaaccacagactgtcctctccacctttagcaaacatatggtttacttcattgttttgtactacagatacatccttttagcaaaagactggaattttatcctttcaacttcaagaactttggaaatgcaagctttttgttattaccaactttttgtttctcattactgaagaaaattggaggaaaatcttcatactgaattcttctgttgcctttttcttacagaatgactgaaaatttgaaagaaaagcctataaaagtgcacatacgcaactgtgttctctgttttcctagaaaaccaaaatcaaactgagatttcaagtcgtactatggaacacctttctgtttaattcccaaagtgacatcttctcacaggtagtatgttagtaaaattttgcaattcgctggtcacacagctcccggatgaagataacagttggtagaccaaaaggtgacctcgcttagtatattgaaaacacacaccacacatcacacacagaactgaatcataccacgtgctgcctatgggacttcagttactgtttcctgagttactgtttatccgctggcaatggtgtgatttgtctggatcagatccgcgctattccccaacccacctccagataatgtgagaaaatagccatgtcagtatgtaggaactctgatggtgctcagatttgtgtgttcaatcaatgggcttaaatcagcaaaatattatgcctaaagtaaatctgttcttaacaagggctctaccactgcattttcacatgtaccttcagggggttatctttttttttttcccctcctattttaatcagcaaaatccataccaaaacaacgacaacaacgccctcttaagggaccaccctttggtcaatcataacatgctgtttaaagcagctgtttacaggatgtgtagtggtatgccccttgtcatatactcttagcatatctttttttcctttggctttgcatggcttttcttcaggtactgtctcggtatcattctgctaatcattgttacagaatggtgacttcatttgtgctaacagtacaacagcagatttgggtcaggcttaatctaagtgttaacttttttttctggtgcttttttggattgatgactgtctcactttgactatacccatgttttgcatgcaatgactcatgcatggttttcttaactagctaatattaacaatttattccatataaaaatggaattttgcaacatcctttaataaggtgagggaagcatgaacctcagacttctggcactattacatagtaagcacatgaagtagtttgataataaatagcagttctagtacttcacatttcacccgtgtgtgcaatgcctttttctggggggtggggggtgagggaaaacctggtagtgaatgtgtagttggggaataaagaaaagcactaaatcctgccctttttgtgtggtttccttttgatacaactaggttattcataatgtatacctagaaaagtgaaattgaaaataccaaaagatgtatcatttttatttgaatccatcatgcagtgtacatttcagataatttccttcagtctccagataggagtgtatccaaacatctaattttatgtgcactgtgtatcttatatgaatgttttattttatataccacatgcaaaaatgtccatatgcactatttaaatgttttaaataatatattccttctttataatgctaaatctatatgagtaccatatttttataagtcagtggtctgactggtttcattttagaattaacagctgcttcaatatgttattcaatgttaatgtttggctgtgagtagaatatgtaaaagtggcatggcagcacttatgctctgtgacagtattgtgtgtcatagttgagcagtagctggtagaattaggcagttggtgatagttttactttggtacaaataaaaactgtatatctatatacaaataatatatagatatatatgtccaccagtataatggcattgctgtgtctggcacttcattgtacagacttttataataaaagaacttgaaagttctaaaaaaaaaaaaaaaaaaaaaaaaaaaaaaaagaagaaagaaaaaaaaaaaaaaaaaaaaaaagaaaaaaaaaaaaaaaagagaaaagagaggaaacgcaagaaaaaacaaaacagcaacggcgacgcagagacaggaccaaagaagagaaaaagaaaaacaagaggacgaaaaaaaaaggcagacacagaaacagaagaacaggatgcagcaaaaagaagagaaaaaaaaaaaagaaaccaaacaagacagacgacagaacacaaagaaatacaaagtaggaagacaagaagagtagaataatagaaaa

SEQ ID NO: 278258 - DNA, 5515 bp, Homo sapiens
ggcctccgcccgccagccgctctcctcccgctcgccgttagggaggctctgcacctcagccgccgcctctgtcgccactctctccccctgttccgcgtctgcgtcgccaccaccgccgggggtatccggggggtcgcttaccgggctggccccgcgccacagccgtagctttaacctccccgtcagcggccgccccaggaagaggcttctcggccgcggagccacttggggcctcagttctcgccctcttgccgtcgccgcgggtcctggagaagcggccgcggccagggaacggggcatcgcggttccaacgattaactgctgaagtactgatcgagttctgcatttcttcaatgaggaactacaggctgatcttctgccataatctcaaacagccataaatgacaaaagaatgcttgctcagtgagggtagctggtgcagaagccattttttaaacttaggtatttaagtactgaaagaaaagacagctttgatttctggctgcaaaaaagatatgaggaagagctcctccccttccttgagtaactgcaactccgttcttgctaacaaaatatttggaattccacttgatgagctgcagcagggaggacatccagacaatgaggttccattcatagtccgccacgttgtggactatattgaggaacatggaggtctggagcaacaaggactttttcaagtcaatggaaatgctgagacagtggagtggcttcggcagagatacgacagcggagaagaggtggatttggttaaggaagcagatgttccctcagctattagccttcttagattttttcttcaagaacttcctgaacctgttatccctggcagtttacatattcacttgatgcagctttctcaagattataataatgaagatgaatttggaagaaagttgaggttcctcttgcaacagcttccacctgttaattatagtttgttaaagtttctgtgtagatttttagccaatgtagcatcacatcatgaagaaatttggtctgcaaattctttggctgctgtctttggtccagatgtcttccacatttacacagatgtggaagacatgaaagagcaagaaatagtgagcaggataatggctggacttctggaaaactactatgagttttttgagaatgaagaggaagatttttcatctaatgatttgagttcaattactgaacaggttaatgaactttctgaggaagaagaggaagatgaaaagctggaacatattgaagaacttccagaagagggtgcagaaaaatcaaatgacatgccagaggtggtacaattaaggatgactgaaaacatcctggaatcaaatagtgttacggcaacaagcacccatatatctcccatcagcatcctaccagcctctacagatattttagaaagaacaattagagcagctgtggaacagcacctttttgatcttcagagcagcatagatcatgatcttaagaatttacaacagcaaagtgtggtgtgtaataatgaagcagaaagtattcattgtgatggggaaggatctaataaccagattgatattgctgatgatattattaatgccagtgaaagtaacagagactgttcaaaacctgtggctagcactaatttagacaatgaagctatgcagcaagattgtgtatttgagaatgaagaaaatacccagtctgtaggtatattgttagagccatgcagtgaccgtggtgatagtgaagatggctgtcttgagagggaagaatatttgttatttgacagtgataaattgtcacacttgattctggattctagtagcaagatatgtgatttgaatgccaacactgaatcagaagtaccaggaggtcagagtgttggtgttcaaggggaagcagcgtgtgtcagtattccacatttagatctgaagaatgtttctgatggtgataaatgggaagagccatttcctgcttttaagtcttggcaggaggactctgagtctggagaagctcagctgtctccacaagctggaagaatgaatcatcaccccttggaagaggactgtcctccagtattatcacaccgcagtttagattttggtcaaagccagcgtttcctacatgatccagaaaagttggattcctcatctaaagcactgtcttttactagaattcgaagatcatcctttagttcaaaagatgaaaagagagaggacagaacaccttatcagctggtcaagaaacttcagaagaaaatcagacaatttgaggaacagtttgaaagggaaagaaatagcaagccctcctacagtgatattgctgccaatccaaaggtattaaaatggatgacagagcttacaaaactgcggaagcaaattaaagatgcaaaacacaaaaattctgatggagaatttgtacctcagacacgtccacgtagtaacacacttccaaaaagctttggctcttctctagaccatgaagatgaagagaatgaagatgaacccaaggtcattcagaaggagaaaaaaccatctaaagaagcaacccttgaacttattcttaaaagactgaaagaaaaacgtattgagaggtgtcttccagaagatatcaagaaaatgaccaaagatcatttggtagaagagaaagcttctcttcagaaaagtcttctttactatgaaagtcaacatggaaggccggtgaccaaggaagaaaggcacattgttaaacctctctatgatagatacaggcttgtaaaacaaatgctgacaagagctagcatcactcctgtccttggatctccatccaccaagcgaaggggtcagatgttacagccaatcatagaaggagaaactgcacatttttttgaagaaatcaaggaggaagaagaagatggtgttaatctgtcctctgagttaggtgatatgttgaaaactgcagtacaggtacagtcttcattagaaaactctgaatctgatgttgaagaaaatcaagaaaaactggctctggatctccgattgtcaagttctcgagcagcttctatgcctgaattattggaacaactttggaaagccagagctgaaaaaaagaaactacgcaaaacgttgcgggaatttgaagaagcattttatcaacaaaatggaaggaatgcccagaaagaggatcgtgttccagtgcttgaggagtacagagagtacaagaaaattaaagccaagcttaggcttcttgaagttcttataagcaaacaagattcttcaaaatccatataagatacgttccttgaaaattcatatcataaagtcagttgtattccttgaagctatcatcgtgtgtacttggctggtacttaaattcgttttgtcaggcactcagagaatctcattttgtacttggttgtggtgccactaaacaaaacaaatgatgggagagtaagtaggccctctcaagggagcgtaagtgatgttccatattaaccacagactgtcctctccacctttagcaaacatatggtttacttcattgttttgtactacagatacatccttttagcaaaagactggaattttatcctttcaacttcaagaactttggaaatgcaagctttttgttattaccaactttttgtttctcattactgaagaaaattggaggaaaatcttcatactgaattcttctgttgcctttttcttacagaatgactgaaaatttgaaagaaaagcctataaaagtgcacatacgcaactgtgttctctgttttcctagaaaaccaaaatcaaactgagatttcaagtcgtactatggaacacctttctgtttaattcccaaagtgacatcttctcacaggtagtatgttagtaaaattttgcaattcgctggtcacacagctcccggatgaagataacagttggtagaccaaaaggtgacctcgcttagtatattgaaaacacacaccacacatcacacacagaactgaatcataccacgtgctgcctatgggacttcagttactgtttcctgagttactgtttatccgctggcaatggtgtgatttgtctggatcagatccgcgctattccccaacccacctccagataatgtgagaaaatagccatgtcagtatgtaggaactctgatggtgctcagatttgtgtgttcaatcaatgggcttaaatcagcaaaatattatgcctaaagtaaatctgttcttaacaagggctctaccactgcattttcacatgtaccttcagggggttatctttttttttttcccctcctattttaatcagcaaaatccataccaaaacaacgacaacaacgccctcttaagggaccaccctttggtcaatcataacatgctgtttaaagcagctgtttacaggatgtgtagtggtatgccccttgtcatatactcttagcatatctttttttcctttggctttgcatggcttttcttcaggtactgtctcggtatcattctgctaatcattgttacagaatggtgacttcatttgtgctaacagtacaacagcagatttgggtcaggcttaatctaagtgttaacttttttttctggtgcttttttggattgatgactgtctcactttgactatacccatgttttgcatgcaatgactcatgcatggttttcttaactagctaatattaacaatttattccatataaaaatggaattttgcaacatcctttaataaggtgagggaagcatgaacctcagacttctggcactattacatagtaagcacatgaagtagtttgataataaatagcagttctagtacttcacatttcacccgtgtgtgcaatgcctttttctggggggtggggggtgagggaaaacctggtagtgaatgtgtagttggggaataaagaaaagcactaaatcctgccctttttgtgtggtttccttttgatacaactaggttattcataatgtatacctagaaaagtgaaattgaaaataccaaaagatgtatcatttttatttgaatccatcatgcagtgtacatttcagataatttccttcagtctccagataggagtgtatccaaacatctaattttatgtgcactgtgtatcttatatgaatgttttattttatataccacatgcaaaaatgtccatatgcactatttaaatgttttaaataatatattccttctttataatgctaaatctatatgagtaccatatttttataagtcagtggtctgactggtttcattttagaattaacagctgcttcaatatgttattcaatgttaatgtttggctgtgagtagaatatgtaaaagtggcatggcagcacttatgctctgtgacagtattgtgtgtcatagttgagcagtagctggtagaattaggcagttggtgatagttttactttggtacaatataatggcattgctgtgtctggcacttcattgtacagacttttataataaaagaacttgaaagttctaagtcattgtaaatgtatgtttgtttttccactgggcttaaa

SEQ ID NO: 278259 - DNA, 818 bp, Homo sapiens
cggggaaaaacgacgaggcgaagaagcaagagtggagtctaagtaggccagataaggtgagagaagaggtggggaagaggaaatggtagagcagggtaataagggtacgagagaatcggtgaagggtaggaaggaaagagggagagcgaaaagacgggaggagggtgtgtgaagtgaagaacgcggagaaaggacagtaatgagaaagaggggaaatgccaagtgaggagtggcctgacaccctcattcccatcatagttattctcctctctcatggaaatgttcagtttctggacatctcctttctcttccattcttcacctgaccttccttcctttcttggccagcctgaatattataaagggaattttatttcaaacccaggatcgcacttaagaggaaaagaaacaaaagccagttctttttattgcacatagaacaaggagaaactccaccccttttgttgtctggtatgtttaaaacaagaaagaactttagaaaagtaggatatgagtgaaaattacaaccaatgttgagaactactttttaattttttattacaaaattaggatgatacttcattaaacattgtacatcatttcaaaactgttatctcataatcatgttgcttgttttgaattattcttttaaagtgtaatttttttaagcaaagaatccataaaattacatggcttggatgtaccataacttacttaatccttatgctattgtttaatatgtgggttgtttcagatttttcatgattgtaaataacaaaataaacttccttatacttaagtttctggcagaatctctga

SEQ ID NO: 278260 - DNA, 1823 bp, Homo sapiens
taagtagtagggtagcagggaacagtttgctctcctctgccaataagaggacgagggtgtgtcatatgcaaatatactgccctccaagccccacccccaagataagctacgcccccttctctaggtccctgcagaagtggtgaggagaatgagataaatagttgggagctagagctcgctagagagtctaagattgagctaaatatttcctgatctctcgagaaagggggaggggagtgggaggattaaatgttccttccttcagggcagtggttaggctttctctccaccaaaatctaactttagctgtaaagaagactgcagttatgtagtactttgtatccagggatctcaaagaactttacgcatcatttattgtgaaccttgtttgcaaagatttcagttacttgaggcttgggaggcggataggggataaatgtctgagttatatatatatttacgcaagtaatcgagtttgaggggagagacacaaaacctctggtttagcggtttcctcttgttgtgaagcaccttctagcagttatcttagagatgtaagttcatttacttgtccagcactaaaaggccaaaggggcttgttttctcacccaaaagaccttcctgaggcagctgttcggatacatgcagagcacagcgccctgctcagaaaggaaggttcagagaacaaattgtcgtttaaaactattgggacaaacctacctcttctaaagcttaaaatggtctccagcgtaccaggatttgtgaaggcctgaagttcgtagaatgaaatctatgtggagatgatttaaaagaacggtttcactgagaccaacacatataaaccaagtctacacaagaaacaaagctaaaatcctttcgaaatgagttcctttaagttcttcagtaactaaatcctccagaaaggaaagccgagagaatctagtcctatacaataacaccctctaacaaagatcgctaaaggaagattttagtagatgaatatcttcaataatacatggtcacatacatgtatctgaccatatgatggctctctgcaccaaattcctccaaactattataatatgtattgtctgtagtgctatttatttggcagttaatcatgtattacattgtgacatttcttacagtgaaccattatgtatgtgtttatgttctgccctcaactactcaatgccagtaccttattcttaacacagcaaccaccctttctggtctgtcctcacaccctcattcccatcatagttattctcctctctcatggaaatgttcagtttctggacatctcctttctcttccattcttcacctgaccttccttcctttcttggccagcctgaatattataaagggaattttatttcaaacccaggatcgcacttaagaggaaaagaaacaaaagccagttctttttattgcacatagaacaaggagaaactccaccccttttgttgtctggtatgtttaaaacaagaaagaactttagaaaagtaggatatgagtgaaaattacaaccaatgttgagaactactttttaattttttattacaaaattaggatgatacttcattaaacattgtacatcatttcaaaactgttatctcataatcatgttgcttgttttgaattattcttttaaagtgtaatttttttaagcaaagaatccataaaattacatggcttggatgtaccataacttacttaatccttatgctattgtttaatatgtgggttgtttcagatttttcatgattgtaaataacaaaataaacttccttatacttaagtttctggcagaatctctga

SEQ ID NO: 278261 - DNA, 1347 bp, Homo sapiens
taagtagtagggtagcagggaacagtttgctctcctctgccaataagaggacgagggtgtgtcatatgcaaatatactgccctccaagccccacccccaagataagctacgcccccttctctaggtccctgcagaagtgaccttcctgaggcagctgttcggatacatgcagagcacagcgccctgctcagaaaggaaggttcagagaacaaattgtcgtttaaaactattgggacaaacctacctcttctaaagcttaaaatggtctccagcgtaccaggatttgtgaaggcctgaagttcgtagaatgaaatctatgtggagatgatttaaaagaacggtttcactgagaccaacacatataaaccaagtctacacaagaaacaaagctaaaatcctttcgaaatgagttcctttaagttcttcagtaactaaatcctccagaaaggaaagccgagagaatctagtcctatacaataacaccctctaacaaagatcgctaaaggaagattttagtagatgaatatcttcaataatacatggtcacatacatgtatctgaccatatgatggctctctgcaccaaattcctccaaactattataatatgtattgtctgtagtgctatttatttggcagttaatcatgtattacattgtgacatttcttacagtgaaccattatgtatgtgtttatgttctgccctcaactactcaatgccagtaccttattcttaacacagcaaccaccctttctggtctgtcctcacaccctcattcccatcatagttattctcctctctcatggaaatgttcagtttctggacatctcctttctcttccattcttcacctgaccttccttcctttcttggccagcctgaatattataaagggaattttatttcaaacccaggatcgcacttaagaggaaaagaaacaaaagccagttctttttattgcacatagaacaaggagaaactccaccccttttgttgtctggtatgtttaaaacaagaaagaactttagaaaagtaggatatgagtgaaaattacaaccaatgttgagaactactttttaattttttattacaaaattaggatgatacttcattaaacattgtacatcatttcaaaactgttatctcataatcatgttgcttgttttgaattattcttttaaagtgtaatttttttaagcaaagaatccataaaattacatggcttggatgtaccataacttacttaatccttatgctattgtttaatatgtgggttgtttcagatttttcatgattgtaaataacaaaataaacttccttatacttaagtttctggcagaatctctga

SEQ ID NO: 278262 - DNA, 1498 bp, Homo sapiens
ctggtgaggtgggacttcaatgccttttaggtttacagtcttttcctccccacggcttctctttcctccccgtctcaggcactgggcatttccagtcgatccagcaggtctggcttctctcacatatgcagtaagggttaggggagaaggtcccagctcctcttgtctctagcagagtgtaaactggctctgctgaggaggtggctgtgcttttattccttctcctgagaactgtttatatattaaggagcttcacagcctccaacataaggaaagcaggcctcaaacttcttcatgggaaaagatggcttctcttttttaattgaatgaactagaagaagttcattgttattcatcaacttcaaagagactatatgaggccccttggccaggactacagagcagtattttttaatcagaaattatagccaaaaagaagagaccagaacacatgggtctccagcgtaccaggatttgtgaaggcctgaagttcgtagaatgaaatctatgtggagatgatttaaaagaacggtttcactgctaaaatcctttcgaaatgagttcctttaagttcttcagtaactaaatcctccagaaaggaaagccgagagaatctagtcctatacaataacaccctctaacaaagatcgctaaaggaagattttagtagatgaatatcttcaataatacatggtcacatacatgtatctgaccatatgatggctctctgcaccaaattcctccaaactattataatatgtattgtctgtagtgctatttatttggcagttaatcatgtattacattgtgacatttcttacagtgaaccattatgtatgtgtttatgttctgccctcaactactcaatgccagtaccttattcttaacacagcaaccaccctttctggtctgtcctcacaccctcattcccatcatagttattctcctctctcatggaaatgttcagtttctggacatctcctttctcttccattcttcacctgaccttccttcctttcttggccagcctgaatattataaagggaattttatttcaaacccaggatcgcacttaagaggaaaagaaacaaaagccagttctttttattgcacatagaacaaggagaaactccaccccttttgttgtctggtatgtttaaaacaagaaagaactttagaaaagtaggatatgagtgaaaattacaaccaatgttgagaactactttttaattttttattacaaaattaggatgatacttcattaaacattgtacatcatttcaaaactgttatctcataatcatgttgcttgttttgaattattcttttaaagtgtaatttttttaagcaaagaatccataaaattacatggcttggatgtaccataacttacttaatccttatgctattgtttaatatgtgggttgtttcagatttttcatgattgtaaataacaaaataaacttccttatacttaagtttctggcagaatctctga

SEQ ID NO: 278263 - DNA, 2029 bp, Homo sapiens
taagtagtagggtagcagggaacagtttgctctcctctgccaataagaggacgagggtgtgtcatatgcaaatatactgccctccaagccccacccccaagataagctacgcccccttctctaggtccctgcagaagtggtgaggagaatgagataaatagttgggagctagagctcgctagagagtctaagattgagctaaatatttcctgatctctcgagaaagggggaggggagtgggaggattaaatgttccttccttcagggcagtggttaggctttctctccaccaaaatctaactttagctgtaaagaagactgcagttatgtagtactttgtatccagggatctcaaagaactttacgcatcatttattgtgaaccttgtttgcaaagatttcagttacttgaggcttgggaggcggataggggataaatgtctgagttatatatatatttacgcaagtaatcgagtttgaggggagagacacaaaacctctggtttagcggtttcctcttgttgtgaagcaccttctagcagttatcttagagatgtaagttcatttacttgtccagcactaaaaggccaaaggggcttgttttctcacccaaaagaccttcctgaggcagctgttcggatacatgcagagcacagcgccctgctcagaaaggaaggttcagagaacaaattgtcgtttaaaactattgggacaaacctacctcttctaaagcttaaaatggtctccagcgtaccaggatttgtgaaggcctgaagttcgtagaatgaaatctatgtggagatgatttaaaagaacggtttcactggtttgcatttctttcttttctttttaattaaaaaaaaacaacaaccctggtttccttagggattcagggtggtgttatgcaaaatcggaaaggtacacttggaggagctagcaagtttagcatatcaaagctattagaccaatttgtgcggttaaaactgccattctcatttctcaacagctgtctcctctctgtccctttttagaagaccaacacatataaaccaagtctacacaagaaacaaagctaaaatcctttcgaaatgagttcctttaagttcttcagtaactaaatcctccagaaaggaaagccgagagaatctagtcctatacaataacaccctctaacaaagatcgctaaaggaagattttagtagatgaatatcttcaataatacatggtcacatacatgtatctgaccatatgatggctctctgcaccaaattcctccaaactattataatatgtattgtctgtagtgctatttatttggcagttaatcatgtattacattgtgacatttcttacagtgaaccattatgtatgtgtttatgttctgccctcaactactcaatgccagtaccttattcttaacacagcaaccaccctttctggtctgtcctcacaccctcattcccatcatagttattctcctctctcatggaaatgttcagtttctggacatctcctttctcttccattcttcacctgaccttccttcctttcttggccagcctgaatattataaagggaattttatttcaaacccaggatcgcacttaagaggaaaagaaacaaaagccagttctttttattgcacatagaacaaggagaaactccaccccttttgttgtctggtatgtttaaaacaagaaagaactttagaaaagtaggatatgagtgaaaattacaaccaatgttgagaactactttttaattttttattacaaaattaggatgatacttcattaaacattgtacatcatttcaaaactgttatctcataatcatgttgcttgttttgaattattcttttaaagtgtaatttttttaagcaaagaatccataaaattacatggcttggatgtaccataacttacttaatccttatgctattgtttaatatgtgggttgtttcagatttttcatgattgtaaataacaaaataaacttccttatacttaagtttctggcagaatctctga

SEQ ID NO: 278264 - DNA, 1849 bp, Homo sapiens
taagtagtagggtagcagggaacagtttgctctcctctgccaataagaggacgagggtgtgtcatatgcaaatatactgccctccaagccccacccccaagataagctacgcccccttctctaggtccctgcagaagtggtgaggagaatgagataaatagttgggagctagagctcgctagagagtctaagattgagctaaatatttcctgatctctcgagaaagggggaggggagtgggaggattaaatgttccttccttcagggcagtggttaggctttctctccaccaaaatctaactttagctgtaaagaagactgcagttatgtagtactttgtatccagggatctcaaagaactttacgcatcatttattgtgaaccttgtttgcaaagatttcagttacttgaggcttgggaggcggataggggataaatgtctgagttatatatatatttacgcaagtaatcgagtttgaggggagagacacaaaacctctggtttagcggtttcctcttgttgtgaagcaccttctagcagttatcttagagatgtaagttcatttacttgtccagcactaaaaggccaaaggggcttgttttctcacccaaaagaccttcctgaggcagctgttcggatacatgcagagcacagcgccctgctcagaaaggaaggttcagagaacaaattgtcgtttaaaactattgggacaaacctacctcttctaaagcttaaaatggtctccagcgtaccaggatttgtgaaggcctgaagttcgtagaatgaaatctatgtggagatgatttaaaagaacggtttcactgctgtctcctctctgtccctttttagaagaccaacacatataaaccaagtctacacaagaaacaaagctaaaatcctttcgaaatgagttcctttaagttcttcagtaactaaatcctccagaaaggaaagccgagagaatctagtcctatacaataacaccctctaacaaagatcgctaaaggaagattttagtagatgaatatcttcaataatacatggtcacatacatgtatctgaccatatgatggctctctgcaccaaattcctccaaactattataatatgtattgtctgtagtgctatttatttggcagttaatcatgtattacattgtgacatttcttacagtgaaccattatgtatgtgtttatgttctgccctcaactactcaatgccagtaccttattcttaacacagcaaccaccctttctggtctgtcctcacaccctcattcccatcatagttattctcctctctcatggaaatgttcagtttctggacatctcctttctcttccattcttcacctgaccttccttcctttcttggccagcctgaatattataaagggaattttatttcaaacccaggatcgcacttaagaggaaaagaaacaaaagccagttctttttattgcacatagaacaaggagaaactccaccccttttgttgtctggtatgtttaaaacaagaaagaactttagaaaagtaggatatgagtgaaaattacaaccaatgttgagaactactttttaattttttattacaaaattaggatgatacttcattaaacattgtacatcatttcaaaactgttatctcataatcatgttgcttgttttgaattattcttttaaagtgtaatttttttaagcaaagaatccataaaattacatggcttggatgtaccataacttacttaatccttatgctattgtttaatatgtgggttgtttcagatttttcatgattgtaaataacaaaataaacttccttatacttaagtttctggcagaatctctga

SEQ ID NO: 278265 - DNA, 428 bp, Homo sapiens
aggagaagcgactcccggggccacccatgcttagatctcagagccaggcaagagccaggtcccgggggtccaggagcgcgctcggggctcctcctcgcccgcgccccccgcgcccctcgcgcccccccgcgccccccgcgccccactgcgctcgcgtctgcggggccgggaggaaggggcggcgcagccgggccggggcgggcaccgaggcctggcgggcgggcctggggcgctttcgtgcctgccagggaaaggctggcgaggaggctgggggcggacgcagggaggaaagaagcaatggggtgctcttgcgttttgacattttaaaaagaagtttagattcgcttcccggagccgggatggcagcctgcgctatggttggggaccaacgtggtgcacgggcaggggccggggagagaggcggccgc

SEQ ID NO: 278266 - DNA, 606 bp, Homo sapiens
cagtcatccccccatcgctctctctgctggggcgtgatgtcttaagacctggagagcagccccaagggtggagaagcggctgctgaagggatcagcatgcgctggcacaggaagtctgttttccatgtgtctggaacccagccgaagcttcctggggtaattttaaccagtatccactctagaacaataccaaaaaagcaagactgtgttgggctggaggaaaggcagtaatcaactccatgttccacgtgaggaaactgaagatcatggaaggcaagtcgagagccccaaggttatccagcttcaaggtcaccagtcacccagcttccttctttcgtgcagccagatgcccatcccagtactaggttgcgctgtggggattgtggagtagccctctaccacctagggccctcatgtgtttcctttatttgagacagggtctcactctgtcacccagggtggaagtggcccagtcacagcttactgcagcatcagcctccccaggctcaagtgattaaggcctccctctgcctgccccacccccactgtgtttatattgttgggaaacttaatccacggaaataaagtgtggattatttttattga

SEQ ID NO: 278267 - DNA, 768 bp, Homo sapiens
accgggcatggacagcccggcgggcctgtgaggaccccgcacagccaagatggcggcgtccgtgcgacaggcacgcagcctactaggtgtggcggcgaccctggccccgggttcccgtggctaccgggcgcggccgcccccgcgccgcaggccgggaccccggtggccagaccccgaggacctcctgaccccgcggtggcagctgggaccgcgctacgcggctaagcagttcgcgcgttacggcgccgcctccggggtggtccccggttcgttatggccgtcgccggagcagctgcgggagctggaggccgaagaacgcgaatggtacccgagcctggcgaccatgcaggagtcgctgcgggtgaagcagctggccgaagagcagaagcgtcgggagagggagcagcacatcgcagagtgcatggccaagatgccacagatgattgtgaactggcagcagcagcagcgggagaactgggagaaggcccaggctgacaaggagaggagggcccgactgcaggctgaggcccaggagctcctgggctaccaggtggacccaaggagtgcccgcttccaggagctgctccaggacctagagaagaaggagcgcaagcgcctcaaggaggaaaaacagaaacggaagaaggaggcgcgagctgctgcattggctgcagctgtggctcaagacccagcagcctctggggcacccagctcctgaggctttgtcccttcccaataaagcctgctacctggcagtacccctgaaga

SEQ ID NO: 278268 - DNA, 935 bp, Homo sapiens
accgggcatggacagcccggcgggcctgtgaggaccccgcacagccaagatggcggcgtccgtgcgacaggcacgcagcctactaggtgtggcggcgaccctggccccgggttcccgtggctaccgggcgcggccgcccccgcgccgcaggccgggaccccggtggccagaccccgaggacctcctgaccccgcggtggcagctgggaccgcgctacgcggctaagcagttcgcgcgttacggcgccgcctccggggtggtccccggttcgttatggccgtcgccggagcagctgcgggagctggaggccgaagaacgcgaatggtacccgagcctggcgaccatgcaggagtcgctgcgggtgaagcagctggccgaagagcagaagcgtcgggagagggagcagcacatcgcagagtgcatggccaagatgccacagatgattgtgaactggcagcagcagcagcgggagaactgggagaaggcccaggctgacaaggagaggagggcccgactgcaggctgaggcccaggagctcctgggctaccaggtggacccaaggagtgcccgcttccaggagctgctccaggacctagagaagaaggagcgcaagcgcctcaaggaggaaaaacagaaacggaagaaggaggcgcgagctgctgcattggctgcagctgtggctcaagacccagcagcctctggggcacccagctcctgaggctttgtcccttcccaataaagcctgctacctggcagtacccctgaagagatctgcgtcctctcaaggtgtgcctctctgggtccctggttcctccccaatacttaagagctggggaatccccacttggctgtactcacaaggggacagggactctaggccctgctgactaactggggcttcagtgggaggaaaaggggggtgtacaatgggcaaa

SEQ ID NO: 278269 - DNA, 918 bp, Homo sapiens
  misc_feature (21)..(21): n is a, c, g, or t
  misc_feature (24)..(25): n is a, c, g, or t
agaactaggctagtagagccnggnntaatcggcgaggggcgtccgtgcgacaggcacgcagcctactaggtgtggcggcgaccctggccccgggttcccgtggctaccgggcgcggccgcccccgcgccgcaggccgggaccccggtggccagaccccgaggacctcctgaccccgcggtggcagctgggaccgcgctacgcggctaagcagttcgcgcgttacggcgccgcctccggggtggtccccggttcgttatggccgtcgccggagcagctgcgggagctggaggccgaagaacgcgaatggtacccgagcctggcgaccatgcaggagtcgctgcgggtgaagcagctggccgaagagcagaagcgtcgggagagggagcagcacatcgcagagtgcatggccaagatgccacagatgattgtgaactggcagcagcagcagcgggagaactgggagaaggcccaggctgacaaggagaggagggcccgactgcaggctgaggcccaggagctcctgggctaccaggtggacccaaggagtgcccgcttccaggagctgctccaggacctagagaagaaggagcgcaagcgcctcaaggaggaaaaacagaaacggaagaaggaggcgcgagctgctgcattggctgcagctgtggctcaagacccagcagcctctggggcacccagctcctgaggctttgtcccttcccaataaagcctgctacctggcagtacccctgaagagatctgcgtcctctcaaggtgtgcctctctgggtccctggttcctccccaatacttaagagctggggaatccccacttggctgtactcacaaggggacagggactctaggccctgctgactaactggggcttcagtgggaggaaaaggggggtgtacaatgggcaaa

SEQ ID NO: 278270 - DNA, 258 bp, Homo sapiens
gtgatctacgatccctatgacacgcgctacgcggctaagcagttcgcgcgttacggcgccgcctccggggtggtccccggttcgttatggccgtcgccggagcagctgcgggagctggaggccgaagaacgcgaatggtacccgagcctggcgaccatgcaggagtcgctgcgggtgaagcagctggccgaagagcagaagcgtcgggagaggagcagcacatcgcgtagcgcattgtccatagggatccactagaag

SEQ ID NO: 278271 - DNA, 751 bp, Homo sapiens
  misc_feature (21)..(21): n is a, c, g, or t
  misc_feature (24)..(25): n is a, c, g, or t
agaactaggctagtagagccnggnntaatcggcgaggggcgtccgtgcgacaggcacgcagcctactaggtgtggcggcgaccctggccccgggttcccgtggctaccgggcgcggccgcccccgcgccgcaggccgggaccccggtggccagaccccgaggacctcctgaccccgcggtggcagctgggaccgcgctacgcggctaagcagttcgcgcgttacggcgccgcctccggggtggtccccggttcgttatggccgtcgccggagcagctgcgggagctggaggccgaagaacgcgaatggtacccgagcctggcgaccatgcaggagtcgctgcgggtgaagcagctggccgaagagcagaagcgtcgggagagggagcagcacatcgcagagtgcatggccaagatgccacagatgattgtgaactggcagcagcagcagcgggagaactgggagaaggcccaggctgacaaggagaggagggcccgactgcaggctgaggcccaggagctcctgggctaccaggtggacccaaggagtgcccgcttccaggagctgctccaggacctagagaagaaggagcgcaagcgcctcaaggaggaaaaacagaaacggaagaaggaggcgcgagctgctgcattggctgcagctgtggctcaagacccagcagcctctggggcacccagctcctgaggctttgtcccttcccaataaagcctgctacctggcagtacccctgaaga

SEQ ID NO: 278272 - DNA, 879 bp, Homo sapiens
  misc_feature (772)..(772): n is a, c, g, or t
  misc_feature (775)..(775): n is a, c, g, or t
  misc_feature (879)..(879): n is a, c, g, or t
accgggcatggacagcccggcgggcctgtgaggaccccgcacagccaagatggcggcgtccgtgcgacaggcacgcagcctactaggtgtggcggcgaccctggccccgggttcccgtggctaccgggcgcggccgcccccgcgccgcaggccgggaccccggtggccagaccccgaggacctcctgaccccgcggtggcagctgggaccgcgctacgcggctaagcagttcgcgcgttacggcgccgcctccggggtggtccccggttcgttatggccgtcgccggagcagctgcgggagctggaggccgaagaacgcgaatggtacccgagcctggcgaccatgcaggagtcgctgcgggtgaagcagctggccgaagagcagaagcgtcgggagagggagcagcacatcgcagagtgcatggccaagatgccacagatgattgtgaactggcagcagcagcagcgggagaactgggagaaggcccaggctgacaaggagaggagggcccgactgcaggctgaggcccaggagctcctgggctaccaggtggacccaaggagtgcccgcttccaggagctgctccaggacctagagaagaaggagcgcaagcgcctcaaggaggaaaaacagaaacggaagaaggaggcgcgagctgctgcattggctgcagctgtggctcaagacccagcagcctctggggcacccagctcctgaggctttgtcccttcccaataaagcctgctacctggcagtacccctgaagaacanagngaagcccacacaatacacacacatcagcaacaaagagcgcgactttctttcttatttacaacacaaaacggcgcgcttttatataaagaagagctccaacaaan

SEQ ID NO: 278273 - DNA, 984 bp, Homo sapiens
accgggcatggacagcccggcgggcctgtgaggaccccgcacagccaagatggcggcgtccgtgcgacaggcacgcagcctactaggtgtggcggcgaccctggccccgggttcccgtggctaccgggcgcggccgcccccgcgccgcaggccgggaccccggtggccagaccccgaggacctcctgaccccgcggtggcagctgggaccgcgctacgcggctaagcagttcgcgcgttacggcgccgcctccggggtggtccccggttcgttatggccgtcgccggagcagctgcgggagctggaggccgaagaacgcgaatggtacccgagcctggcgaccatgcaggagtcgctgcgggtgaagcagctggccgaagagcagaagcgtcgggagagggagcagcacatcgcagagtgcatggccaagatgccacagatgattgtgaactggcagcagcagcagcgggagaactgggagaaggcccaggctgacaaggagaggagggcccgactgcaggctgaggcccaggagctcctgggctaccaggtggacccaaggagtgcccgcttccaggagctgctccaggacctagagaagaaggagcgcaagcgcctcaaggaggaaaaacagaaacggaagaaggaggcgcgagctgctgcattggctgcagctgtggctcaagacccagcagcctctggggcacccagctcctgaggctttgtcccttcccaataaagcctgctacctggcagtacccctgaagaaaaaaaaaaaaaaaaataaaaaaaaaaaaaaaaaaaagagagaatgagaagagacagaaaaaaaaaatgcggggggatattttatgggggggaaaaaagaggcaaaaaagggagacggacaaggtgttgagcacaccggttttgagcagaggggaaacggagggcccaaaagggaggcaataaacgaaggcgggacccatcgaggatgaggaagaa

SEQ ID NO: 278274 - DNA, 629 bp, Homo sapiens
cgccttctgtcttggcggtaccctttgtgtaaccccgaggacctcctgaccccgcggtggcagctgggaccgcgctacgcggctaagcagttcgcgcgttacggcgccgcctccggggtggtccccggttcgttatggccgtcgccggagcagctgcgggagctggaggccgaagaacgcgaatggtacccgagcctggcgaccatgcaggagtcgctgcgggtgaagcagctggccgaagagcagaagcgtcgggagagggagcagcacatcgcagagtgcatggccaagatgccacagatgattgtgaactggcagcagcagcagcgggagaactgggagaaggcccaggctgacaaggagaggagggcccgactgcaggctgaggcccaggagctcctgggctaccaggtggacccaaggagtgcccgcttccaggagctgctccaggacctagagaagaaggagcgcaagcgcctcaaggaggaaaaacagaaacggaagaaggaggcgcgagctgctgcattggctgcagctgtggctcaagacccagcagcctctggggcacccagctcctgaggctttgtcccttcccaataaagcctgctacctggcagtacccctgaaga

SEQ ID NO: 278275 - DNA, 653 bp, Homo sapiens
  misc_feature (21)..(21): n is a, c, g, or t
  misc_feature (24)..(25): n is a, c, g, or t
agaactaggctagtagagccnggnntaatcggcgaggggcgtccgtgcgacaggcacgcagcctactaggtgtggcggcgaccctggccccgggttcccgtggctaccgggcgcggccgcccccgcgccgcaggccgggaccccggtggccagaccccgaggacctcctgaccccgcggtggcagctgggaccgcgctacgcggctaagcagttcgcgcgttacggcgccgcctccggggtggtccccggttcgttatggccgtcgccggagcagctgcgggagggagcagcacatcgcagagtgcatggccaagatgccacagatgattgtgaactggcagcagcagcagcgggagaactgggagaaggcccaggctgacaaggagaggagggcccgactgcaggctgaggcccaggagctcctgggctaccaggtggacccaaggagtgcccgcttccaggagctgctccaggacctagagaagaaggagcgcaagcgcctcaaggaggaaaaacagaaacggaagaaggaggcgcgagctgctgcattggctgcagctgtggctcaagacccagcagcctctggggcacccagctcctgaggctttgtcccttcccaataaagcctgctacctggcagtacccctgaaga

SEQ ID NO: 278276 - DNA, 702 bp, Homo sapiens
ggcctagcctcccagcctacatctttctcctgtgctggatgctccttgccctcgaacatcgaactccaagttcttcagttctgggactctgactggctctccctgtcagcttgcagacagcctattgtgggaccttgtgatcatatccttccagaggagataccctggtctctgaagtggttttgtatttccactgaaatatacaagtctggatgtctcctaccattgagccacttttcatcatcctgttcttcatcgtcgattggctcctcggtttccagtggagttgggataaagaagtgtggcctcagggggggcttgctgacgtgagacttaagtccaaacttgcgcttcagcaggtggaactgctctttgacgtagtggtaggggacagtcttcttcaccgtcacagtcatgtttccaagcttcctgtgctctggaagagaaccggggtcgcacatgagccatcatttgcagtagcttagaagggatcccggcgaggacccacattacctgtacaactctggtagcacctaaggaagcaactgcatatccaagtattagaagagaagaagggttcctgacaatatttggaaacacttaccaactctaggtgttaatgtcaacatgagttgacgaagcacaagctatcaaatttcctttcatcagatgtgaaccatgcgattggaccaaattcaattg

SEQ ID NO: 278277 - DNA, 835 bp, Homo sapiens
tctcgagcgaagagctactgcacttacccaggcttaggaagcgggtgtttaagccatgggttagagggctcgtgagcacgcccgatcctttccctgaggctatgaaacggtggctccacggactcctctcggccgactgacctttcgccgccctgccccagcagccggcgggtttcttcagtggagccgggctctggtctccgcagcccagtagcccgctagcccggccccctcccgctagtcgtaaagtgcagtaaaggcaccagcattttgcggcaccgtagtctctcttctcctcaagtttgaaatgctttatctcatcgggttgggcctgggagatgccaaggacatcacagtcaagggcctggaagttgttagacgctgcagtcgagtgtatctggaagcctacacctcagtcctaactgtagggaaggaagccttgggatagagaagttaacaaacttgcctaagttcatgcagatagtgaatgatagagccaggagatgaaccaaagcagtcctgagttgaagtctgccactctttttattattattattatttattatgtttttttattttgagacggagtcttgctatgttgcctaggctggaatgcagtggtgcgatctcggccccctgcaacctctgcctctcgggttcaagcaattcttctgtcacagccttctgagtagctgggattacaggcgtgtgccattgcgcccggctaatttttgtatttttagtaggatgagatttcaccatgttggccaggctggtctcgaactcctgacctcaggtgatccacctgcctcggcctccaaagtgctgtgattac

SEQ ID NO: 278278 - DNA, 670 bp, Homo sapiens
agtgggcaagtaaaggtccctttcttaagtagctgccaaggctgctttaggagtgttacagtagcaactcagcattttgaagggcatgtttagtcttgcattttcttgctaaaaagctcagatgaaagccttatgcaggtgtgtggaagaatttgaagaaaggcagtgctcctgcctctttaattgacatgaactcaggaaatatagctttactgtcttaaaagtgttgtttgctttaatccaatctaatcttttctcactacagggccacaacacacagtgatcttgttctaagagcaacaaagctgggaattccttatagagttattcacaatgcctccataatgaatgctgtaggctgctgtggtttacaggtaatgcaacaaaggaggtttttcagtggaattaaataaaaatgttttatttttccacaaattgaaaatacatttaattgtattttatgaatcataaaacatactactatttgatactaggctgcttagtatatacatagactgaattttttaacactaatttttttatgctaggttttcccccttattggaatcgaatgtttagatttagctagaaaatgattttaaccttaaatccaacttgtacttacataaaaaggaaaatataaactaatccaaatgacatactcagcatt

SEQ ID NO: 278279 - DNA, 2503 bp, Homo sapiens
tctcgagcgaagagctactgcacttacccaggcttaggaagcgggtgtttaagccatgggttagagggctcgtgagcacgcccgatcctttccctgaggctatgaaacggtggctccacggactcctctcggccgactgacctttcgccgccctgccccagcagccggcgggtttcttcagtggagccgggctctggtctccgcagcccagtagcccgctagcccggccccctcccgctagtcgtaaagtgcagtaaaggcaccagcattttgcggcaccgtaggtgaggccggcggcgtgggccttttctctgcacggagccggcgcttttgcagttgcttctgcggaaaggtggtagttaagaatttgtaaaggccagagaactacctacgattctctcagcggtctctcttctcctcaagtttgaaatgctttatctcatcgggttgggcctgggagatgccaaggacatcacagtcaagggcctggaagttgttagacgctgcagtcgagtgtatctggaagcctacacctcagtcctaactgtagggaaggaagccttggaagagttttatggaagaaaattggttgttgctgatagagaagaagtggaacaagaagcagataatattttaaaggatgctgatatcagtgatgttgcattccttgtggttggtgatccatttggggccacaacacacagtgatcttgttctaagagcaacaaagctgggaattccttatagagttattcacaatgcctccataatgaatgctgtaggctgctgtggtttacagttatataagtttggagagacagtttctattgttttttggacagacacttggagaccagaaagcttctttgacaaagtgaagaagaacagacaaaatggcatgcacacattatgtttactagacatcaaagtaaaggagcagtctttggaaaatctaatcaagggaaggaagatctatgaacctccacggtatatgagtgtaaaccaagcagcccagcagcttctggagattgttcaaaatcaaagaatacgaggagaagaaccagcagttaccgaggagacactttgtgttggcttagccagggttggagccgacgaccagaaaattgcagcaggcactttaaggcaaatgtgcactgtggacttgggagaaccattgcattccttgatcatcacaggaggcagcatacatccaatggagatggagatgctaagtctgttttccataccagaaaatagctcagaatctcaaagcatcaatggactttgaacatagatatttaccattgtctgatgtaaatttcagccatatatggattgatatggtttggatgtatccccacccaagtctcatcttgaattttaatcctcataattcccaggtgttgtggtaggtaattgaatcatgggggcagtttccctcatgctattctcatgatagtgagctttcatgagatctgatggttttataagtgcctggcatttcccctactggctctcattctcactcttgccgccctgtgaagaggtgccttccaccgtgattgttaagtttcctgaggccttcccagccatgtggaactgtgagtcgaaaattaaacctcttttataattaaaaaaaaaaaaaaaaaatgccttaaagaaaataataagagaagggtgtgttctcttccaagtaatgagccgatcaaggggaagcaacccaaggctagcaggctcttttcaattcccagctctgccactcttagcatggcagagagttggcctcattatgccagtatggctgccacagtgtcagacatcacattccaggcagtggaaaggagaaagaaccaaagggcatccctttctcttgaagcagtccctgtgaggggggattatctggaagccccaacccaatttctgcttccaaccattatccatagaaacaactggaagttgagaagtgcagtcttttaggtgggcacctggctgccctgtatgaaaccagaattaggttggtcagcaggaaaacaagaaaacacttactgtgttgactgaggtttttgacgcatcgctttattgtcaaattaaacaactctatctcattctgcactgaaacacgtactaccattgcctataattggaaaatgatcctcagaggcacagaagatgccctgatggaaagtttgccccttgggcaaagagacagccatgggaaccttcagacctcagcatggaagcttccaagatccagaggaagaggcaacagcactgagagtcataggtagaagaatcatcacagccctgctaaccaggcagctgatgcccctctcccctggctccctgtgtccaaatcctacaggggcatctgttggctgaactcaacctgaagccaaagagaagatgagtggagagaggcaacatttatagagctcaggtttctagggctggagagggatctggagggacacacaggagacacctggcataaccaaaaaatgatt

SEQ ID NO: 278280 - DNA, 1480 bp, Homo sapiens
tctcgagcgaagagctactgcacttacccaggcttaggaagcgggtgtttaagccatgggttagagggctcgtgagcacgcccgatcctttccctgaggctatgaaacggtggctccacggactcctctcggccgactgacctttcgccgccctgccccagcagccggcgggtttcttcagtggagccgggctctggtctccgcagcccagtagcccgctagcccggccccctcccgctagtcgtaaagtgcagtaaaggcaccagcattttgcggcaccgtaggtgaggccggcggcgtgggccttttctctgcacggagccggcgcttttgcagttgcttctgcggaaaggtggtagttaagaatttgtaaaggccagagaactacctacgattctctcagcggtctctcttctcctcaagtttgaaatgctttatctcatcgggttgggcctgggagatgccaaggacatcacagtcaagggcctggaagttgttagacgctgcagtcgagtgtatctggaagcctacacctcagtcctaactgtagggaaggaagccttggaagagttttatggaagaaaattggttgttgctgatagagaagaagtggaacaagaagcagataatattttaaaggatgctgatatcagtgatgttgcattccttgtggttggtgatccatttggacacttggagaccagaaagcttctttgacaaagtgaagaagaacagacaaaatggcatgcacacattatgtttactagacatcaaagtaaaggagcagtctttggaaaatctaatcaagggaaggaagatctatgaacctccacggtatatgagtgtaaaccaagcagcccagcagcttctggagattgttcaaaatcaaagaatacgaggagaagaaccagcagttaccgaggagacactttgtgttggcttagccagggttggagccgacgaccagaaaattgcagcaggcactttaaggcaaatgtgcactgtggacttgggagaaccattgcattccttgatcatcacaggaggcagcatacatccaatggagatggagatgctaagtctgttttccataccagaaaatagctcagaatctcaaagcatcaatggactttgaacatagatatttaccattgtctgatgtaaatttcagccatatatggattgatatggtttggatgtatccccacccaagtctcatcttgaattttaatcctcataattcccaggtgttgtggtaggtaattgaatcatgggggcagtttccctcatgctattctcatgatagtgagctttcatgagatctgatggttttataagtgcctggcatttcccctactggctctcattctcactcttgccgccctgtgaagaggtgccttccaccgtgattgttaagtttcctgaggccttcccagccatgtggaactgtgagtcgaaaattaaacctcttttataatta

SEQ ID NO: 278281 - DNA, 1650 bp, Homo sapiens
tctcgagcgaagagctactgcacttacccaggcttaggaagcgggtgtttaagccatgggttagagggctcgtgagcacgcccgatcctttccctgaggctatgaaacggtggctccacggactcctctcggccgactgacctttcgccgccctgccccagcagccggcgggtttcttcagtggagccgggctctggtctccgcagcccagtagcccgctagcccggccccctcccgctagtcgtaaagtgcagtaaaggcaccagcattttgcggcaccgtaggtgaggccggcggcgtgggccttttctctgcacggagccggcgcttttgcagttgcttctgcggaaaggtggtagttaagaatttgtaaaggccagagaactacctacgattctctcagcgggtaattggctgctcctagtctctcttctcctcaagtttgaaatgctttatctcatcgggttgggcctgggagatgccaaggacatcacagtcaagggcctggaagttgttagacgctgcagtcgagtgtatctggaagcctacacctcagtcctaactgtagggaaggaagccttggaagagttttatggaagaaaattggttgttgctgatagagaagaagtggaacaagaagcagataatattttaaaggatgctgatatcagtgatgttgcattccttgtggttggtgatccatttggggccacaacacacagtgatcttgttctaagagcaacaaagctgggaattccttatagagttattcacaatgcctccataatgaatgctgtaggctgctgtggtttacagttatataagtttggagagacagtttctattgttttttggacagacacttggagaccagaaagcttctttgacaaagtgaagaagaacagacaaaatggcatgcacacattatgtttactagacatcaaagtaaaggagcagtctttggaaaatctaatcaagggaaggaagatctatgaacctccacggtatatgagtgtaaaccaagcagcccagcagcttctggagattgttcaaaatcaaagaatacgaggagaagaaccagcagttaccgaggagacactttgtgttggcttagccagggttggagccgacgaccagaaaattgcagcaggcactttaaggcaaatgtgcactgtggacttgggagaaccattgcattccttgatcatcacaggaggcagcatacatccaatggagatggagatgctaagtctgttttccataccagaaaatagctcagaatctcaaagcatcaatggactttgaacatagatatttaccattgtctgatgtaaatttcagccatatatggattgatatggtttggatgtatccccacccaagtctcatcttgaattttaatcctcataattcccaggtgttgtggtaggtaattgaatcatgggggcagtttccctcatgctattctcatgatagtgagctttcatgagatctgatggttttataagtgcctggcatttcccctactggctctcattctcactcttgccgccctgtgaagaggtgccttccaccgtgattgttaagtttcctgaggccttcccagccatgtggaactgtgagtcgaaaattaaacctcttttataatta

SEQ ID NO: 278282 - DNA, 1474 bp, Homo sapiens
tctcgagcgaagagctactgcacttacccaggcttaggaagcgggtgtttaagccatgggttagagggctcgtgagcacgcccgatcctttccctgaggctatgaaacggtggctccacggactcctctcggccgactgacctttcgccgccctgccccagcagccggcgggtttcttcagtggagccgggctctggtctccgcagcccagtagcccgctagcccggccccctcccgctagtcgtaaagtgcagtaaaggcaccagcattttgcggcaccgtaggtgaggccggcggcgtgggccttttctctgcacggagccggcgcttttgcagttgcttctgcggaaaggtggtagttaagaatttgtaaaggccagagaactacctacgattctctcagcgggaagagttttatggaagaaaattggttgttgctgatagagaagaagtggaacaagaagcagataatattttaaaggatgctgatatcagtgatgttgcattccttgtggttggtgatccatttggggccacaacacacagtgatcttgttctaagagcaacaaagctgggaattccttatagagttattcacaatgcctccataatgaatgctgtaggctgctgtggtttacagttatataagtttggagagacagtttctattgttttttggacagacacttggagaccagaaagcttctttgacaaagtgaagaagaacagacaaaatggcatgcacacattatgtttactagacatcaaagtaaaggagcagtctttggaaaatctaatcaagggaaggaagatctatgaacctccacggtatatgagtgtaaaccaagcagcccagcagcttctggagattgttcaaaatcaaagaatacgaggagaagaaccagcagttaccgaggagacactttgtgttggcttagccagggttggagccgacgaccagaaaattgcagcaggcactttaaggcaaatgtgcactgtggacttgggagaaccattgcattccttgatcatcacaggaggcagcatacatccaatggagatggagatgctaagtctgttttccataccagaaaatagctcagaatctcaaagcatcaatggactttgaacatagatatttaccattgtctgatgtaaatttcagccatatatggattgatatggtttggatgtatccccacccaagtctcatcttgaattttaatcctcataattcccaggtgttgtggtaggtaattgaatcatgggggcagtttccctcatgctattctcatgatagtgagctttcatgagatctgatggttttataagtgcctggcatttcccctactggctctcattctcactcttgccgccctgtgaagaggtgccttccaccgtgattgttaagtttcctgaggccttcccagccatgtggaactgtgagtcgaaaattaaacctcttttataatta

SEQ ID NO: 278283 - DNA, 1528 bp, Homo sapiens
tctcgagcgaagagctactgcacttacccaggcttaggaagcgggtgtttaagccatgggttagagggctcgtgagcacgcccgatcctttccctgaggctatgaaacggtggctccacggactcctctcggccgactgacctttcgccgccctgccccagcagccggcgggtttcttcagtggagccgggctctggtctccgcagcccagtagcccgctagcccggccccctcccgctagtcgtaaagtgcagtaaaggcaccagcattttgcggcaccgtaggtgaggccggcggcgtgggccttttctctgcacggagccggcgcttttgcagttgcttctgcggaaaggtggtagttaagaatttgtaaaggccagagaactacctacgattctctcagcggtctctcttctcctcaagtttgaaatgctttatctcatcgggttgggcctgggagatgccaaggacatcacagtcaagggcctggaagttgttagacgctgcagtcgagtgtatctggaagcctacacctcagtcctaactgtagggaaggaagccttggaagagttttatggaagaaaattggttgttgctgatagagaagaagtggaacaagaagcagataatattttaaaggatgctgatatcagtgatgttgcattccttgtggttggtgatccatttggggccacaacacacagtgatcttgttctaagagcaacaaagctgggaattccttatagagttattcacaatgcctccataatgaatgctgtaggctgctgtggtttacagttatataagtttggagagacagtttctattgttttttggacagacacttggagaccagaaagcttctttgacaaagtgaagaagaacagacaaaatggcatgcacacattatgtttactagacatcaaagtaaaggagcagtctttggaaaatctaatcaacagttaccgaggagacactttgtgttggcttagccagggttggagccgacgaccagaaaattgcagcaggcactttaaggcaaatgtgcactgtggacttgggagaaccattgcattccttgatcatcacaggaggcagcatacatccaatggagatggagatgctaagtctgttttccataccagaaaatagctcagaatctcaaagcatcaatggactttgaacatagatatttaccattgtctgatgtaaatttcagccatatatggattgatatggtttggatgtatccccacccaagtctcatcttgaattttaatcctcataattcccaggtgttgtggtaggtaattgaatcatgggggcagtttccctcatgctattctcatgatagtgagctttcatgagatctgatggttttataagtgcctggcatttcccctactggctctcattctcactcttgccgccctgtgaagaggtgccttccaccgtgattgttaagtttcctgaggccttcccagccatgtggaactgtgagtcgaaaattaaacctcttttataatta

SEQ ID NO: 278284 - DNA, 1498 bp, Homo sapiens
tctcgagcgaagagctactgcacttacccaggcttaggaagcgggtgtttaagccatgggttagagggctcgtgagcacgcccgatcctttccctgaggctatgaaacggtggctccacggactcctctcggccgactgacctttcgccgccctgccccagcagccggcgggtttcttcagtggagccgggctctggtctccgcagcccagtagcccgctagcccggccccctcccgctagtcgtaaagtgcagtaaaggcaccagcattttgcggcaccgtaggtgaggccggcggcgtgggccttttctctgcacggagccggcgcttttgcagttgcttctgcggaaaggtggtagttaagaatttgtaaaggccagagaactacctacgattctctcagcgggtaattggctgctcctagtctctcttctcctcaagtttgaaatgctttatctcatcgggttgggcctgggagatgccaaggacatcacagtcaagggcctggaagttgttagacgctgcagtcgagtgtatctggaagcctacacctcagtcctaactgtagggaaggaagccttggaagagttttatggaagaaaattggttgttgctgatagagaagaagtggaacaagaagcagataatattttaaaggatgctgatatcagtgatgttgcattccttgtggttggtgatccatttggacacttggagaccagaaagcttctttgacaaagtgaagaagaacagacaaaatggcatgcacacattatgtttactagacatcaaagtaaaggagcagtctttggaaaatctaatcaagggaaggaagatctatgaacctccacggtatatgagtgtaaaccaagcagcccagcagcttctggagattgttcaaaatcaaagaatacgaggagaagaaccagcagttaccgaggagacactttgtgttggcttagccagggttggagccgacgaccagaaaattgcagcaggcactttaaggcaaatgtgcactgtggacttgggagaaccattgcattccttgatcatcacaggaggcagcatacatccaatggagatggagatgctaagtctgttttccataccagaaaatagctcagaatctcaaagcatcaatggactttgaacatagatatttaccattgtctgatgtaaatttcagccatatatggattgatatggtttggatgtatccccacccaagtctcatcttgaattttaatcctcataattcccaggtgttgtggtaggtaattgaatcatgggggcagtttccctcatgctattctcatgatagtgagctttcatgagatctgatggttttataagtgcctggcatttcccctactggctctcattctcactcttgccgccctgtgaagaggtgccttccaccgtgattgttaagtttcctgaggccttcccagccatgtggaactgtgagtcgaaaattaaacctcttttataatta

SEQ ID NO: 278285 - DNA, 932 bp, Homo sapiens
atgacagcagcaaagagatgcgcagagtaaacgggggaaatccctttatgaaaccatcagatcttgtgagaactcactatcacgagaacagcatggagttatataagtttggagagacagtttctattgttttttggacagacacttggagaccagaaagcttctttgacaaagtgaagaagaacagacaaaatggcatgcacacattatgtttactagacatcaaagtaaaggagcagtctttggaaaatctaatcaagggaaggaagatctatgaacctccacggtatatgagtgtaaaccaagcagcccagcagcttctggagattgttcaaaatcaaagaatacgaggagaagaaccagcagttaccgaggagacactttgtgttggcttagccagggttggagccgacgaccagaaaattgcagcaggcactttaaggcaaatgtgcactgtggacttgggagaaccattgcattccttgatcatcacaggaggcagcatacatccaatggagatggagatgctaagtctgttttccataccagaaaatagctcagaatctcaaagcatcaatggactttgaacatagatatttaccattgtctgatgtaaatttcagccatatatggattgatatggtttggatgtatccccacccaagtctcatcttgaattttaatcctcataattcccaggtgttgtggtaggtaattgaatcatgggggcagtttccctcatgctattctcatgatagtgagctttcatgagatctgatggttttataagtgcctggcatttcccctactggctctcattctcactcttgccgccctgtgaagaggtgccttccaccgtgattgttaagtttcctgaggccttcccagccatgtggaactgtgagtcgaaaattaaacctcttttataatta

SEQ ID NO: 278286 - DNA, 761 bp, Homo sapiens
tcgcggggattagattttccaaagactgctcctttactttgatgtctagtaaacataatgtgtgcatgccattttgtctgttcttcttcactttgtcaaagaagctttctggtctccaagtgtctgtaaaccaagcagcccagcagcttctggagattgttcaaaatcaaagaatacgaggagaagaaccagcagttaccgaggagacactttgtgttggcttagccagggttggagccgacgaccagaaaattgcagcaggcactttaaggcaaatgtgcactgtggacttgggagaaccattgcattccttgatcatcacaggaggcagcatacatccaatggagatggagatgctaagtctgttttccataccagaaaatagctcagaatctcaaagcatcaatggactttgaacatagatatttaccattgtctgatgtaaatttcagccatatatggattgatatggtttggatgtatccccacccaagtctcatcttgaattttaatcctcataattcccaggtgttgtggtaggtaattgaatcatgggggcagtttccctcatgctattctcatgatagtgagctttcatgagatctgatggttttataagtgcctggcatttcccctactggctctcattctcactcttgccgccctgtgaagaggtgccttccaccgtgattgttaagtttcctgaggccttcccagccatgtggaactgtgagtcgaaaattaaacctcttttataatta

SEQ ID NO: 278287 - DNA, 1159 bp, Homo sapiens
tctcgagcgaagagctactgcacttacccaggcttaggaagcgggtgtttaagccatgggttagagggctcgtgagcacgcccgatcctttccctgaggctatgaaacggtggctccacggactcctctcggccgactgacctttcgccgccctgccccagcagccggcgggtttcttcagtggagccgggctctggtctccgcagcccagtagcccgctagcccggccccctcccgctagtcgtaaagtgcagtaaaggcaccagcattttgcggcaccgtaggtgaggccggcggcgtgggccttttctctgcacggagccggcgcttttgcagttgcttctgcggaaaggtggtagttaagaatttgtaaaggccagagaactacctacgattctctcagcggtctctcttctcctcaagtttgaaatgctttatctcatcgggttgggcctgggagatgccaaggacatcacagtcaagggcctggaagttgttagacgctgcagtcgagtgtatctggaagcctacacctcagtcctaactgtagggaaggaagccttggaagagttttatggaagaaaattggttgttgctgatagagaagaagtggaacaagaagcagataatattttaaaggatgctgatatcagtgatgttgcattccttgtggttggtgatccatttggggccacaacacacagtgatcttgttctaagagcaacaaagctgggaattccttatagagttattcacaatgcctccataatgaatgctgtaggctgctgtggtttacagttatataagtttggagagacagtttctattgttttttggacagacacttggagaccagaaagcttctttgacaaagtgaagaagaacagacaaaatggcatgcacacattatgtttactagacatcaaagtaaaggagcagtctttggaaaatctaatcaagggaaggaagatctatgaacctccacggtatatgagtgtaaaccaagcagcccagcagcttctggagattgttcaaaatcaaagaatacgaggagaagaaccagcagttaccgaggagacactttgtgttggcttagccagggttggagccgacgaccaaattgcgggggcttaggaggtgcgtgggctgggaactctgt

SEQ ID NO: 278288 - DNA, 1177 bp, Homo sapiens
tctcgagcgaagagctactgcacttacccaggcttaggaagcgggtgtttaagccatgggttagagggctcgtgagcacgcccgatcctttccctgaggctatgaaacggtggctccacggactcctctcggccgactgacctttcgccgccctgccccagcagccggcgggtttcttcagtggagccgggctctggtctccgcagcccagtagcccgctagcccggccccctcccgctagtcgtaaagtgcagtaaaggcaccagcattttgcggcaccgtaggtgaggccggcggcgtgggccttttctctgcacggagccggcgcttttgcagttgcttctgcggaaaggtggtagttaagaatttgtaaaggccagagaactacctacgattctctcagcgggtaattggctgctcctagtctctcttctcctcaagtttgaaatgctttatctcatcgggttgggcctgggagatgccaaggacatcacagtcaagggcctggaagttgttagacgctgcagtcgagtgtatctggaagcctacacctcagtcctaactgtagggaaggaagccttggaagagttttatggaagaaaattggttgttgctgatagagaagaagtggaacaagaagcagataatattttaaaggatgctgatatcagtgatgttgcattccttgtggttggtgatccatttggggccacaacacacagtgatcttgttctaagagcaacaaagctgggaattccttatagagttattcacaatgcctccataatgaatgctgtaggctgctgtggtttacagttatataagtttggagagacagtttctattgttttttggacagacacttggagaccagaaagcttctttgacaaagtgaagaagaacagacaaaatggcatgcacacattatgtttactagacatcaaagtaaaggagcagtctttggaaaatctaatcaagggaaggaagatctatgaacctccacggtatatgagtgtaaaccaagcagcccagcagcttctggagattgttcaaaatcaaagaatacgaggagaagaaccagcagttaccgaggagacactttgtgttggcttagccagggttggagccgacgaccaaattgcgggggcttaggaggtgcgtgggctgggaactctgt

SEQ ID NO: 278289 - DNA, 897 bp, Homo sapiens
tctcgagcgaagagctactgcacttacccaggcttaggaagcgggtgtttaagccatgggttagagggctcgtgagcacgcccgatcctttccctgaggctatgaaacggtggctccacggactcctctcggccgactgacctttcgccgccctgccccagcagccggcgggtttcttcagtggagccgggctctggtctccgcagcccagtagcccgctagcccggccccctcccgctagtcgtaaagtgcagtaaaggcaccagcattttgcggcaccgtaggtgaggccggcggcgtgggccttttctctgcacggagccggcgcttttgcagttgcttctgcggaaaggtggtagttaagaatttgtaaaggccagagaactacctacgattctctcagcggtctctcttctcctcaagtttgaaatgctttatctcatcgggttgggcctgggagatgccaaggacatcacagtcaagggcctggaagttgttagacgctgcagtcgagtgtatctggaagcctacacctcagtcctaactgtagggaaggaagccttggaagagttttatggaagaaaattggttgttgctgatagagaagaagtggaacaagaagcagataatattttaaaggatgctgatatcagtgatgttgcattccttgtggttggtgatccatttgggtaagtcaaggcagatattttgagtttttaactcatttacttttttttaatcagtaagaattattctattgcatttaacacttttacctgccaggtcctgataaggaactctggttacttaagcgctatctaaaatgtcatagtttaaactttcatgatctttgagattagtgaagaaaagctagttggtaaatatatcatcatatgt

SEQ ID NO: 278290 - DNA, 781 bp, Homo sapiens
accagcattttgcggcaccgtaggtgaggccggcggcgtgggccttttctctgcacggagccggcgcttttgcagttgcttctgcggaaaggtggtagttaagaatttgtaaaggccagagaactacctacgattctctcagcgggtaattggctgctcctaggtttgtgtaacaagaggcaaaactggtagggttgtttaaaacctcttatcccagttcttaagcgtgacataaggttcccaaacccctccttgtgacttgcctcttctcttgtgctactttggttgtcatcgtgttcatcactagattttagatgtcctcggtgttactgacggtttttctgtccacttcgtcttgcagtctctcttctcctcaagtttgaaatgctttatctcatcgggttgggcctgggagatgccaaggacatcacagtcaagggcctggaagttgttagacgctgcagtcgagtgtatctggaagcctacacctcagtcctaactgtagggaaggaagccttggtaggtgctgagcgttccccagcctcctgggaagaaagctatctaacatctgattttcatacactaagctgaacagaattttcaggtctgcttgtttaaaccctttgaaacgcatcccttgttcattaatgatctgaggagcagaagaatggaaattttacaccaaccaagtgacttggaaaatgaaagggtgctttgtcctattttacaagtctaattttgtggctttctccagtaaataggaaagctattttatactcct

SEQ ID NO: 278291 - DNA, 381 bp, Homo sapiens
aatgtagactgtggtacttgagtatacctgggagagctaattgcattaataacatattatgtagtttcatggctaagaacagtggcatctagttttctgcctataggggaaggaagatctatgaacctccacggtatatgagtgtaaaccaagcagcccagcagcttctggagattgttcaaaatcaaagaatacgaggagaagaaccaggtactcaagacactagaagggctctcatattattcctctgttactacatttagatgtgtatatgacttaatatctcataccactatggaagcaagagtcagtatttttgtattgtactatttcttgtcatttttgtccaactttaacttaaatcccataggcttcaagttg

SEQ ID NO: 278292 - DNA, 1632 bp, Homo sapiens
tctcgagcgaagagctactgcacttacccaggcttaggaagcgggtgtttaagccatgggttagagggctcgtgagcacgcccgatcctttccctgaggctatgaaacggtggctccacggactcctctcggccgactgacctttcgccgccctgccccagcagccggcgggtttcttcagtggagccgggctctggtctccgcagcccagtagcccgctagcccggccccctcccgctagtcgtaaagtgcagtaaaggcaccagcattttgcggcaccgtaggtgaggccggcggcgtgggccttttctctgcacggagccggcgcttttgcagttgcttctgcggaaaggtggtagttaagaatttgtaaaggccagagaactacctacgattctctcagcggtctctcttctcctcaagtttgaaatgctttatctcatcgggttgggcctgggagatgccaaggacatcacagtcaagggcctggaagttgttagacgctgcagtcgagtgtatctggaagcctacacctcagtcctaactgtagggaaggaagccttggaagagttttatggaagaaaattggttgttgctgatagagaagaagtggaacaagaagcagataatattttaaaggatgctgatatcagtgatgttgcattccttgtggttggtgatccatttggggccacaacacacagtgatcttgttctaagagcaacaaagctgggaattccttatagagttattcacaatgcctccataatgaatgctgtaggctgctgtggtttacagttatataagtttggagagacagtttctattgttttttggacagacacttggagaccagaaagcttctttgacaaagtgaagaagaacagacaaaatggcatgcacacattatgtttactagacatcaaagtaaaggagcagtctttggaaaatctaatcaagggaaggaagatctatgaacctccacggtatatgagtgtaaaccaagcagcccagcagcttctggagattgttcaaaatcaaagaatacgaggagaagaaccagcagttaccgaggagacactttgtgttggcttagccagggttggagccgacgaccagaaaattgcagcaggcactttaaggcaaatgtgcactgtggacttgggagaaccattgcattccttgatcatcacaggaggcagcatacatccaatggagatggagatgctaagtctgttttccataccagaaaatagctcagaatctcaaagcatcaatggactttgaacatagatatttaccattgtctgatgtaaatttcagccatatatggattgatatggtttggatgtatccccacccaagtctcatcttgaattttaatcctcataattcccaggtgttgtggtaggtaattgaatcatgggggcagtttccctcatgctattctcatgatagtgagctttcatgagatctgatggttttataagtgcctggcatttcccctactggctctcattctcactcttgccgccctgtgaagaggtgccttccaccgtgattgttaagtttcctgaggccttcccagccatgtggaactgtgagtcgaaaattaaacctcttttataatta

SEQ ID NO: 278293 - DNA, 2077 bp, Homo sapiens
tctcgagcgaagagctactgcacttacccaggcttaggaagcgggtgtttaagccatgggttagagggctcgtgagcacgcccgatcctttccctgaggctatgaaacggtggctccacggactcctctcggccgactgacctttcgccgccctgccccagcagccggcgggtttcttcagtggagccgggctctggtctccgcagcccagtagcccgctagcccggccccctcccgctagtcgtaaagtgcagtaaaggcaccagcattttgcggcaccgtaggtgaggccggcggcgtgggccttttctctgcacggagccggcgcttttgcagttgcttctgcggaaaggtggtagttaagaatttgtaaaggccagagaactacctacgattctctcagcggtctctcttctcctcaagtttgaaatgctttatctcatcgggttgggcctgggagatgccaaggacatcacagtcaagggcctggaagttgttagacgctgcagtcgagtgtatctggaagcctacacctcagtcctaactgtagggaaggaagccttggaagagttttatggaagaaaattggttgttgctgatagagaagaagtggaacaagaagcagataatattttaaaggatgctgatatcagtgatgttgcattccttgtggttggtgatccatttggggccacaacacacagtgatcttgttctaagagcaacaaagctgggaattccttatagagttattcacaatgcctccataatgaatgctgtaggctgctgtggtttacagttatataagtttggagagacagtttctattgttttttggacagacacttggagaccagaaagcttctttgacaaagtgaagaagaacagacaaaatggcatgcacacattatgtttactagacatcaaagtaaaggagcagtctttggaaaatctaatcaagggaaggaagatctatgaacctccacggtatatgagtgtaaaccaagcagcccagcagcttctggagattgttcaaaatcaaagaatacgaggagaagaaccagcagttaccgaggagacactttgtgttggcttagccagggttggagccgacgaccagaaaattgcagcaggcactttaaggcaaatgtgcactgtggacttgggagaaccattgcattccttgatcatcacaggaggcagcatacatccaatggagatggagatgctaagtctgttttccataccagaaaatagctcagaatctcaaagcatcaatggactttgaacatagatatttaccattgtctgatgtaaatttcagccatatatggattgatatggtttggatgtatccccacccaagtctcatcttgaattttaatcctcataattcccaggtgttgtggtaggtaattgaatcatgggggcagtttccctcatgctattctcatgatagtgagctttcatgagatctgatggttttataagtgcctggcatttcccctactggctctcattctcactcttgccgccctgtgaagaggtgccttccaccgtgattgttaagtttcctgaggccttcccagccatgtggaactgtgagtcgaaaattaaacctcttttataattacccagtctcgggtatttcttcatagcagtgtgagaatggattaatacctggatgcatgcatgtttgtgtaacaaacaggtcttttggcttatctagtaagtataaaacaagtgaccaaaaagaagttgactcaacaatgcttggtttcttgtggcagtgagttttttccctatgatatcatcagttgttgctgctattttggcaaattttcaggatgtacacataaagcagaccaggctggaaagcttgtggatagacatccactgacagaatcatttaagagcagtttttatttatgaaaccaatttatacaaggtggttgttaacagaatataacttagaggtaactggaatttgaatcacttgaatctgttttaaagggtaaaaaatgttatgagtgccaagaaaagcaaataaaagattagtaaatgttcacaaaatatgt

SEQ ID NO: 278294 - DNA, 1517 bp, Homo sapiens
tctcgagcgaagagctactgcacttacccaggcttaggaagcgggtgtttaagccatgggttagagggctcgtgagcacgcccgatcctttccctgaggctatgaaacggtggctccacggactcctctcggccgactgacctttcgccgccctgccccagcagccggcgggtttcttcagtggagccgggctctggtctccgcagcccagtagcccgctagcccggccccctcccgctagtcgtaaagtgcagtaaaggcaccagcattttgcggcaccgtaggtgaggccggcggcgtgggccttttctctgcacggagccggcgcttttgcagttgcttctgcggaaaggtggtagttaagaatttgtaaaggccagagaactacctacgattctctcagcgggtaattggctgctcctaggtttgtgtaacaagaggcaaaactggaagagttttatggaagaaaattggttgttgctgatagagaagaagtggaacaagaagcagataatattttaaaggatgctgatatcagtgatgttgcattccttgtggttggtgatccatttggggccacaacacacagtgatcttgttctaagagcaacaaagctgggaattccttatagagttattcacaatgcctccataatgaatgctgtaggctgctgtggtttacagttatataagtttggagagacagtttctattgttttttggacagacacttggagaccagaaagcttctttgacaaagtgaagaagaacagacaaaatggcatgcacacattatgtttactagacatcaaagtaaaggagcagtctttggaaaatctaatcaagggaaggaagatctatgaacctccacggtatatgagtgtaaaccaagcagcccagcagcttctggagattgttcaaaatcaaagaatacgaggagaagaaccagcagttaccgaggagacactttgtgttggcttagccagggttggagccgacgaccagaaaattgcagcaggcactttaaggcaaatgtgcactgtggacttgggagaaccattgcattccttgatcatcacaggaggcagcatacatccaatggagatggagatgctaagtctgttttccataccagaaaatagctcagaatctcaaagcatcaatggactttgaacatagatatttaccattgtctgatgtaaatttcagccatatatggattgatatggtttggatgtatccccacccaagtctcatcttgaattttaatcctcataattcccaggtgttgtggtaggtaattgaatcatgggggcagtttccctcatgctattctcatgatagtgagctttcatgagatctgatggttttataagtgcctggcatttcccctactggctctcattctcactcttgccgccctgtgaagaggtgccttccaccgtgattgttaagtttcctgaggccttcccagccatgtggaactgtgagtcgaaaattaaacctcttttataatta

SEQ ID NO: 278295 - DNA, 1492 bp, Homo sapiens
tctcgagcgaagagctactgcacttacccaggcttaggaagcgggtgtttaagccatgggttagagggctcgtgagcacgcccgatcctttccctgaggctatgaaacggtggctccacggactcctctcggccgactgacctttcgccgccctgccccagcagccggcgggtttcttcagtggagccgggctctggtctccgcagcccagtagcccgctagcccggccccctcccgctagtcgtaaagtgcagtaaaggcaccagcattttgcggcaccgtaggtgaggccggcggcgtgggccttttctctgcacggagccggcgcttttgcagttgcttctgcggaaaggtggtagttaagaatttgtaaaggccagagaactacctacgattctctcagcgggtaattggctgctcctaggaagagttttatggaagaaaattggttgttgctgatagagaagaagtggaacaagaagcagataatattttaaaggatgctgatatcagtgatgttgcattccttgtggttggtgatccatttggggccacaacacacagtgatcttgttctaagagcaacaaagctgggaattccttatagagttattcacaatgcctccataatgaatgctgtaggctgctgtggtttacagttatataagtttggagagacagtttctattgttttttggacagacacttggagaccagaaagcttctttgacaaagtgaagaagaacagacaaaatggcatgcacacattatgtttactagacatcaaagtaaaggagcagtctttggaaaatctaatcaagggaaggaagatctatgaacctccacggtatatgagtgtaaaccaagcagcccagcagcttctggagattgttcaaaatcaaagaatacgaggagaagaaccagcagttaccgaggagacactttgtgttggcttagccagggttggagccgacgaccagaaaattgcagcaggcactttaaggcaaatgtgcactgtggacttgggagaaccattgcattccttgatcatcacaggaggcagcatacatccaatggagatggagatgctaagtctgttttccataccagaaaatagctcagaatctcaaagcatcaatggactttgaacatagatatttaccattgtctgatgtaaatttcagccatatatggattgatatggtttggatgtatccccacccaagtctcatcttgaattttaatcctcataattcccaggtgttgtggtaggtaattgaatcatgggggcagtttccctcatgctattctcatgatagtgagctttcatgagatctgatggttttataagtgcctggcatttcccctactggctctcattctcactcttgccgccctgtgaagaggtgccttccaccgtgattgttaagtttcctgaggccttcccagccatgtggaactgtgagtcgaaaattaaacctcttttataatta

SEQ ID NO: 278296 - DNA, 1554 bp, Homo sapiens
tctcgagcgaagagctactgcacttacccaggcttaggaagcgggtgtttaagccatgggttagagggctcgtgagcacgcccgatcctttccctgaggctatgaaacggtggctccacggactcctctcggccgactgacctttcgccgccctgccccagcagccggcgggtttcttcagtggagccgggctctggtctccgcagcccagtagcccgctagcccggccccctcccgctagtcgtaaagtgcagtaaaggcaccagcattttgcggcaccgtaggtgaggccggcggcgtgggccttttctctgcacggagccggcgcttttgcagttgcttctgcggaaaggtggtagttaagaatttgtaaaggccagagaactacctacgattctctcagcggtctctcttctcctcaagtttgaaatgctttatctcatcgggttgggcctgggagatgccaaggacatcacagtcaagggcctggaagttgttagacgctgcagtcgagtgtatctggaagcctacacctcagtcctaactgtagggaaggaagccttggaagagttttatggaagaaaattggttgttgctgatagagaagaagtggaacaagaagcagataatattttaaaggatgctgatatcagtgatgttgcattccttgtggttggtgatccatttggggccacaacacacagtgatcttgttctaagagcaacaaagctgggaattccttatagagttattcacaatgcctccataatgaatgctgtaggctgctgtggtttacagttatataagtttggagagacagtttctattgttttttggacagacacttggagaccagaaagcttctttgacaaagtgaagaagggaaggaagatctatgaacctccacggtatatgagtgtaaaccaagcagcccagcagcttctggagattgttcaaaatcaaagaatacgaggagaagaaccagcagttaccgaggagacactttgtgttggcttagccagggttggagccgacgaccagaaaattgcagcaggcactttaaggcaaatgtgcactgtggacttgggagaaccattgcattccttgatcatcacaggaggcagcatacatccaatggagatggagatgctaagtctgttttccataccagaaaatagctcagaatctcaaagcatcaatggactttgaacatagatatttaccattgtctgatgtaaatttcagccatatatggattgatatggtttggatgtatccccacccaagtctcatcttgaattttaatcctcataattcccaggtgttgtggtaggtaattgaatcatgggggcagtttccctcatgctattctcatgatagtgagctttcatgagatctgatggttttataagtgcctggcatttcccctactggctctcattctcactcttgccgccctgtgaagaggtgccttccaccgtgattgttaagtttcctgaggccttcccagccatgtggaactgtgagtcgaaaattaaacctcttttataatta

SEQ ID NO: 278297 - DNA, 1488 bp, Homo sapiens
tctcgagcgaagagctactgcacttacccaggcttaggaagcgggtgtttaagccatgggttagagggctcgtgagcacgcccgatcctttccctgaggctatgaaacggtggctccacggactcctctcggccgactgacctttcgccgccctgccccagcagccggcgggtttcttcagtggagccgggctctggtctccgcagcccagtagcccgctagcccggccccctcccgctagtcgtaaagtgcagtaaaggcaccagcattttgcggcaccgtaggtgaggccggcggcgtgggccttttctctgcacggagccggcgcttttgcagttgcttctgcggaaaggtggtagttaagaatttgtaaaggccagagaactacctacgattctctcagcggtctctcttctcctcaagtttgaaatgctttatctcatcgggttgggcctgggagatgccaaggacatcacagtcaagggcctggaagttgttagacgctgcagtcgagtgtatctggaagcctacacctcagtcctaactgtagggaaggaagccttggaagagttttatggaagaaaattggttgttgctgatagagaagaagtggaacaagaagcagataatattttaaaggatgctgatatcagtgatgttgcattccttgtggttggtgatccatttggggccacaacacacagtgatcttgttctaagagcaacaaagctgggaattccttatagagttattcacaatgcctccataatgaatgctgtaggctgctgtggtttacagttatataagtttggagagacagtttctattgttttttggacagacacttggagaccagaaagcttctttgacaaagtgaagaagaacagacaaaatggcatgcacacattatgtttactagcagttaccgaggagacactttgtgttggcttagccagggttggagccgacgaccagaaaattgcagcaggcactttaaggcaaatgtgcactgtggacttgggagaaccattgcattccttgatcatcacaggaggcagcatacatccaatggagatggagatgctaagtctgttttccataccagaaaatagctcagaatctcaaagcatcaatggactttgaacatagatatttaccattgtctgatgtaaatttcagccatatatggattgatatggtttggatgtatccccacccaagtctcatcttgaattttaatcctcataattcccaggtgttgtggtaggtaattgaatcatgggggcagtttccctcatgctattctcatgatagtgagctttcatgagatctgatggttttataagtgcctggcatttcccctactggctctcattctcactcttgccgccctgtgaagaggtgccttccaccgtgattgttaagtttcctgaggccttcccagccatgtggaactgtgagtcgaaaattaaacctcttttataatta

SEQ ID NO: 278298 - DNA, 1322 bp, Homo sapiens
tctcgagcgaagagctactgcacttacccaggcttaggaagcgggtgtttaagccatgggttagagggctcgtgagcacgcccgatcctttccctgaggctatgaaacggtggctccacggactcctctcggccgactgacctttcgccgccctgccccagcagccggcgggtttcttcagtggagccgggctctggtctccgcagcccagtagcccgctagcccggccccctcccgctagtcgtaaagtgcagtaaaggcaccagcattttgcggcaccgtaggtgaggccggcggcgtgggccttttctctgcacggagccggcgcttttgcagttgcttctgcggaaaggtggtagttaagaatttgtaaaggccagagaactacctacgattctctcagcgggaagagttttatggaagaaaattggttgttgctgatagagaagaagtggaacaagaagcagataatattttaaaggatgctgatatcagtgatgttgcattccttgtggttggtgatccatttggacacttggagaccagaaagcttctttgacaaagtgaagaagaacagacaaaatggcatgcacacattatgtttactagacatcaaagtaaaggagcagtctttggaaaatctaatcaagggaaggaagatctatgaacctccacggtatatgagtgtaaaccaagcagcccagcagcttctggagattgttcaaaatcaaagaatacgaggagaagaaccagcagttaccgaggagacactttgtgttggcttagccagggttggagccgacgaccagaaaattgcagcaggcactttaaggcaaatgtgcactgtggacttgggagaaccattgcattccttgatcatcacaggaggcagcatacatccaatggagatggagatgctaagtctgttttccataccagaaaatagctcagaatctcaaagcatcaatggactttgaacatagatatttaccattgtctgatgtaaatttcagccatatatggattgatatggtttggatgtatccccacccaagtctcatcttgaattttaatcctcataattcccaggtgttgtggtaggtaattgaatcatgggggcagtttccctcatgctattctcatgatagtgagctttcatgagatctgatggttttataagtgcctggcatttcccctactggctctcattctcactcttgccgccctgtgaagaggtgccttccaccgtgattgttaagtttcctgaggccttcccagccatgtggaactgtgagtcgaaaattaaacctcttttataatta

SEQ ID NO: 278299 - DNA, 1419 bp, Homo sapiens
tctcgagcgaagagctactgcacttacccaggcttaggaagcgggtgtttaagccatgggttagagggctcgtgagcacgcccgatcctttccctgaggctatgaaacggtggctccacggactcctctcggccgactgacctttcgccgccctgccccagcagccggcgggtttcttcagtggagccgggctctggtctccgcagcccagtagcccgctagcccggccccctcccgctagtcgtaaagtgcagtaaaggcaccagcattttgcggcaccgtaggtgaggccggcggcgtgggccttttctctgcacggagccggcgcttttgcagttgcttctgcggaaaggtggtagttaagaatttgtaaaggccagagaactacctacgattctctcagcgggaagagttttatggaagaaaattggttgttgctgatagagaagaagtggaacaagaagcagataatattttaaaggatgctgatatcagtgatgttgcattccttgtggttggtgatccatttggggccacaacacacagtgatcttgttctaagagcaacaaagctgggaattccttatagagttattcacaatgcctccataatgaatgctgtaggctgctgtggtttacagttatataagtttggagagacagtttctattgttttttggacagacacttggagaccagaaagcttctttgacaaagtgaagaagaacagacaaaatggcatgcacacattatgtttactagacatcaaagtaaaggagcagtctttggaaaatctaatcaagggaaggaagatctatgaacctccacggtatatgagtgtaaaccaagcagcccagcagcttctggagattgttcaaaatcaaagaatacgaggagaagaaccagcagttaccgaggagacactttgtgttggcttagccagggttggagccgacgaccattgcattccttgatcatcacaggaggcagcatacatccaatggagatggagatgctaagtctgttttccataccagaaaatagctcagaatctcaaagcatcaatggactttgaacatagatatttaccattgtctgatgtaaatttcagccatatatggattgatatggtttggatgtatccccacccaagtctcatcttgaattttaatcctcataattcccaggtgttgtggtaggtaattgaatcatgggggcagtttccctcatgctattctcatgatagtgagctttcatgagatctgatggttttataagtgcctggcatttcccctactggctctcattctcactcttgccgccctgtgaagaggtgccttccaccgtgattgttaagtttcctgaggccttcccagccatgtggaactgtgagtcgaaaattaaacctcttttataatta

SEQ ID NO: 278300 - DNA, 912 bp, Homo sapiens
tctcgagcgaagagctactgcacttacccaggcttaggaagcgggtgtttaagccatgggttagagggctcgtgagcacgcccgatcctttccctgaggctatgaaacggtggctccacggactcctctcggccgactgacctttcgccgccctgccccagcagccggcgggtttcttcagtggagccgggctctggtctccgcagcccagtagcccgctagcccggccccctcccgctagtcgtaaagtgcagtaaaggcaccagcattttgcggcaccgtaggtgaggccggcggcgtgggccttttctctgcacggagccggcgcttttgcagttgcttctgcggaaaggtggtagttaagaatttgtaaaggccagagaactacctacgattctctcagcggtctctcttctcctcaagtttgaaatgctttatctcatcgggttgggcctgggagatgccaaggacatcacagtcaagggcctggaagttgttagacgctgcagtcgagtgtatctggaagcctacacctcagtcctaactgtagggaaggaagccttggaagagttttatggaagaaaattggttgttgctgatagagaagaagtggaacaagaagcagataatattttaaaggatgctgatatcagtgatgttgcattccttgtggttggtgatccatttggggccacaacacacagtgatcttgttctaagagcaacaaagctgggaattccttatagagttattcacaatgcctccataatgaatgctgtaggctgctgtggtttacagttatataagttagtgctcacagattgcctctctttttgtttgatttctccctcctcaaatctgtaatttatttctgaactcctttccattagcaagcagataaaatggttacac

SEQ ID NO: 278301 - DNA, 799 bp, Homo sapiens
ctggtccaggcacagccttgccacagtccagagaaggccacctctaatggggcctgcaggcattgtggccacaggaggaaagggccggggggcccctctccccactcctggggcagctcccttgcccttccccagcctcaggcactctcatcatctccgttggcctcttctgggggctcttggggttcatctccagggtggaaaacttggagggcccctcctggcagagtcaaggatggggtcagcgagaccccatcccctcagccctcaacctttgtttcacccagagcccctctgaatcctgggagctggctctttccactccccgagggggccctcaggcccaccctggctgtcccagcatggcccccgcggcttctgcgctgcacccttcccgtccctccctgctcctcatggtcactagtgcctgcttatccactgggtcatcccctcggccagggcccctcctgccctggaagcccagcaagcgcccactcgtagctcctcagcgggtcctcgccggcctgtgccaggtgcaggggccagtgggaggacaacaggagccacgcaggccatcagcgcaagagcaaacgcacatggcaacgttggtccgctcagccactggttctgtggtggaacggtggatgtctgcactgtgacatcagctgagtacgagaactgccggttgcgggttataaacaagatgatgcccttgcggtaggccatgtgggcggtgaagttcaaggccagctggaggtgcgtggctgtctgttccaggtcgatgatgtcgtggtccagg

SEQ ID NO: 278302 - DNA, 1271 bp, Homo sapiens
aaattcctgactctcagaaacttgtgcataggaagaatctggggaccttgtggaaagtgcagctcccagacacctgcctcaactgactctgtggatgtggagcgggccctgccactccccatttttaacctactggggagagaacgggaggcaaaactacaaacctgaaaataaagtggctaagtggcttctcaaactctttccaagtctctaaacaccgctgagtctggattgtcactgtgctctacagaggaaacgaagaccaagaattaagcagctcgattttccagtgcagactgtttgacctttgtgactagtaaaccactccttttattaaggccaaatctgcaaaatctgtcttaaagaaaatggtcagtctttcctttcttctaaacatctctgattttttcatcttgtttcctgactattcacagacagcaacaataacagattctggaaagaaggatttgtagtatacaccacttgcctcactgctttatccaccaacggaccctttatctgggaccaaagattctgagctgaaagggccctcagagcagccaaggcatgcatgagaagagaagggctatgaagtggaagctgagggagcgtggactgcaggcttgggagagggagcatggtgtcctgcagagccacatgctggcagaactgggtctacagacacattttattcagtccctaaaccacagaaagtgaggacttctaatatgtggtaccagagtgtgcagcaaagaaccttctgcaaagagctttggctgcagatgttcaagatttgccatggactccagaactctcaaatcacttggaaatttgtctatgcagcattatctggtgtcatgcctgagatattgaaggaaaagccccagcctttcaggggtttctgagaagaatatgccccttttctgtattcataactgtatcttctttctctgggcagtattgagagtgggtaaaagaacatggacttgaagtcagagagtcccagcttctagccctagctatgtgaccaagggcaagttgtttccctctctgagcctgttttcatacttgagaaataggaaatagggatgttgtgaatattaaatgagatcgttcttggaaagaatattagcaaggtacctggcgcacggtcagtgctccacagagtctgaggaggtgatgtatttgccaagagacaatgccaaagaagggaggaatgcaattaggcatgtctttctaagccagtaaagggcctctttggatctttgtat

SEQ ID NO: 278303 - DNA, 436 bp, Homo sapiens
aatggaaccatctatggcggccaggtctttttcaggttcccttagcgccagaagcggttggtacagtctggtgctcctggaggacgccctgtgccttaaagcagctgtaaccaaggcctctcaagaggcggctacggatcctagcggatcgacacgccacacagcctcgtccccagcagtaggtggaggccctgggggtgcctaacaagcctcagaacaccaagaaatccgcgtggttgtgcaggtctttgctgttcagtagcattccacaaatagtgtgtccaaaacgcatctgtagatgtaacttgagtgaatgaatgaatgattcgagttgctccttctacccaataaagtagataagattttatctttctcatctttccaaggcccctttatagttgggaaaagtgagtatttggaaagatgacttgtccaa

SEQ ID NO: 278304 - DNA, 404 bp, Homo sapiens
ccagggcaccttcaccctgctcagcttgtggctccaacattctagaagccgaggcctctgccatccctgccctttcccatggatattccatttcaattagacaacccagcctggccggaatccccctgcgttccttcttttcctttgtgtatttttgagacggggtgttgctccgtcacccaggctggagtgtagtgggatcctggcccactgcagcctcaaattcctgggctgaggcaatcctgccgcctcagcctcctgagtagctggggttacaagagcaagccaccacacccagctaattttgaaaaatattttttgtagaggagaggtcttgctttgttgtccaggttggtctcaaactccagggctcaagggatcctttcccgttggcctcccaaggc

SEQ ID NO: 278305 - DNA, 348 bp, Homo sapiens
ccagggcaccttcaccctgctcagcttgtggctccaacattctagaagccgaggcctctgccatccctgccctttcccatggatattccatttcaattagacaacccagcctggccggaatccccctgcgttccttcttttcctttgtgtatttttgagacggggtgttgctccgtcacccaggctggagtgtagtgggatcctggcccactgcagcctcaaattcctgggctgaggcagaagaattgcttgaacccaggaggtggaggttacagtgagccgagatcctgccactgtactccagcctgggcgacagatcacgactccatctcaaaataaataaataaa

SEQ ID NO: 278306 - DNA, 523 bp, Homo sapiens
ccatccgggtcctggcgcggtgctctcccggcagcgacgggcgcgagggccggggcattcccacggccgcgacggccctctccgcgagcgcgaggatgtacatgaagcatggcaccaacagctgctcctgtgaggcctcaagaagcttacaatcgtggcagaagctgaagggggagccagcgtgtggcatggcaagggaaggagcaagagagagagggaggagctgccaggctcttttgaacaaccagatctcacgtgaactcacagattgaaattcactcattactgtgaggacacaccaagccatttatgagggatgcacccctatgacccaaacacctcctactaggcccacctccaacatcagaggtcacatgaaacgagatgtataggggacaaaacagtcaaaccatatcagtcccaccagcaagaaggctctcactggatgtggtcccttgatcttggacttctcagcctctgtaactgtaaaaaataaattttgtttcttataaattatccggtt

SEQ ID NO: 278307 - DNA, 1184 bp, Homo sapiens
ggggctcctgttcccctaacccactgaattcagccttccagaggccgaggtggctccaccacagcttctgtccggtggtgaccagcactgatctccggagccaagggaggacccgggacacctgggagccgggaaatgttttccatggctccgagacaatgacaccgcttcagtgtgaactctcatgaattgagtctagatccccagtgctgtccgtctcacctgtcctcctctacacatatctgggatatgtcacggcttggtggtctttgaagatgtgactctgaacttcatccagaaggagtaggctttgctggatttttccgtgaagaatctgtagagatgtgatgagggaagccatcagcacctggcttctatagctgcagcccaagaggccaactggaacgttaacatcagacactaatccagctgactggacacaattgggaaaactggttattttaccaaggctttaactggaatggtgtgccttcctttaaggaatcaaatttgacttatggagccaataaagcccttggaaagctggcctcagatttcatgtacagtccctgtacagggtttccgatctgtgagattttttaaactgacaggatcatggccatttcacagacaactacccaaaaatatctacagacggcactgctcctaccaacccgataccagagaactctctgtcccctcgtcagcaggaagtagccagaaagaacatgccgcccctcgtcctttttataactatgaggtctggattgacagagcagaagcatcaccattgtggataagcgcctcattttaaaattcaccttaatcaaaaactgcctaaatccaaagggcatcagcctaatggctaaggtcagcatgatcacaaaccacaaataacatctccaaccaaaaacattccagacacctcccacagagaaatgctagcctcgggataacccctctcctgccggaaagatgtcacccccaagataaccacccctccgcccagaacattccaaccctgccacaaacttctcccccacacagaaacattccaagcttgtaataagctccctcaccctaaaaccaacgtacattcttagtctgcaaggaaaagtgctcctgactgaccagccagaatcctctctcaggtcttttctataataaacctgtctttgactgtc

SEQ ID NO: 278308 - DNA, 806 bp, Homo sapiens
ggggctcctgttcccctaacccactgaattcagccttccagaggccgaggtggctccaccacagcttctgtccggtggtgaccagcactgatctccggagccaagggaggacccgggacacctgggagccgggaaatgttttccatggctccgagacaatgacaccgcttcagtgtgaactctcatgaattgagtctagatccccagtgctgtccgtctcacctgtcctcctctacacatatctgggatatgtcacggcttggtggtctttgaagatgtgactctgaacttcatccagaaggagtaggctttgctggatttttccgtgaagaatctgtagagatgtgatgagggaagccatcagcacctggcttctatagctgcagcccaagaggccaactggaacgttaacatcagacactaatccagctgactggacacaattgggaaaactggttattttaccaaggctttaactggaatggtgtgccttcctttaaggaatcaaatttgacttatggagccaataaagcccttggaaagctggcctcagatttcatgtacagtccctgtacagggtttccgatctgtggtaagtaaagaatgtcactttctgacaggccaggagtcccaagttatcttagaacctcaagaagagaggatttctcccaactcataggtattcagtggtacaaatctatggctggccttgcctttaaaaaggtcttatctcacattccttctacaaaacaaagttccatcaaagccaatttaaaggacctaagtaacaaataattattcttgct

SEQ ID NO: 278309 - DNA, 1146 bp, Homo sapiens
ggggctcctgttcccctaacccactgaattcagccttccagaggccgaggtggctccaccacagcttctgtccggtggtgaccagcactgatctccggagccaagggaggacccgggacacctgggagccgggaaatgttttccatggctccgagacaatgacaccgcttcagtgtgaactctcatgaattgagtctagatccccagtgctgtccgtctcacctgtcctcctctacacatatctgggatatgtcacggcttggtggtctttgaagatgtgactctgaacttcatccagaaggagtaggctttgctggatttttccgtgaagaatctgtagagatgtgatgagggaagccatcagcacctggcttctatagctgcagcccaagaggccaactggaacgttaacatcagacactaatccagctgactggacacaattgggaaaactggttattttaccaaggctttaactggaatggtgtgccttcctttaaggaatcaaatttgacttatggagccaataaagcccttggaaagctggcctcagatttcatgtacagtccctgtacagggtttccgatctgtgacaactacccaaaaatatctacagacggcactgctcctaccaacccgataccagagaactctctgtcccctcgtcagcaggaagtagccagaaagaacatgccgcccctcgtcctttttataactatgaggtctggattgacagagcagaagcatcaccattgtggataagcgcctcattttaaaattcaccttaatcaaaaactgcctaaatccaaagggcatcagcctaatggctaaggtcagcatgatcacaaaccacaaataacatctccaaccaaaaacattccagacacctcccacagagaaatgctagcctcgggataacccctctcctgccggaaagatgtcacccccaagataaccacccctccgcccagaacattccaaccctgccacaaacttctcccccacacagaaacattccaagcttgtaataagctccctcaccctaaaaccaacgtacattcttagtctgcaaggaaaagtgctcctgactgaccagccagaatcctctctcaggtcttttctataataaacctgtctttgactgtc

SEQ ID NO: 278310 - DNA, 2529 bp, Homo sapiens
cggggccgggcctcggagccgggactcgcgggcggcgggcgggggcgtcgctgcgcggctggccggtgaggccgcggcatggggcgagtgcagctcttcgagatcagcctgagccacggccgcgtcgtctacagccccggggagccgttggctgggaccgtgcgcgtgcgcctgggggcaccgctgccgttccgagccatccgggtgacctgcataggttcctgcggggtctccaacaaggctaatgacacagcgtgggtagtggaggagggttacttcaacagttccctgtcgctggcagacaaggggagcctgcccgctggagagcacagcttccccttccagttcctgcttcctgccactgcacccacgtcctttgagggtcctttcgggaagatcgtgcaccaggtgagggccgccatccacacgccacggttttccaaggatcacaagtgcagcctcgtgttctatatcttgagccccttgaacctgaacagcatcccagacattgagcaacccaacgtggcctctgccaccaagaagttctcctacaagctggtgaagacgggcagcgtggtcctcacagccagcactgatctccgcggctatgtggtggggcaggcactgcagctgcatgccgacgttgagaaccagtcaggcaaggacaccagccctgtggtggccagtctgctgcagaaagtgtcctataaggccaagcgctggatccacgacgtacggaccattgcggaggtggagggtgcgggcgtcaaggcctggcggcgggcgcagtggcacgagcagatcctggtgcctgccttgccccagtcggccctgccgggctgcagcctcatccacatcgactactacttacaggtctctctgaaggcgccggaagctactgtgaccctcccggtcttcattggcaatattgctgtgaaccatgccccagtgagcccccggccaggcctggggctgcctcctggggccccacccctggtggtgccttccgcaccaccccaggaggaggctgaggctgaggctgcggctggcggcccccacttcttggaccccgtcttcctctccaccaagagccattcgcagcggcagcccctgctggccaccttgagttctgtgcctggtgcgccggagccctgccctcaggatggcagccctgcctcacacccgctgcaccctcccttgtgcatttcaacaggtgccactgtcccctactttgcagagggctccggggggccagtgcccactaccagcaccttgattcttcctccagagtacagttcttggggctacccctatggtgagtcgacagccagggcttggcagggaggggacgccaagagccccacgcagaccctgctttcttcccgcagaggccccaccgtcttatgagcagagctgcggcggcgtggaacccagcctgacccctgagagctgaccccgtgctgccttctccaggcaggcctggcctctgccctgggactggggcgcccagggcctcgtgccttctctcttggcctagcctggcccactcaggacctgcccagcctctgccagctcctctggcatccgccctcttctccctggggctggggtgggggtggcagggagctgggacctggagagacaactcctgtaaataaaacactttatttgtagagctgggcctcaccggcctcgccttgggcaccctccagcctctggcagggcctgaccctgaccccatcctgggctctgctcatgccagggcagaccctgctcctcaggtgccccctactaccctgggggcgcgctcaggctaccatgcctgggcggagccgcggggctggctccctttaacagaggacgggggctggcgctgggccttccagagccgcctaaggacacgtccttggagcccggctcatgaaatggggcctcacgcaaccttggtgtttggttaaatttgtgccttggctcctgttgcgtttaggcacccaggttcccaagcggtgtggtgtggacctcccctgctgagaaacccgctggcgcgtggaggggcttgcccaggtccctccgacaggagaccctgctccctgggccttggcccctgctagcaccactgccaggcctggctctgagggacgctgcttctcccctgcccacgtctccaaggcctgaaaggcagggttctgtggaacagcatttctcaaaggggcatcctgcagacgttccagccccaggggaggccccgtgatgctggctggcctgcctggagggtgcttccagaaacaacggagatggtggtgaagaaggctctgggttcaaattccagttctcctttagggcgaaggggtgactgtggctaggtttgtcagttaccttatctataaaatgcacaggaccaggccgggcacggtggctccctcctgtaatcccagtactttgggaggctgaggcaggtggattgcttgaggtcaggagttccagatcagcctgggcaacatagtgaaactccatctgtacaaaaaaaaa

SEQ ID NO: 278311 - DNA, 2456 bp, Homo sapiens
cggggccgggcctcggagccgggactcgcgggcggcgggcgggggcgtcgctgcgcggctggccggtgaggccgcggcatggggcgagtgcagctcttcgagatcagcctgagccacggccgcgtcgtctacagccccggggagccgttggctgggaccgtgcgcgtgcgcctgggggcaccgctgccgttccgagccatccgggtgacctgcataggttcctgcggggtctccaacaaggctaatgacacagcgtgggtagtggaggagggttacttcaacagttccctgtcgctggcagacaaggggagcctgcccgctggagagcacagcttccccttccagttcctgcttcctgccactgcacccacgtcctttgagggtcctttcgggaagatcgtgcaccaggtgagggccgccatccacacgccacggttttccaaggatcacaagtgcagcctcgtgttctatatcttgagccccttgaacctgaacagcatcccagacattgagcaacccaacgtggcctctgccaccaagaagttctcctacaagctggtgaagacgggcagcgtggtcctcacagccagcactgatctccgcggctatgtggtggggcaggcactgcagctgcatgccgacgttgagaaccagtcaggcaaggacaccagccctgtggtggccagtctgctgcagaaagtgtcctataaggccaagcgctggatccacgacgtacggaccattgcggaggtggagggtgcgggcgtcaaggcctggcggcgggcgcagtggcacgagcagatcctggtgcctgccttgccccagtcggccctgccgggctgcagcctcatccacatcgactactacttacaggtctctctgaaggcgccggaagctactgtgaccctcccggtcttcattggcaatattgctgtgaaccatgccccagtgagcccccggccaggcctggggctgcctcctggggccccacccctggtggtgccttccgcaccaccccaggaggaggctgaggctgaggctgcggctggcggcccccacttcttggaccccgtcttcctctccaccaagagccattcgcagcggcagcccctgctggccaccttgagttctgtgcctggtgcgccggagccctgccctcaggatggcagccctgcctcacacccgctgcaccctcccttgtgcatttcaacaggtgccactgtcccctactttgcagagggctccggggggccagtgcccactaccagcaccttgattcttcctccagagtacagttcttggggctacccctatgaggccccaccgtcttatgagcagagctgcggcggcgtggaacccagcctgacccctgagagctgaccccgtgctgccttctccaggcaggcctggcctctgccctgggactggggcgcccagggcctcgtgccttctctcttggcctagcctggcccactcaggacctgcccagcctctgccagctcctctggcatccgccctcttctccctggggctggggtgggggtggcagggagctgggacctggagagacaactcctgtaaataaaacactttatttgtagagctgggcctcaccggcctcgccttgggcaccctccagcctctggcagggcctgaccctgaccccatcctgggctctgctcatgccagggcagaccctgctcctcaggtgccccctactaccctgggggcgcgctcaggctaccatgcctgggcggagccgcggggctggctccctttaacagaggacgggggctggcgctgggccttccagagccgcctaaggacacgtccttggagcccggctcatgaaatggggcctcacgcaaccttggtgtttggttaaatttgtgccttggctcctgttgcgtttaggcacccaggttcccaagcggtgtggtgtggacctcccctgctgagaaacccgctggcgcgtggaggggcttgcccaggtccctccgacaggagaccctgctccctgggccttggcccctgctagcaccactgccaggcctggctctgagggacgctgcttctcccctgcccacgtctccaaggcctgaaaggcagggttctgtggaacagcatttctcaaaggggcatcctgcagacgttccagccccaggggaggccccgtgatgctggctggcctgcctggagggtgcttccagaaacaacggagatggtggtgaagaaggctctgggttcaaattccagttctcctttagggcgaaggggtgactgtggctaggtttgtcagttaccttatctataaaatgcacaggaccaggccgggcacggtggctccctcctgtaatcccagtactttgggaggctgaggcaggtggattgcttgaggtcaggagttccagatcagcctgggcaacatagtgaaactccatctgtacaaaaaaaaa

SEQ ID NO: 278312 - DNA, 2252 bp, Homo sapiens
cggggccgggcctcggagccgggactcgcgggcggcgggcgggggcgtcgctgcgcggctggccggtgaggccgcggcatggggcgagtgcagctcttcgagatcagcctgagccacggccgcgtcgtctacagccccggggagccgttggctgggaccgtgcgcgtgcgcctgggggcaccgctgccgttccgagccatccgggtgacctgcataggttcctgcggggtctccaacaaggctaatgacacagcgtgggtagtggaggagggttacttcaacagttccctgtcgctggcagacaaggggagcctgcccgctggagagcacagcttccccttccagttcctgcttcctgccactgcacccacgtcctttgagggtcctttcgggaagatcgtgcaccaggtgagggccgccatccacacgccacggttttccaaggatcacaagtgcagcctcgtgttctatatcttgagccccttgaacctgaacagcatcccagacattgagcaacccaacgtggcctctgccaccaagaagttctcctacaagctggtgaagacgggcagcgtggtcctcacagccagcactgatctccgcggctatgtggtggggcaggcactgcagctgcatgccgacgttgagaaccagtcaggcaaggacaccagccctgtggtggccagtctgctgcagaaagtgtcctataaggccaagcgctggatccacgacgtacggaccattgcggaggtggagggtgcgggcgtcaaggcctggcggcgggcgcagtggcacgagcagatcctggtgcctgccttgccccagtcggccctgccgggctgcagcctcatccacatcgactactacttacaggtctctctgaaggcgccggaagctactgtgaccctcccggtcttcattggcaatattgctgtgaaccatgccccagtgagcccccggccaggcctggggctgcctcctggggccccacccctggtggtgccttccgcaccaccccaggaggaggctgaggctgaggctgcggctggcggcccccacttcttggaccccgtcttcctctccaccaagagccattcgcagcggcagcccctgctggccaccttgagttctgtgcctggtgcgccggagccctgccctcaggatggcagccctgcctcacacccgctgcaccctcccttgtgcatttcaacaggtgccactgtcccctactttgcagagggctccggggggccagtgcccactaccagcaccttgattcttcctccagagtacagttcttggggctacccctatggtgagtcgacagccagggcttggcagggagggagctgggacctggagagacaactcctgtaaataaaacactttatttgtagagctgggcctcaccggcctcgccttgggcaccctccagcctctggcagggcctgaccctgaccccatcctgggctctgctcatgccagggcagaccctgctcctcaggtgccccctactaccctgggggcgcgctcaggctaccatgcctgggcggagccgcggggctggctccctttaacagaggacgggggctggcgctgggccttccagagccgcctaaggacacgtccttggagcccggctcatgaaatggggcctcacgcaaccttggtgtttggttaaatttgtgccttggctcctgttgcgtttaggcacccaggttcccaagcggtgtggtgtggacctcccctgctgagaaacccgctggcgcgtggaggggcttgcccaggtccctccgacaggagaccctgctccctgggccttggcccctgctagcaccactgccaggcctggctctgagggacgctgcttctcccctgcccacgtctccaaggcctgaaaggcagggttctgtggaacagcatttctcaaaggggcatcctgcagacgttccagccccaggggaggccccgtgatgctggctggcctgcctggagggtgcttccagaaacaacggagatggtggtgaagaaggctctgggttcaaattccagttctcctttagggcgaaggggtgactgtggctaggtttgtcagttaccttatctataaaatgcacaggaccaggccgggcacggtggctccctcctgtaatcccagtactttgggaggctgaggcaggtggattgcttgaggtcaggagttccagatcagcctgggcaacatagtgaaactccatctgtacaaaaaaaaa

SEQ ID NO: 278313 - DNA, 2111 bp, Homo sapiens
cggggccgggcctcggagccgggactcgcgggcggcgggcgggggcgtcgctgcgcggctggccggtgaggccgcggcatggggcgagtgcagctcttcgagatcagcctgagccacggccgcgtcgtctacagccccggggagccgttggctgggaccgtgcgcgtgcgcctgggggcaccgctgccgttccgagccatccgggtgacctgcataggttcctgcggggtctccaacaaggctaatgacacagcgtgggtagtggaggagggttacttcaacagttccctgtcgctggcagacaaggggagcctgcccgctggagagcacagcttccccttccagttcctgcttcctgccactgcacccacgtcctttgagggtcctttcgggaagatcgtgcaccaggtgagggccgccatccacacgccacggttttccaaggatcacaagtgcagcctcgtgttctatatcttgagccccttgaacctgaacagcatcccagacattgagcaacccaacgtggcctctgccaccaagaagttctcctacaagctggtgaagacgggcagcgtggtcctcacagccagcactgatctccgcggctatgtggtggggcaggcactgcagctgcatgccgacgttgagaaccagtcaggcaaggacaccagccctgtggtggccagtctgctgcagaaagtgtcctataaggccaagcgctggatccacgacgtacggaccattgcggaggtggagggtgcgggcgtcaaggcctggcggcgggcgcagtggcacgagcagatcctggtgcctgccttgccccagtcggccctgccgggctgcagcctcatccacatcgactactacttacaggtctctctgaaggcgccggaagctactgtgaccctcccggtcttcattggcaatattgctgtgaaccatgccccagtgagcccccggccaggcctggggctgcctcctggggccccacccctggtggtgccttccgcaccaccccaggaggaggctgaggctgaggctgcggctggcggcccccacttcttggaccccgtcttcctctccaccaagagccattcgcagcggcagcccctgctggccaccttgagttctgtgcctggtgcgccggagccctgccctcaggatggcagccctgcctcacacccgctgcaccctcccttgtgcatttcaacaggtgccactgtcccctactttgcagagggctccggggggccagtgcccactaccagcaccttgattcttcctccagagtacagttcttggggctacccctatggtgagtcgacagccagggcttggcagggaggggacgccaagagccccacgcagaccctgctttcttcccgcagaggccccaccgtcttatgagcagagctgcggcggcgtggaacccagcctgacccctgagagctgaccccgtgctgccttctccaggcaggcctggcctctgccctgggactggggcgcccagggcctcgtgccttctctcttggcctagcctggcccactcaggacctgcccagcctctgccagctcctctggcatccgccctcttctccctggggctggggtgggggtggcagggagctgggacctggagagacaactcctgtaaataaaacactttatttgtagagctgggcctcaccggcctcgccttgggcaccctccagcctctggcagggcctgaccctgaccccatcctgggctctgctcatgccagggcagaccctgctcctcaggtgccccctactaccctgggggcgcgctcaggctaccatgcctgggcggagccgcggggtggcctgcctggagggtgcttccagaaacaacggagatggtggtgaagaaggctctgggttcaaattccagttctcctttagggcgaaggggtgactgtggctaggtttgtcagttaccttatctataaaatgcacaggaccaggccgggcacggtggctccctcctgtaatcccagtactttgggaggctgaggcaggtggattgcttgaggtcaggagttccagatcagcctgggcaacatagtgaaactccatctgtacaaaaaaaaa

SEQ ID NO: 278314 - DNA, 2302 bp, Homo sapiens
cggggccgggcctcggagccgggactcgcgggcggcgggcgggggcgtcgctgcgcggctggccggtgaggccgcggcatggggcgagtgcagctcttcgagatcagcctgagccacggccgcgtcgtctacagccccggggagccgttggctgggaccgtgcgcgtgcgcctgggggcaccgctgccgttccgagccatccgggtgacctgcataggttcctgcggggtctccaacaaggctaatgacacagcgtgggtagtggaggagggttacttcaacagttccctgtcgctggcagacaaggggagcctgcccgctggagagcacagcttccccttccagttcctgcttcctgccactgcacccacgtcctttgagggtcctttcgggaagatcgtgcaccaggtgagggccgccatccacacgccacggttttccaaggatcacaagtgcagcctcgtgttctatatcttgagccccttgaacctgaacagcatcccagacattgagcaacccaacgtggcctctgccaccaagaagttctcctacaagctggtgaagacgggcagcgtggtcctcacagccagcactgatctccgcggctatgtggtggggcaggcactgcagctgcatgccgacgttgagaaccagtcaggcaaggacaccagccctgtggtggccagtctgctgcagaaagtgtcctataaggccaagcgctggatccacgacgtacggaccattgcggaggtggagggtgcgggcgtcaaggcctggcggcgggcgcagtggcacgagcagatcctggtgcctgccttgccccagtcggccctgccgggctgcagcctcatccacatcgactactacttacaggtctctctgaaggcgccggaagctactgtgaccctcccggtcttcattggcaatattgctgtgaaccatgccccagtgagcccccggccaggcctggggctgcctcctggggccccacccctggtggtgccttccgcaccaccccaggaggaggctgaggctgaggctgcggctggcggcccccacttcttggaccccgtcttcctctccaccaagagccattcgcagcggcagcccctgctggccaccttgagttctgtgcctggtgcgccggagccctgccctcaggatggcagccctgcctcacacccgctgcaccctcccttgtgcatttcaacaggtgccactgtcccctactttgcagagggctccggggggccagtgcccactaccagcaccttgattcttcctccagagtacagttcttggggctacccctatggtgagtcgacagccagggcttggcagggaggggacgccaagagccccacgcagaccctgctttcttcccgcagaggccccaccgtcttatgagcagagctgcggcggcgtggaacccagcctgacccctgagagctgaccccgtgctgccttctccaggcaggcctggcctctgccctgggactggggcgcccagggcctcgtgccttctctcttggcctagcctggcccactcaggacctgcccagcctctgccagctcctctggcatccgccctcttctccctggggctggggtgggggtggcagggagctgggacctggagagacaactcctgtaaataaaacactttatttgtagaaaaaaaaaaaaagaaaaaaaaaaaataaaaaaaaaaaaaaaaaaaaaaaaaaaaaagaggggggggggcgcccccaaaaaaaccccccggggggcgccccattccgcgcccccccccttttttgtgtaacacagggggcgccccccaaatgagggaggccactgtattataaatagagcgacagcacgagcggggccgcgcgggtttaaacaacaacgcgtcgcggcatgcgctgggaaaacaacgtgcgactcaccgtgaagaaacctcgtgtgaggagaaagacagcaccaccctaaatcatcgcggggggcgaggcagaccacacatatagagtgtggcgacgacacagacaacttaccacctctacaacagcgagagcattatatacagcgcgcgctctctcaagggggggagacaatatcatatcaaaaaaagcttgttacgaaagggggtagctatactacgcggggtcggtagacacacctaatacgcgcggtcgataaatataggggcacgcagcgtcggtagggaaacaaagtttgtggcgcacaccacagcgggagcagtagatagaactttattggaacaagaacatatcttttatactaaccaccgagaggcgcg

SEQ ID NO: 278315 - DNA, 3876 bp, Homo sapiens
cctgctgctctgggtggcaggcagaaggcctgggccacaggtggggcctgctggggagaccacaggtgaggcaggtatggctgaccctgggcgctcggcacaccggtactcctcctgcctggctgctccctcagcaggtgtcagagtctgagtcaccttttcctcacgtgacccccaccaggaccaggcagggaggtggccatctttggccctgactcagccctgcagggagaagaggggctggaggtgcaggtggcctgccactgtctcccccaacccctgcccacctgggtcttgtgctgtgtgtacttctgctgcgtctgtcctcccttgtgaccagcttctgctggacctgattgtccagccatgatcttctgatcatcatggtttctggacacacatctgttggactaaggaatttgtgttcctggccacagaacagtgccacctctgcctcaagcagttcctggtctgggcactcccccagggaggccggagaggactgagccgtctcctgatgcagaaagtcagccccgctgggcagtgctcgcccaggaagtagggccccacccaacggtgtgctgactgtggaacactgtgtctgcctaggcgggtctggccacattcctgcagcatgatggttggcagttagcttcctggagtgtggacgggtccttccctgcctgactgacttgtccacagggcagcaagaagatgcgccccttggtgtgtcccgagtgtctcctgtaggcagctgagctttcgcaggtctggctgggagccaaggttaccaatctggggggtaacccagccatcatctggatgagcgttggggtctttctgctctggattgcagggcagacgtcgttttgtgctggtcaggcccctcgcctgcctgattcccttggagccccccaagacaggagatgggcagatgtcctctgaagtggcatgggctgcttgctcactggccttcccaggaccctgcccaggtggtgctgcttggccccaggtcgaattcctgtgctggcagcaagcaggggcctgggccgtcggctggctggggctcatgcagccatcccctttgcagccatccgggtgacctgcataggttcctgcggggtctccaacaaggctaatgacacagcgtgggtagtggaggagggttacttcaacagttccctgtcgctggcagacaagggtaagtttgggagccagttcccgagtggtgacccctgggggcagcccttggagtggggcctgtctgtcctgtcctccccctttcctagatctgcctcttggatctggcactggcccatcttgtcccagggttgtgggccctgatggctttctcataggcgctgggtggctgaaggggccacctcccccttgtgctggatttgggtgggctctgacccctggcacagctgtttcacccttgccccattcccaaaccactctcctgttcaagccaagctcttatcctcagtccttcacccaagccacagccctgtgctgctgtggcgctggtgactgagacagggagacccagtgtgagctggtcagctgcagtgcccactcttatcctggccctgtggccacctcaggccacctcagggggggactgccccccacctccctcctgtctctgcagggagcctgcccgctggagagcacagcttccccttccagttcctgcttcctgccactgcacccacgtcctttgagggtcctttcgggaagatcgtgcaccaggtgagggccgccatccacacgccacggttttccaaggatcacaagtgcagcctcgtgttctatatcttgagccccttgaacctgaacagcatcccagacattgagcaacccaacgtggcctctgccaccaagaagttctcctacaagctggtgaagacgggcagcgtggtcctcacagccagcactgatctccgcggctatgtggtggggcaggcactgcagctgcatgccgacgttgagaaccagtcaggcaaggacaccagccctgtggtggccagtctgctgcagaaagtgtcctataaggccaagcgctggatccacgacgtacggaccattgcggaggtggagggtgcgggcgtcaaggcctggcggcgggcgcagtggcacgagcagatcctggtgcctgccttgccccagtcggccctgccgggctgcagcctcatccacatcgactactacttacaggtctctctgaaggcgccggaagctactgtgaccctcccggtcttcattggcaatattgctgtgaaccatgccccagtgagcccccggccaggcctggggctgcctcctggggccccacccctggtggtgccttccgcaccaccccaggaggaggctgaggctgaggctgcggctggcggcccccacttcttggaccccgtcttcctctccaccaagagccattcgcagcggcagcccctgctggccaccttgagttctgtgcctggtgcgccggagccctgccctcaggatggcagccctgcctcacacccgctgcaccctcccttgtgcatttcaacaggtgccactgtcccctactttgcagagggctccggggggccagtgcccactaccagcaccttgattcttcctccagagtacagttcttggggctacccctatggtgagtcgacagccagggcttggcagggaggggacgccaagagccccacgcagaccctgctttcttcccgcagaggccccaccgtcttatgagcagagctgcggcggcgtggaacccagcctgacccctgagagctgaccccgtgctgccttctccaggcaggcctggcctctgccctgggactggggcgcccagggcctcgtgccttctctcttggcctagcctggcccactcaggacctgcccagcctctgccagctcctctggcatccgccctcttctccctggggctggggtgggggtggcagggagctgggacctggagagacaactcctgtaaataaaacactttatttgtagagctgggcctcaccggcctcgccttgggcaccctccagcctctggcagggcctgaccctgaccccatcctgggctctgctcatgccagggcagaccctgctcctcaggtgccccctactaccctgggggcgcgctcaggctaccatgcctgggcggagccgcggggctggctccctttaacagaggacgggggctggcgctgggccttccagagccgcctaaggacacgtccttggagcccggctcatgaaatggggcctcacgcaaccttggtgtttggttaaatttgtgccttggctcctgttgcgtttaggcacccaggttcccaagcggtgtggtgtggacctcccctgctgagaaacccgctggcgcgtggaggggcttgcccaggtccctccgacaggagaccctgctccctgggccttggcccctgctagcaccactgccaggcctggctctgagggacgctgcttctcccctgcccacgtctccaaggcctgaaaggcagggttctgtggaacagcatttctcaaaggggcatcctgcagacgttccagccccaggggaggccccgtgatgctggctggcctgcctggagggtgcttccagaaacaacggagatggtggtgaagaaggctctgggttcaaattccagttctcctttagggcgaaggggtgactgtggctaggtttgtcagttaccttatctataaaatgcacaggaccaggccgggcacggtggctccctcctgtaatcccagtactttgggaggctgaggcaggtggattgcttgaggtcaggagttccagatcagcctgggcaacatagtgaaactccatctgtacaaaaaaaaa

SEQ ID NO: 278316 - DNA, 2951 bp, Homo sapiens
gcaggctgtactggctcccaagttccttatgagtgtgaggccgcggcatggggcgagtgcagctcttcgagatcagcctgagccacggccgcgtcgtctacagccccggggagccgttggctgggaccgtgcgcgtgcgcctgggggcaccgctgccgttccgagccatccgggtgacctgcataggttcctgcggggtctccaacaaggctaatgacacagcgtgggtagtggaggagggttacttcaacagttccctgtcgctggcagacaagggtaagtttgggagccagttcccgagtggtgacccctgggggcagcccttggagtggggcctgtctgtcctgtcctccccctttcctagatctgcctcttggatctggcactggcccatcttgtcccagggttgtgggccctgatggctttctcataggcgctgggtggctgaaggggccacctcccccttgtgctggatttgggtgggctctgacccctggcacagctgtttcacccttgccccattcccaaaccactctcctgttcaagccaagctcttatcctcagtccttcacccaagccacagccctgtgctgctgtggcgctggtgactgagacagggagacccagtgtgagctggtcagctgcagtgcccactcttatcctggccctgtggccacctcaggccacctcagggggggactgccccccacctccctcctgtctctgcagggagcctgcccgctggagagcacagcttccccttccagttcctgcttcctgccactgcacccacgtcctttgagggtcctttcgggaagatcgtgcaccaggtgagggccgccatccacacgccacggttttccaaggatcacaagtgcagcctcgtgttctatatcttgagccccttgaacctgaacagcatcccagacattgagcaacccaacgtggcctctgccaccaagaagttctcctacaagctggtgaagacgggcagcgtggtcctcacagccagcactgatctccgcggctatgtggtggggcaggcactgcagctgcatgccgacgttgagaaccagtcaggcaaggacaccagccctgtggtggccagtctgctgcagaaagtgtcctataaggccaagcgctggatccacgacgtacggaccattgcggaggtggagggtgcgggcgtcaaggcctggcggcgggcgcagtggcacgagcagatcctggtgcctgccttgccccagtcggccctgccgggctgcagcctcatccacatcgactactacttacaggtctctctgaaggcgccggaagctactgtgaccctcccggtcttcattggcaatattgctgtgaaccatgccccagtgagcccccggccaggcctggggctgcctcctggggccccacccctggtggtgccttccgcaccaccccaggaggaggctgaggctgaggctgcggctggcggcccccacttcttggaccccgtcttcctctccaccaagagccattcgcagcggcagcccctgctggccaccttgagttctgtgcctggtgcgccggagccctgccctcaggatggcagccctgcctcacacccgctgcaccctcccttgtgcatttcaacaggtgccactgtcccctactttgcagagggctccggggggccagtgcccactaccagcaccttgattcttcctccagagtacagttcttggggctacccctatggtgagtcgacagccagggcttggcagggaggggacgccaagagccccacgcagaccctgctttcttcccgcagaggccccaccgtcttatgagcagagctgcggcggcgtggaacccagcctgacccctgagagctgaccccgtgctgccttctccaggcaggcctggcctctgccctgggactggggcgcccagggcctcgtgccttctctcttggcctagcctggcccactcaggacctgcccagcctctgccagctcctctggcatccgccctcttctccctggggctggggtgggggtggcagggagctgggacctggagagacaactcctgtaaataaaacactttatttgtagagctgggcctcaccggcctcgccttgggcaccctccagcctctggcagggcctgaccctgaccccatcctgggctctgctcatgccagggcagaccctgctcctcaggtgccccctactaccctgggggcgcgctcaggctaccatgcctgggcggagccgcggggctggctccctttaacagaggacgggggctggcgctgggccttccagagccgcctaaggacacgtccttggagcccggctcatgaaatggggcctcacgcaaccttggtgtttggttaaatttgtgccttggctcctgttgcgtttaggcacccaggttcccaagcggtgtggtgtggacctcccctgctgagaaacccgctggcgcgtggaggggcttgcccaggtccctccgacaggagaccctgctccctgggccttggcccctgctagcaccactgccaggcctggctctgagggacgctgcttctcccctgcccacgtctccaaggcctgaaaggcagggttctgtggaacagcatttctcaaaggggcatcctgcagacgttccagccccaggggaggccccgtgatgctggctggcctgcctggagggtgcttccagaaacaacggagatggtggtgaagaaggctctgggttcaaattccagttctcctttagggcgaaggggtgactgtggctaggtttgtcagttaccttatctataaaatgcacaggaccaggccgggcacggtggctccctcctgtaatcccagtactttgggaggctgaggcaggtggattgcttgaggtcaggagttccagatcagcctgggcaacatagtgaaactccatctgtacaaaaaaaaa

SEQ ID NO: 278317 - DNA, 4138 bp, Homo sapiens
cctgctgctctgggtggcaggcagaaggcctgggccacaggtggggcctgctggggagaccacaggtgaggcaggtatggctgaccctgggcgctcggcacaccggtactcctcctgcctggctgctccctcagcaggtgtcagagtctgagtcaccttttcctcacgtgacccccaccaggaccaggcagggaggtggccatctttggccctgactcagccctgcagggagaagaggggctggaggtgcaggtggcctgccactgtctcccccaacccctgcccacctgggtcttgtgctgtgtgtacttctgctgcgtctgtcctcccttgtgaccagcttctgctggacctgattgtccagccatgatcttctgatcatcatggtttctggacacacatctgttggactaaggaatttgtgttcctggccacagaacagtgccacctctgcctcaagcagttcctggtctgggcactcccccagggaggccggagaggactgagccgtctcctgatgcagaaagtcagccccgctgggcagtgctcgcccaggaagtagggccccacccaacggtgtgctgactgtggaacactgtgtctgcctaggcgggtctggccacattcctgcagcatgatggttggcagttagcttcctggagtgtggacgggtccttccctgcctgactgacttgtccacagggcagcaagaagatgcgccccttggtgtgtcccgagtgtctcctgtaggcagctgagctttcgcaggtctggctgggagccaaggttaccaatctggggggtaacccagccatcatctggatgagcgttggggtctttctgctctggattgcagggcagacgtcgttttgtgctggtcaggcccctcgcctgcctgattcccttggagccccccaagacaggagatgggcagatgtcctctgaagtggcatgggctgcttgctcactggccttcccaggaccctgcccaggtggtgctgcttggccccaggtcgaattcctgtgctggcagcaagcaggggcctgggccgtcggctggctggggctcatgcagccatcccctttgcagccatccgggtgacctgcataggttcctgcggggtctccaacaaggctaatgacacagcgtgggtagtggaggagggttacttcaacagttccctgtcgctggcagacaagggtaagtttgggagccagttcccgagtggtgacccctgggggcagcccttggagtggggcctgtctgtcctgtcctccccctttcctagatctgcctcttggatctggcactggcccatcttgtcccagggttgtgggccctgatggctttctcataggcgctgggtggctgaaggggccacctcccccttgtgctggatttgggtgggctctgacccctggcacagctgtttcacccttgccccattcccaaaccactctcctgttcaagccaagctcttatcctcagtccttcacccaagccacagccctgtgctgctgtggcgctggtgactgagacagggagacccagtgtgagctggtcagctgcagtgcccactcttatcctggccctgtggccacctcaggccacctcagggggggactgccccccacctccctcctgtctctgcagggagcctgcccgctggagagcacagcttccccttccagttcctgcttcctgccactgcacccacgtcctttgagggtcctttcgggaagatcgtgcaccaggtgagggccgccatccacacgccacggttttccaaggatcacaagtgcagcctcgtgttctatatcttgagccccttgaacctgaacagcatcccagacattgaggtgaggatggcacagtgacctccttggtgggtccccaccctcatggaggctggggaagagctgggcaggcactgcttcatcccagcgtcctgtccccagctgaggtgaggggggccagggtctggaggcagtggcctctttgccctgagctgactgctgatgtccaggggcagggcgtggcagggctgaggggcctgtcccaatgccacagggatccagcctgcgcacacctgctaagcccctccctggccctccccccaagcaacccaacgtggcctctgccaccaagaagttctcctacaagctggtgaagacgggcagcgtggtcctcacagccagcactgatctccgcggctatgtggtggggcaggcactgcagctgcatgccgacgttgagaaccagtcaggcaaggacaccagccctgtggtggccagtctgctgcagaaagtgtcctataaggccaagcgctggatccacgacgtacggaccattgcggaggtggagggtgcgggcgtcaaggcctggcggcgggcgcagtggcacgagcagatcctggtgcctgccttgccccagtcggccctgccgggctgcagcctcatccacatcgactactacttacaggtctctctgaaggcgccggaagctactgtgaccctcccggtcttcattggcaatattgctgtgaaccatgccccagtgagcccccggccaggcctggggctgcctcctggggccccacccctggtggtgccttccgcaccaccccaggaggaggctgaggctgaggctgcggctggcggcccccacttcttggaccccgtcttcctctccaccaagagccattcgcagcggcagcccctgctggccaccttgagttctgtgcctggtgcgccggagccctgccctcaggatggcagccctgcctcacacccgctgcaccctcccttgtgcatttcaacaggtgccactgtcccctactttgcagagggctccggggggccagtgcccactaccagcaccttgattcttcctccagagtacagttcttggggctacccctatggtgagtcgacagccagggcttggcagggaggggacgccaagagccccacgcagaccctgctttcttcccgcagaggccccaccgtcttatgagcagagctgcggcggcgtggaacccagcctgacccctgagagctgaccccgtgctgccttctccaggcaggcctggcctctgccctgggactggggcgcccagggcctcgtgccttctctcttggcctagcctggcccactcaggacctgcccagcctctgccagctcctctggcatccgccctcttctccctggggctggggtgggggtggcagggagctgggacctggagagacaactcctgtaaataaaacactttatttgtagagctgggcctcaccggcctcgccttgggcaccctccagcctctggcagggcctgaccctgaccccatcctgggctctgctcatgccagggcagaccctgctcctcaggtgccccctactaccctgggggcgcgctcaggctaccatgcctgggcggagccgcggggctggctccctttaacagaggacgggggctggcgctgggccttccagagccgcctaaggacacgtccttggagcccggctcatgaaatggggcctcacgcaaccttggtgtttggttaaatttgtgccttggctcctgttgcgtttaggcacccaggttcccaagcggtgtggtgtggacctcccctgctgagaaacccgctggcgcgtggaggggcttgcccaggtccctccgacaggagaccctgctccctgggccttggcccctgctagcaccactgccaggcctggctctgagggacgctgcttctcccctgcccacgtctccaaggcctgaaaggcagggttctgtggaacagcatttctcaaaggggcatcctgcagacgttccagccccaggggaggccccgtgatgctggctggcctgcctggagggtgcttccagaaacaacggagatggtggtgaagaaggctctgggttcaaattccagttctcctttagggcgaaggggtgactgtggctaggtttgtcagttaccttatctataaaatgcacaggaccaggccgggcacggtggctccctcctgtaatcccagtactttgggaggctgaggcaggtggattgcttgaggtcaggagttccagatcagcctgggcaacatagtgaaactccatctgtacaaaaaaaaa

SEQ ID NO: 278318 - DNA, 2951 bp, Homo sapiens
cctgctgctctgggtggcaggcagaaggcctgggccacaggtggggcctgctggggagaccacaggtgaggcaggtatggctgaccctgggcgctcggcacaccggtactcctcctgcctggctgctccctcagcaggtgtcagagtctgagtcaccttttcctcacgtgacccccaccaggaccaggcagggaggtggccatctttggccctgactcagccctgcagggagaagaggggctggaggtgcaggtggcctgccactgtctcccccaacccctgcccacctgggtcttgtgctgtgtgtacttctgctgcgtctgtcctcccttgtgaccagcttctgctggacctgattgtccagccatgatcttctgatcatcatggtttctggacacacatctgttggactaaggaatttgtgttcctggccacagaacagtgccacctctgcctcaagcagttcctggtctgggcactcccccagggaggccggagaggactgagccgtctcctgatgcagaaagtcagccccgctgggcagtgctcgcccaggaagtagggccccacccaacggtgtgctgactgtggaacactgtgtctgcctaggcgggtctggccacattcctgcagcatgatggttggcagttagcttcctggagtgtggacgggtccttccctgcctgactgacttgtccacagggcagcaagaagatgcgccccttgccatccgggtgacctgcataggttcctgcggggtctccaacaaggctaatgacacagcgtgggtagtggaggagggttacttcaacagttccctgtcgctggcagacaaggggagcctgcccgctggagagcacagcttccccttccagttcctgcttcctgccactgcacccacgtcctttgagggtcctttcgggaagatcgtgcaccaggtgagggccgccatccacacgccacggttttccaaggatcacaagtgcagcctcgtgttctatatcttgagccccttgaacctgaacagcatcccagacattgaggcactgcagctgcatgccgacgttgagaaccagtcaggcaaggacaccagccctgtggtggccagtctgctgcagaaagtgtcctataaggccaagcgctggatccacgacgtacggaccattgcggaggtggagggtgcgggcgtcaaggcctggcggcgggcgcagtggcacgagcagatcctggtgcctgccttgccccagtcggccctgccgggctgcagcctcatccacatcgactactacttacaggtctctctgaaggcgccggaagctactgtgaccctcccggtcttcattggcaatattgctgtgaaccatgccccagtgagcccccggccaggcctggggctgcctcctggggccccacccctggtggtgccttccgcaccaccccaggaggaggctgaggctgaggctgcggctggcggcccccacttcttggaccccgtcttcctctccaccaagagccattcgcagcggcagcccctgctggccaccttgagttctgtgcctggtgcgccggagccctgccctcaggatggcagccctgcctcacacccgctgcaccctcccttgtgcatttcaacaggtgccactgtcccctactttgcagagggctccggggggccagtgcccactaccagcaccttgattcttcctccagagtacagttcttggggctacccctatggtgagtcgacagccagggcttggcagggaggggacgccaagagccccacgcagaccctgctttcttcccgcagaggccccaccgtcttatgagcagagctgcggcggcgtggaacccagcctgacccctgagagctgaccccgtgctgccttctccaggcaggcctggcctctgccctgggactggggcgcccagggcctcgtgccttctctcttggcctagcctggcccactcaggacctgcccagcctctgccagctcctctggcatccgccctcttctccctggggctggggtgggggtggcagggagctgggacctggagagacaactcctgtaaataaaacactttatttgtagagctgggcctcaccggcctcgccttgggcaccctccagcctctggcagggcctgaccctgaccccatcctgggctctgctcatgccagggcagaccctgctcctcaggtgccccctactaccctgggggcgcgctcaggctaccatgcctgggcggagccgcggggctggctccctttaacagaggacgggggctggcgctgggccttccagagccgcctaaggacacgtccttggagcccggctcatgaaatggggcctcacgcaaccttggtgtttggttaaatttgtgccttggctcctgttgcgtttaggcacccaggttcccaagcggtgtggtgtggacctcccctgctgagaaacccgctggcgcgtggaggggcttgcccaggtccctccgacaggagaccctgctccctgggccttggcccctgctagcaccactgccaggcctggctctgagggacgctgcttctcccctgcccacgtctccaaggcctgaaaggcagggttctgtggaacagcatttctcaaaggggcatcctgcagacgttccagccccaggggaggccccgtgatgctggctggcctgcctggagggtgcttccagaaacaacggagatggtggtgaagaaggctctgggttcaaattccagttctcctttagggcgaaggggtgactgtggctaggtttgtcagttaccttatctataaaatgcacaggaccaggccgggcacggtggctccctcctgtaatcccagtactttgggaggctgaggcaggtggattgcttgaggtcaggagttccagatcagcctgggcaacatagtgaaactccatctgtacaaaaaaaaa

SEQ ID NO: 278319 - DNA, 2760 bp, Homo sapiens
gcaggctgtactggctcccaagttccttatgagtgtgaggccgcggcatggggcgagtgcagctcttcgagatcagcctgagccacggccgcgtcgtctacagccccggggagccgttggctgggaccgtgcgcgtgcgcctgggggcaccgctgccgttccgagccatccgggtgacctgcataggttcctgcggggtctccaacaaggctaatgacacagcgtgggtagtggaggagggttacttcaacagttccctgtcgctggcagacaaggggagcctgcccgctggagagcacagcttccccttccagttcctgcttcctgccactgcacccacgtcctttgagggtcctttcgggaagatcgtgcaccaggtgagggccgccatccacacgccacggttttccaaggatcacaagtgcagcctcgtgttctatatcttgagccccttgaacctgaacagcatcccagacattgaggtgaggatggcacagtgacctccttggtgggtccccaccctcatggaggctggggaagagctgggcaggcactgcttcatcccagcgtcctgtccccagctgaggtgaggggggccagggtctggaggcagtggcctctttgccctgagctgactgctgatgtccaggggcagggcgtggcagggctgaggggcctgtcccaatgccacagggatccagcctgcgcacacctgctaagcccctccctggccctccccccaagcaacccaacgtggcctctgccaccaagaagttctcctacaagctggtgaagacgggcagcgtggtcctcacagccagcactgatctccgcggctatgtggtggggcaggcactgcagctgcatgccgacgttgagaaccagtcaggcaaggacaccagccctgtggtggccagtctgctgcagaaagtgtcctataaggccaagcgctggatccacgacgtacggaccattgcggaggtggagggtgcgggcgtcaaggcctggcggcgggcgcagtggcacgagcagatcctggtgcctgccttgccccagtcggccctgccgggctgcagcctcatccacatcgactactacttacaggtctctctgaaggcgccggaagctactgtgaccctcccggtcttcattggcaatattgctgtgaaccatgccccagtgagcccccggccaggcctggggctgcctcctggggccccacccctggtggtgccttccgcaccaccccaggaggaggctgaggctgaggctgcggctggcggcccccacttcttggaccccgtcttcctctccaccaagagccattcgcagcggcagcccctgctggccaccttgagttctgtgcctggtgcgccggagccctgccctcaggatggcagccctgcctcacacccgctgcaccctcccttgtgcatttcaacaggtgccactgtcccctactttgcagagggctccggggggccagtgcccactaccagcaccttgattcttcctccagagtacagttcttggggctacccctatggtgagtcgacagccagggcttggcagggaggggacgccaagagccccacgcagaccctgctttcttcccgcagaggccccaccgtcttatgagcagagctgcggcggcgtggaacccagcctgacccctgagagctgaccccgtgctgccttctccaggcaggcctggcctctgccctgggactggggcgcccagggcctcgtgccttctctcttggcctagcctggcccactcaggacctgcccagcctctgccagctcctctggcatccgccctcttctccctggggctggggtgggggtggcagggagctgggacctggagagacaactcctgtaaataaaacactttatttgtagagctgggcctcaccggcctcgccttgggcaccctccagcctctggcagggcctgaccctgaccccatcctgggctctgctcatgccagggcagaccctgctcctcaggtgccccctactaccctgggggcgcgctcaggctaccatgcctgggcggagccgcggggctggctccctttaacagaggacgggggctggcgctgggccttccagagccgcctaaggacacgtccttggagcccggctcatgaaatggggcctcacgcaaccttggtgtttggttaaatttgtgccttggctcctgttgcgtttaggcacccaggttcccaagcggtgtggtgtggacctcccctgctgagaaacccgctggcgcgtggaggggcttgcccaggtccctccgacaggagaccctgctccctgggccttggcccctgctagcaccactgccaggcctggctctgagggacgctgcttctcccctgcccacgtctccaaggcctgaaaggcagggttctgtggaacagcatttctcaaaggggcatcctgcagacgttccagccccaggggaggccccgtgatgctggctggcctgcctggagggtgcttccagaaacaacggagatggtggtgaagaaggctctgggttcaaattccagttctcctttagggcgaaggggtgactgtggctaggtttgtcagttaccttatctataaaatgcacaggaccaggccgggcacggtggctccctcctgtaatcccagtactttgggaggctgaggcaggtggattgcttgaggtcaggagttccagatcagcctgggcaacatagtgaaactccatctgtacaaaaaaaaa

SEQ ID NO: 278320 - DNA, 2549 bp, Homo sapiens
gcaggctgtactggctcccaagttccttatgagtgtgaggccgcggcatggggcgagtgcagctcttcgagatcagcctgagccacggccgcgtcgtctacagccccggggagccgttggctgggaccgtgcgcgtgcgcctgggggcaccgctgccgttccgagccatccgggtgacctgcataggttcctgcggggtctccaacaaggctaatgacacagcgtgggtagtggaggagggttacttcaacagttccctgtcgctggcagacaaggggagcctgcccgctggagagcacagcttccccttccagttcctgcttcctgccactgcacccacgtcctttgagggtcctttcgggaagatcgtgcaccaggtgagggccgccatccacacgccacggttttccaaggatcacaagtgcagcctcgtgttctatatcttgagccccttgaacctgaacagcatcccagacattgagggatccagcctgcgcacacctgctaagcccctccctggccctccccccaagcaacccaacgtggcctctgccaccaagaagttctcctacaagctggtgaagacgggcagcgtggtcctcacagccagcactgatctccgcggctatgtggtggggcaggcactgcagctgcatgccgacgttgagaaccagtcaggcaaggacaccagccctgtggtggccagtctgctgcagaaagtgtcctataaggccaagcgctggatccacgacgtacggaccattgcggaggtggagggtgcgggcgtcaaggcctggcggcgggcgcagtggcacgagcagatcctggtgcctgccttgccccagtcggccctgccgggctgcagcctcatccacatcgactactacttacaggtctctctgaaggcgccggaagctactgtgaccctcccggtcttcattggcaatattgctgtgaaccatgccccagtgagcccccggccaggcctggggctgcctcctggggccccacccctggtggtgccttccgcaccaccccaggaggaggctgaggctgaggctgcggctggcggcccccacttcttggaccccgtcttcctctccaccaagagccattcgcagcggcagcccctgctggccaccttgagttctgtgcctggtgcgccggagccctgccctcaggatggcagccctgcctcacacccgctgcaccctcccttgtgcatttcaacaggtgccactgtcccctactttgcagagggctccggggggccagtgcccactaccagcaccttgattcttcctccagagtacagttcttggggctacccctatggtgagtcgacagccagggcttggcagggaggggacgccaagagccccacgcagaccctgctttcttcccgcagaggccccaccgtcttatgagcagagctgcggcggcgtggaacccagcctgacccctgagagctgaccccgtgctgccttctccaggcaggcctggcctctgccctgggactggggcgcccagggcctcgtgccttctctcttggcctagcctggcccactcaggacctgcccagcctctgccagctcctctggcatccgccctcttctccctggggctggggtgggggtggcagggagctgggacctggagagacaactcctgtaaataaaacactttatttgtagagctgggcctcaccggcctcgccttgggcaccctccagcctctggcagggcctgaccctgaccccatcctgggctctgctcatgccagggcagaccctgctcctcaggtgccccctactaccctgggggcgcgctcaggctaccatgcctgggcggagccgcggggctggctccctttaacagaggacgggggctggcgctgggccttccagagccgcctaaggacacgtccttggagcccggctcatgaaatggggcctcacgcaaccttggtgtttggttaaatttgtgccttggctcctgttgcgtttaggcacccaggttcccaagcggtgtggtgtggacctcccctgctgagaaacccgctggcgcgtggaggggcttgcccaggtccctccgacaggagaccctgctccctgggccttggcccctgctagcaccactgccaggcctggctctgagggacgctgcttctcccctgcccacgtctccaaggcctgaaaggcagggttctgtggaacagcatttctcaaaggggcatcctgcagacgttccagccccaggggaggccccgtgatgctggctggcctgcctggagggtgcttccagaaacaacggagatggtggtgaagaaggctctgggttcaaattccagttctcctttagggcgaaggggtgactgtggctaggtttgtcagttaccttatctataaaatgcacaggaccaggccgggcacggtggctccctcctgtaatcccagtactttgggaggctgaggcaggtggattgcttgaggtcaggagttccagatcagcctgggcaacatagtgaaactccatctgtacaaaaaaaaa

SEQ ID NO: 278321 - DNA, 2736 bp, Homo sapiens
cctgctgctctgggtggcaggcagaaggcctgggccacaggtggggcctgctggggagaccacaggtgaggcaggtatggctgaccctgggcgctcggcacaccggtactcctcctgcctggctgctccctcagcaggtgtcagagtctgagtcaccttttcctcacgtgacccccaccaggaccaggcagggaggtggccatctttggccctgactcagccctgcagggagaagaggggctggaggtgcaggtggcctgccactgtctcccccaacccctgcccacctgggtcttgtgctgtgtgtacttctgctgcgtctgtcctcccttgtgaccagcttctgctggacctgattgtccagccatgatcttctgatcatcatggtttctggacacacatctgttggactaaggaatttgtgttcctggccacagaacagtgccacctctgcctcaagcagttcctggtctgggcactcccccagggaggccggagaggactgagccgtctcctgatgcagaaagtcagccccgctgggcagtgctcgcccaggaagtagggccccacccaacggtgtgctgactgtggaacactgtgtctgcctaggcgggtctggccacattcctgcagcatgatggttggcagttagcttcctggagtgtggacgggtccttccctgcctgactgacttgtccacagggcagcaagaagatgcgccccttggtgtgtcccgagtgtctcctgtaggcagctgagctttcgcaggtctggctgggagccaaggttaccaatctggggggtaacccagccatcatctggatgagcgttggggtctttctgctctggattgcagggcagacgtcgttttgtgctggtcaggcccctcgcctgcctgattcccttggagccccccaagacaggagatgggcagatgtcctctgaagtggcatgggctgcttgctcactggccttcccaggaccctgcccaggtggtgctgcttggccccaggtcgaattcctgtgctggcagcaagcaggggcctgggccgtcggctggctggggctcatgcagccatcccctttgcagccatccgggtgacctgcataggttcctgcggggtctccaacaaggctaatgacacagcgtgggtagtggaggagggttacttcaacagttccctgtcgctggcagacaagggtaagtttgggagccagttcccgagtggtgacccctgggggcagcccttggagtggggcctgtctgtcctgtcctccccctttcctagatctgcctcttggatctggcactggcccatcttgtcccagggttgtgggccctgatggctttctcataggcgctgggtggctgaaggggccacctcccccttgtgctggatttgggtgggctctgacccctggcacagctgtttcacccttgccccattcccaaaccactctcctgttcaagccaagctcttatcctcagtccttcacccaagccacagccctgtgctgctgtggcgctggtgactgagacagggagacccagtgtgagctggtcagctgcagtgcccactcttatcctggccctgtggccacctcaggccacctcagggggggactgccccccacctccctcctgtctctgcagggagcctgcccgctggagagcacagcttccccttccagttcctgcttcctgtggggcgcccagggcctcgtgccttctctcttggcctagcctggcccactcaggacctgcccagcctctgccagctcctctggcatccgccctcttctccctggggctggggtgggggtggcagggagctgggacctggagagacaactcctgtaaataaaacactttatttgtagagctgggcctcaccggcctcgccttgggcaccctccagcctctggcagggcctgaccctgaccccatcctgggctctgctcatgccagggcagaccctgctcctcaggtgccccctactaccctgggggcgcgctcaggctaccatgcctgggcggagccgcggggctggctccctttaacagaggacgggggctggcgctgggccttccagagccgcctaaggacacgtccttggagcccggctcatgaaatggggcctcacgcaaccttggtgtttggttaaatttgtgccttggctcctgttgcgtttaggcacccaggttcccaagcggtgtggtgtggacctcccctgctgagaaacccgctggcgcgtggaggggcttgcccaggtccctccgacaggagaccctgctccctgggccttggcccctgctagcaccactgccaggcctggctctgagggacgctgcttctcccctgcccacgtctccaaggcctgaaaggcagggttctgtggaacagcatttctcaaaggggcatcctgcagacgttccagccccaggggaggccccgtgatgctggctggcctgcctggagggtgcttccagaaacaacggagatggtggtgaagaaggctctgggttcaaattccagttctcctttagggcgaaggggtgactgtggctaggtttgtcagttaccttatctataaaatgcacaggaccaggccgggcacggtggctccctcctgtaatcccagtactttgggaggctgaggcaggtggattgcttgaggtcaggagttccagatcagcctgggcaacatagtgaaactccatctgtacaaaaaaaaa

SEQ ID NO: 278322 - DNA, 2223 bp, Homo sapiens
cggggccgggcctcggagccgggactcgcgggcggcgggcgggggcgtcgctgcgcggctggccggtgaggccgcggcatggggcgagtgcagctcttcgagatcagcctgagccacggccgcgtcgtctacagccccggggagccgttggctgggaccgtgcgcgtgcgcctgggggcaccgctgccgttccgagccatccgggtgacctgcataggttcctgcggggtctccaacaaggctaatgacacagcgtgggtagtggaggagggttacttcaacagttccctgtcgctggcagacaaggggagcctgcccgctggagagcacagcttccccttccagttcctgcttcctgccactgcacccacgtcctttgagggtcctttcgggaagatcgtgcaccaggtgagggccgccatccacacgccacggttttccaaggatcacaagtgcagcctcgtgttctatatcttgagccccttgaacctgaacagcatcccagacattgagcaacccaacgtggcctctgccaccaagaagttctcctacaagctggtgaagacgggcagcgtggtcctcacagccagcactgatctccgcggctatgtggtggggcaggcactgcagctgcatgccgacgttgagaaccagtcaggcaaggacaccagccctgtggtggccagtctgctgcagaaagtgtcctataaggccaagcgctggatccacgacgtacggaccattgcggaggtggagggtgcgggcgtcaaggcctggcggcgggcgcagtggcacgagcagatcctggtgcctgccttgccccagtcggccctgccgggctgcagcctcatccacatcgactactacttacaggtctctctgaaggcgccggaagctactgtgaccctcccggtcttcattggcaatattgctgtgaaccatgccccagtgagcccccggccaggcctggggctgcctcctggggccccacccctggtggtgccttccgcaccaccccaggaggaggctgaggctgaggctgcggctggcggcccccacttcttggaccccgtcttcctctccaccaagagccattcgcagcggcagcccctgctggccaccttgagttctgtgcctggtgcgccggagccctgccctcaggatggcagccctgcctcacacccgctgcaccctcccttgtgcatttcaacaggtgccactgtcccctactttgcagagggctccggggggccagtgcccactaccagcaccttgattcttccctcttctccctggggctggggtgggggtggcagggagctgggacctggagagacaactcctgtaaataaaacactttatttgtagagctgggcctcaccggcctcgccttgggcaccctccagcctctggcagggcctgaccctgaccccatcctgggctctgctcatgccagggcagaccctgctcctcaggtgccccctactaccctgggggcgcgctcaggctaccatgcctgggcggagccgcggggctggctccctttaacagaggacgggggctggcgctgggccttccagagccgcctaaggacacgtccttggagcccggctcatgaaatggggcctcacgcaaccttggtgtttggttaaatttgtgccttggctcctgttgcgtttaggcacccaggttcccaagcggtgtggtgtggacctcccctgctgagaaacccgctggcgcgtggaggggcttgcccaggtccctccgacaggagaccctgctccctgggccttggcccctgctagcaccactgccaggcctggctctgagggacgctgcttctcccctgcccacgtctccaaggcctgaaaggcagggttctgtggaacagcatttctcaaaggggcatcctgcagacgttccagccccaggggaggccccgtgatgctggctggcctgcctggagggtgcttccagaaacaacggagatggtggtgaagaaggctctgggttcaaattccagttctcctttagggcgaaggggtgactgtggctaggtttgtcagttaccttatctataaaatgcacaggaccaggccgggcacggtggctccctcctgtaatcccagtactttgggaggctgaggcaggtggattgcttgaggtcaggagttccagatcagcctgggcaacatagtgaaactccatctgtacaaaaaaaaa

SEQ ID NO: 278323 - DNA, 3685 bp, Homo sapiens
cctgctgctctgggtggcaggcagaaggcctgggccacaggtggggcctgctggggagaccacaggtgaggcaggtatggctgaccctgggcgctcggcacaccggtactcctcctgcctggctgctccctcagcaggtgtcagagtctgagtcaccttttcctcacgtgacccccaccaggaccaggcagggaggtggccatctttggccctgactcagccctgcagggagaagaggggctggaggtgcaggtggcctgccactgtctcccccaacccctgcccacctgggtcttgtgctgtgtgtacttctgctgcgtctgtcctcccttgtgaccagcttctgctggacctgattgtccagccatgatcttctgatcatcatggtttctggacacacatctgttggactaaggaatttgtgttcctggccacagaacagtgccacctctgcctcaagcagttcctggtctgggcactcccccagggaggccggagaggactgagccgtctcctgatgcagaaagtcagccccgctgggcagtgctcgcccaggaagtagggccccacccaacggtgtgctgactgtggaacactgtgtctgcctaggcgggtctggccacattcctgcagcatgatggttggcagttagcttcctggagtgtggacgggtccttccctgcctgactgacttgtccacagggcagcaagaagatgcgccccttggtgtgtcccgagtgtctcctgtaggcagctgagctttcgcaggtctggctgggagccaaggttaccaatctggggggtaacccagccatcatctggatgagcgttggggtctttctgctctggattgcagggcagacgtcgttttgtgctggtcaggcccctcgcctgcctgattcccttggagccccccaagacaggagatgggcagatgtcctctgaagtggcatgggctgcttgctcactggccttcccaggaccctgcccaggtggtgctgcttggccccaggtcgaattcctgtgctggcagcaagcaggggcctgggccgtcggctggctggggctcatgcagccatcccctttgcagccatccgggtgacctgcataggttcctgcggggtctccaacaaggctaatgacacagcgtgggtagtggaggagggttacttcaacagttccctgtcgctggcagacaaggggagcctgcccgctggagagcacagcttccccttccagttcctgcttcctgccactgcacccacgtcctttgagggtcctttcgggaagatcgtgcaccaggtgagggccgccatccacacgccacggttttccaaggatcacaagtgcagcctcgtgttctatatcttgagccccttgaacctgaacagcatcccagacattgaggtgaggatggcacagtgacctccttggtgggtccccaccctcatggaggctggggaagagctgggcaggcactgcttcatcccagcgtcctgtccccagctgaggtgaggggggccagggtctggaggcagtggcctctttgccctgagctgactgctgatgtccaggggcagggcgtggcagggctgaggggcctgtcccaatgccacagggatccagcctgcgcacacctgctaagcccctccctggccctccccccaagcaacccaacgtggcctctgccaccaagaagttctcctacaagctggtgaagacgggcagcgtggtcctcacagccagcactgatctccgcggctatgtggtggggcaggcactgcagctgcatgccgacgttgagaaccagtcaggcaaggacaccagccctgtggtggccagtctgctgcagaaagtgtcctataaggccaagcgctggatccacgacgtacggaccattgcggaggtggagggtgcgggcgtcaaggcctggcggcgggcgcagtggcacgagcagatcctggtgcctgccttgccccagtcggccctgccgggctgcagcctcatccacatcgactactacttacaggtctctctgaaggcgccggaagctactgtgaccctcccggtcttcattggcaatattgctgtgaaccatgccccagtgagcccccggccaggcctggggctgcctcctggggccccacccctggtggtgccttccgcaccaccccaggaggaggctgaggctgaggctgcggctggcggcccccacttcttggaccccgtcttcctctccaccaagagccattcgcagcggcagcccctgctggccaccttgagttctgtgcctggtgcgccggagccctgccctcaggatggcagccctgcctcacacccgctgcaccctcccttgtgcatttcaacaggtgccactgtcccctactttgcagagggctccggggggccagtgcccactaccagcaccttgattcttcctccagagtacagttcttggggctacccctatggtgagtcgacagccagggcttggcagggaggggacgccaagagccccacgcagaccctgctttcttcccgcagaggccccaccgtcttatgagcagagctgcggcggcgtggaacccagcctgacccctgagagctgaccccgtgctgccttctccaggcaggcctggcctctgccctgggactggggcgcccagggcctcgtgccttctctcttggcctagcctggcccactcaggacctgcccagcctctgccagctcctctggcatccgccctcttctccctggggctggggtgggggtggcagggagctgggacctggagagacaactcctgtaaataaaacactttatttgtagagctgggcctcaccggcctcgccttgggcaccctccagcctctggcagggcctgaccctgaccccatcctgggctctgctcatgccagggcagaccctgctcctcaggtgccccctactaccctgggggcgcgctcaggctaccatgcctgggcggagccgcggggctggctccctttaacagaggacgggggctggcgctgggccttccagagccgcctaaggacacgtccttggagcccggctcatgaaatggggcctcacgcaaccttggtgtttggttaaatttgtgccttggctcctgttgcgtttaggcacccaggttcccaagcggtgtggtgtggacctcccctgctgagaaacccgctggcgcgtggaggggcttgcccaggtccctccgacaggagaccctgctccctgggccttggcccctgctagcaccactgccaggcctggctctgagggacgctgcttctcccctgcccacgtctccaaggcctgaaaggcagggttctgtggaacagcatttctcaaaggggcatcctgcagacgttccagccccaggggaggccccgtgatgctggctggcctgcctggagggtgcttccagaaacaacggagatggtggtgaagaaggctctgggttcaaattccagttctcctttagggcgaaggggtgactgtggctaggtttgtcagttaccttatctataaaatgcacaggaccaggccgggcacggtggctccctcctgtaatcccagtactttgggaggctgaggcaggtggattgcttgaggtcaggagttccagatcagcctgggcaacatagtgaaactccatctgtacaaaaaaaaa

SEQ ID NO: 278324 - DNA, 3325 bp, Homo sapiens
cctgctgctctgggtggcaggcagaaggcctgggccacaggtggggcctgctggggagaccacaggtgaggcaggtatggctgaccctgggcgctcggcacaccggtactcctcctgcctggctgctccctcagcaggtgtcagagtctgagtcaccttttcctcacgtgacccccaccaggaccaggcagggaggtggccatctttggccctgactcagccctgcagggagaagaggggctggaggtgcaggtggcctgccactgtctcccccaacccctgcccacctgggtcttgtgctgtgtgtacttctgctgcgtctgtcctcccttgtgaccagcttctgctggacctgattgtccagccatgatcttctgatcatcatggtttctggacacacatctgttggactaaggaatttgtgttcctggccacagaacagtgccacctctgcctcaagcagttcctggtctgggcactcccccagggaggccggagaggactgagccgtctcctgatgcagaaagtcagccccgctgggcagtgctcgcccaggaagtagggccccacccaacggtgtgctgactgtggaacactgtgtctgcctaggcgggtctggccacattcctgcagcatgatggttggcagttagcttcctggagtgtggacgggtccttccctgcctgactgacttgtccacagggcagcaagaagatgcgccccttggtgtgtcccgagtgtctcctgtaggcagctgagctttcgcaggtctggctgggagccaaggttaccaatctggggggtaacccagccatcatctggatgagcgttggggtctttctgctctggattgcagggcagacgtcgttttgtgctggtcaggcccctcgcctgcctgattcccttggagccccccaagacaggagatgggcagatgtcctctgaagtggcatgggctgcttgctcactggccttcccaggaccctgcccagccatccgggtgacctgcataggttcctgcggggtctccaacaaggctaatgacacagcgtgggtagtggaggagggttacttcaacagttccctgtcgctggcagacaaggggagcctgcccgctggagagcacagcttccccttccagttcctgcttcctgccactgcacccacgtcctttgagggtcctttcgggaagatcgtgcaccaggtgagggccgccatccacacgccacggttttccaaggatcacaagtgcagcctcgtgttctatatcttgagccccttgaacctgaacagcatcccagacattgagcaacccaacgtggcctctgccaccaagaagttctcctacaagctggtgaagacgggcagcgtggtcctcacagccagcactgatctccgcggctatgtggtggggcaggcactgcagctgcatgccgacgttgagaaccagtcaggcaaggacaccagccctgtggtggccagtctgctgcagaaagtgtcctataaggccaagcgctggatccacgacgtacggaccattgcggaggtggagggtgcgggcgtcaaggcctggcggcgggcgcagtggcacgagcagatcctggtgcctgccttgccccagtcggccctgccgggctgcagcctcatccacatcgactactacttacaggtctctctgaaggcgccggaagctactgtgaccctcccggtcttcattggcaatattgctgtgaaccatgccccagtgagcccccggccaggcctggggctgcctcctggggccccacccctggtggtgccttccgcaccaccccaggaggaggctgaggctgaggctgcggctggcggcccccacttcttggaccccgtcttcctctccaccaagagccattcgcagcggcagcccctgctggccaccttgagttctgtgcctggtgcgccggagccctgccctcaggatggcagccctgcctcacacccgctgcaccctcccttgtgcatttcaacaggtgccactgtcccctactttgcagagggctccggggggccagtgcccactaccagcaccttgattcttcctccagagtacagttcttggggctacccctatggtgagtcgacagccagggcttggcagggaggggacgccaagagccccacgcagaccctgctttcttcccgcagaggccccaccgtcttatgagcagagctgcggcggcgtggaacccagcctgacccctgagagctgaccccgtgctgccttctccaggcaggcctggcctctgccctgggactggggcgcccagggcctcgtgccttctctcttggcctagcctggcccactcaggacctgcccagcctctgccagctcctctggcatccgccctcttctccctggggctggggtgggggtggcagggagctgggacctggagagacaactcctgtaaataaaacactttatttgtagagctgggcctcaccggcctcgccttgggcaccctccagcctctggcagggcctgaccctgaccccatcctgggctctgctcatgccagggcagaccctgctcctcaggtgccccctactaccctgggggcgcgctcaggctaccatgcctgggcggagccgcggggctggctccctttaacagaggacgggggctggcgctgggccttccagagccgcctaaggacacgtccttggagcccggctcatgaaatggggcctcacgcaaccttggtgtttggttaaatttgtgccttggctcctgttgcgtttaggcacccaggttcccaagcggtgtggtgtggacctcccctgctgagaaacccgctggcgcgtggaggggcttgcccaggtccctccgacaggagaccctgctccctgggccttggcccctgctagcaccactgccaggcctggctctgagggacgctgcttctcccctgcccacgtctccaaggcctgaaaggcagggttctgtggaacagcatttctcaaaggggcatcctgcagacgttccagccccaggggaggccccgtgatgctggctggcctgcctggagggtgcttccagaaacaacggagatggtggtgaagaaggctctgggttcaaattccagttctcctttagggcgaaggggtgactgtggctaggtttgtcagttaccttatctataaaatgcacaggaccaggccgggcacggtggctccctcctgtaatcccagtactttgggaggctgaggcaggtggattgcttgaggtcaggagttccagatcagcctgggcaacatagtgaaactccatctgtacaaaaaaaaa

SEQ ID NO: 278325 - DNA, 2576 bp, Homo sapiens
cggggccgggcctcggagccgggactcgcgggcggcgggcgggggcgtcgctgcgcggctggccggtgaggccgcggcatggggcgagtgcagctcttcgagatcagcctgagccacggccgcgtcgtctacagccccggggagccgttggctgggaccgtgcgcgtgcgcctgggggcaccgctgccgttccgagccatccgggtgacctgcataggttcctgcggggtctccaacaaggctaatgacacagcgtgggtagtggaggagggttacttcaacagttccctgtcgctggcagacaagggccacctcagggggggactgccccccacctccctcctgtctctgcagggagcctgcccgctggagagcacagcttccccttccagttcctgcttcctgccactgcacccacgtcctttgagggtcctttcgggaagatcgtgcaccaggtgagggccgccatccacacgccacggttttccaaggatcacaagtgcagcctcgtgttctatatcttgagccccttgaacctgaacagcatcccagacattgagcaacccaacgtggcctctgccaccaagaagttctcctacaagctggtgaagacgggcagcgtggtcctcacagccagcactgatctccgcggctatgtggtggggcaggcactgcagctgcatgccgacgttgagaaccagtcaggcaaggacaccagccctgtggtggccagtctgctgcagaaagtgtcctataaggccaagcgctggatccacgacgtacggaccattgcggaggtggagggtgcgggcgtcaaggcctggcggcgggcgcagtggcacgagcagatcctggtgcctgccttgccccagtcggccctgccgggctgcagcctcatccacatcgactactacttacaggtctctctgaaggcgccggaagctactgtgaccctcccggtcttcattggcaatattgctgtgaaccatgccccagtgagcccccggccaggcctggggctgcctcctggggccccacccctggtggtgccttccgcaccaccccaggaggaggctgaggctgaggctgcggctggcggcccccacttcttggaccccgtcttcctctccaccaagagccattcgcagcggcagcccctgctggccaccttgagttctgtgcctggtgcgccggagccctgccctcaggatggcagccctgcctcacacccgctgcaccctcccttgtgcatttcaacaggtgccactgtcccctactttgcagagggctccggggggccagtgcccactaccagcaccttgattcttcctccagagtacagttcttggggctacccctatggtgagtcgacagccagggcttggcagggaggggacgccaagagccccacgcagaccctgctttcttcccgcagaggccccaccgtcttatgagcagagctgcggcggcgtggaacccagcctgacccctgagagctgaccccgtgctgccttctccaggcaggcctggcctctgccctgggactggggcgcccagggcctcgtgccttctctcttggcctagcctggcccactcaggacctgcccagcctctgccagctcctctggcatccgccctcttctccctggggctggggtgggggtggcagggagctgggacctggagagacaactcctgtaaataaaacactttatttgtagagctgggcctcaccggcctcgccttgggcaccctccagcctctggcagggcctgaccctgaccccatcctgggctctgctcatgccagggcagaccctgctcctcaggtgccccctactaccctgggggcgcgctcaggctaccatgcctgggcggagccgcggggctggctccctttaacagaggacgggggctggcgctgggccttccagagccgcctaaggacacgtccttggagcccggctcatgaaatggggcctcacgcaaccttggtgtttggttaaatttgtgccttggctcctgttgcgtttaggcacccaggttcccaagcggtgtggtgtggacctcccctgctgagaaacccgctggcgcgtggaggggcttgcccaggtccctccgacaggagaccctgctccctgggccttggcccctgctagcaccactgccaggcctggctctgagggacgctgcttctcccctgcccacgtctccaaggcctgaaaggcagggttctgtggaacagcatttctcaaaggggcatcctgcagacgttccagccccaggggaggccccgtgatgctggctggcctgcctggagggtgcttccagaaacaacggagatggtggtgaagaaggctctgggttcaaattccagttctcctttagggcgaaggggtgactgtggctaggtttgtcagttaccttatctataaaatgcacaggaccaggccgggcacggtggctccctcctgtaatcccagtactttgggaggctgaggcaggtggattgcttgaggtcaggagttccagatcagcctgggcaacatagtgaaactccatctgtacaaaaaaaaa

SEQ ID NO: 278326 - DNA, 2447 bp, Homo sapiens
gcaggctgtactggctcccaagttccttatgagtgtgaggccgcggcatggggcgagtgcagctcttcgagatcagcctgagccacggccgcgtcgtctacagccccggggagccgttggctgggaccgtgcgcgtgcgcctgggggcaccgctgccgttccgagccatccgggtgacctgcataggttcctgcggggtctccaacaaggctaatgacacagcgtgggtagtggaggagggttacttcaacagttccctgtcgctggcagacaaggccactgcacccacgtcctttgagggtcctttcgggaagatcgtgcaccaggtgagggccgccatccacacgccacggttttccaaggatcacaagtgcagcctcgtgttctatatcttgagccccttgaacctgaacagcatcccagacattgagcaacccaacgtggcctctgccaccaagaagttctcctacaagctggtgaagacgggcagcgtggtcctcacagccagcactgatctccgcggctatgtggtggggcaggcactgcagctgcatgccgacgttgagaaccagtcaggcaaggacaccagccctgtggtggccagtctgctgcagaaagtgtcctataaggccaagcgctggatccacgacgtacggaccattgcggaggtggagggtgcgggcgtcaaggcctggcggcgggcgcagtggcacgagcagatcctggtgcctgccttgccccagtcggccctgccgggctgcagcctcatccacatcgactactacttacaggtctctctgaaggcgccggaagctactgtgaccctcccggtcttcattggcaatattgctgtgaaccatgccccagtgagcccccggccaggcctggggctgcctcctggggccccacccctggtggtgccttccgcaccaccccaggaggaggctgaggctgaggctgcggctggcggcccccacttcttggaccccgtcttcctctccaccaagagccattcgcagcggcagcccctgctggccaccttgagttctgtgcctggtgcgccggagccctgccctcaggatggcagccctgcctcacacccgctgcaccctcccttgtgcatttcaacaggtgccactgtcccctactttgcagagggctccggggggccagtgcccactaccagcaccttgattcttcctccagagtacagttcttggggctacccctatggtgagtcgacagccagggcttggcagggaggggacgccaagagccccacgcagaccctgctttcttcccgcagaggccccaccgtcttatgagcagagctgcggcggcgtggaacccagcctgacccctgagagctgaccccgtgctgccttctccaggcaggcctggcctctgccctgggactggggcgcccagggcctcgtgccttctctcttggcctagcctggcccactcaggacctgcccagcctctgccagctcctctggcatccgccctcttctccctggggctggggtgggggtggcagggagctgggacctggagagacaactcctgtaaataaaacactttatttgtagagctgggcctcaccggcctcgccttgggcaccctccagcctctggcagggcctgaccctgaccccatcctgggctctgctcatgccagggcagaccctgctcctcaggtgccccctactaccctgggggcgcgctcaggctaccatgcctgggcggagccgcggggctggctccctttaacagaggacgggggctggcgctgggccttccagagccgcctaaggacacgtccttggagcccggctcatgaaatggggcctcacgcaaccttggtgtttggttaaatttgtgccttggctcctgttgcgtttaggcacccaggttcccaagcggtgtggtgtggacctcccctgctgagaaacccgctggcgcgtggaggggcttgcccaggtccctccgacaggagaccctgctccctgggccttggcccctgctagcaccactgccaggcctggctctgagggacgctgcttctcccctgcccacgtctccaaggcctgaaaggcagggttctgtggaacagcatttctcaaaggggcatcctgcagacgttccagccccaggggaggccccgtgatgctggctggcctgcctggagggtgcttccagaaacaacggagatggtggtgaagaaggctctgggttcaaattccagttctcctttagggcgaaggggtgactgtggctaggtttgtcagttaccttatctataaaatgcacaggaccaggccgggcacggtggctccctcctgtaatcccagtactttgggaggctgaggcaggtggattgcttgaggtcaggagttccagatcagcctgggcaacatagtgaaactccatctgtacaaaaaaaaa

SEQ ID NO: 278327 - DNA, 2838 bp, Homo sapiens
cggggccgggcctcggagccgggactcgcgggcggcgggcgggggcgtcgctgcgcggctggccggtgaggccgcggcatggggcgagtgcagctcttcgagatcagcctgagccacggccgcgtcgtctacagccccggggagccgttggctgggaccgtgcgcgtgcgcctgggggcaccgctgccgttccgagccatccgggtgacctgcataggttcctgcggggtctccaacaaggctaatgacacagcgtgggtagtggaggagggttacttcaacagttccctgtcgctggcagacaagggccacctcagggggggactgccccccacctccctcctgtctctgcagggagcctgcccgctggagagcacagcttccccttccagttcctgcttcctgccactgcacccacgtcctttgagggtcctttcgggaagatcgtgcaccaggtgagggccgccatccacacgccacggttttccaaggatcacaagtgcagcctcgtgttctatatcttgagccccttgaacctgaacagcatcccagacattgaggtgaggatggcacagtgacctccttggtgggtccccaccctcatggaggctggggaagagctgggcaggcactgcttcatcccagcgtcctgtccccagctgaggtgaggggggccagggtctggaggcagtggcctctttgccctgagctgactgctgatgtccaggggcagggcgtggcagggctgaggggcctgtcccaatgccacagggatccagcctgcgcacacctgctaagcccctccctggccctccccccaagcaacccaacgtggcctctgccaccaagaagttctcctacaagctggtgaagacgggcagcgtggtcctcacagccagcactgatctccgcggctatgtggtggggcaggcactgcagctgcatgccgacgttgagaaccagtcaggcaaggacaccagccctgtggtggccagtctgctgcagaaagtgtcctataaggccaagcgctggatccacgacgtacggaccattgcggaggtggagggtgcgggcgtcaaggcctggcggcgggcgcagtggcacgagcagatcctggtgcctgccttgccccagtcggccctgccgggctgcagcctcatccacatcgactactacttacaggtctctctgaaggcgccggaagctactgtgaccctcccggtcttcattggcaatattgctgtgaaccatgccccagtgagcccccggccaggcctggggctgcctcctggggccccacccctggtggtgccttccgcaccaccccaggaggaggctgaggctgaggctgcggctggcggcccccacttcttggaccccgtcttcctctccaccaagagccattcgcagcggcagcccctgctggccaccttgagttctgtgcctggtgcgccggagccctgccctcaggatggcagccctgcctcacacccgctgcaccctcccttgtgcatttcaacaggtgccactgtcccctactttgcagagggctccggggggccagtgcccactaccagcaccttgattcttcctccagagtacagttcttggggctacccctatggtgagtcgacagccagggcttggcagggaggggacgccaagagccccacgcagaccctgctttcttcccgcagaggccccaccgtcttatgagcagagctgcggcggcgtggaacccagcctgacccctgagagctgaccccgtgctgccttctccaggcaggcctggcctctgccctgggactggggcgcccagggcctcgtgccttctctcttggcctagcctggcccactcaggacctgcccagcctctgccagctcctctggcatccgccctcttctccctggggctggggtgggggtggcagggagctgggacctggagagacaactcctgtaaataaaacactttatttgtagagctgggcctcaccggcctcgccttgggcaccctccagcctctggcagggcctgaccctgaccccatcctgggctctgctcatgccagggcagaccctgctcctcaggtgccccctactaccctgggggcgcgctcaggctaccatgcctgggcggagccgcggggctggctccctttaacagaggacgggggctggcgctgggccttccagagccgcctaaggacacgtccttggagcccggctcatgaaatggggcctcacgcaaccttggtgtttggttaaatttgtgccttggctcctgttgcgtttaggcacccaggttcccaagcggtgtggtgtggacctcccctgctgagaaacccgctggcgcgtggaggggcttgcccaggtccctccgacaggagaccctgctccctgggccttggcccctgctagcaccactgccaggcctggctctgagggacgctgcttctcccctgcccacgtctccaaggcctgaaaggcagggttctgtggaacagcatttctcaaaggggcatcctgcagacgttccagccccaggggaggccccgtgatgctggctggcctgcctggagggtgcttccagaaacaacggagatggtggtgaagaaggctctgggttcaaattccagttctcctttagggcgaaggggtgactgtggctaggtttgtcagttaccttatctataaaatgcacaggaccaggccgggcacggtggctccctcctgtaatcccagtactttgggaggctgaggcaggtggattgcttgaggtcaggagttccagatcagcctgggcaacatagtgaaactccatctgtacaaaaaaaaa

SEQ ID NO: 278328 - DNA, 1458 bp, Homo sapiens
tcttgcgtttcgcccctctcagtcgatcaattctactgtctgcttccgcgctcttgctgtcttctgctcgactccccggccccgcgcggcggggccgtctcgccctcgtgtctctttttcttccgcctcctttcgtcttctgtctgcccctctacctccttatgtttccgtctcctccgcgtcccctgagcttcctctgctatagttctgtcttgtcccgctcgtggctgccgcctctattatcatcctcagctctctcgtcgtcgtggctctcgccctgtgccgccgttctcttcgtctttcgtgtccctgtcgcttcttcgctcctccctctcctgcttccttctcccgtcctccctgtctcgtttggtccctccctccgccgcgcctggctggctggcgtcgcctccctctcgttccttctcctgcggctcttgtccttctctctctcctgcctctctctttcgttgtctctttgctttttgtttgttttttttattctttttttcttttttccttttttcgtttttttgtttttttttttttttttttttttttttttttttttttttttttcctgtaaataaaacactttatttgtagagctgggcctcaccggcctcgccttgggcaccctccagcctctggcagggcctgaccctgaccccatcctgggctctgctcatgccagggcagaccctgctcctcaggtgccccctactaccctgggggcgcgctcaggctaccatgcctgggcggagccgcggggctggctccctttaacagaggacgggggctggcgctgggccttccagagccgcctaaggacacgtccttggagcccggctcatgaaatggggcctcacgcaaccttggtgtttggttaaatttgtgccttggctcctgttgcgtttaggcacccaggttcccaagcggtgtggtgtggacctcccctgctgagaaacccgctggcgcgtggaggggcttgcccaggtccctccgacaggagaccctgctccctgggccttggcccctgctagcaccactgccaggcctggctctgagggacgctgcttctcccctgcccacgtctccaaggcctgaaaggcagggttctgtggaacagcatttctcaaaggggcatcctgcagacgttccagccccaggggaggccccgtgatgctggctggcctgcctggagggtgcttccagaaacaacggagatggtggtgaagaaggctctgggttcaaattccagttctcctttagggcgaaggggtgactgtggctaggtttgtcagttaccttatctataaaatgcacaggaccaggccgggcacggtggctccctcctgtaatcccagtactttgggaggctgaggcaggtggattgcttgaggtcaggagttccagatcagcctgggcaacatagtgaaactccatctgtacaaaaaaaaa

SEQ ID NO: 278329 - DNA, 898 bp, Homo sapiens
cggggccgggcctcggagccgggactcgcgggcggcgggcgggggcgtcgctgcgcggctggccggtgaggccgcggcatggggcgagtgcagctcttcgagatcagcctgagccacggccgcgtcgtctacagccccggggagccgttggctgggaccgtgcgcgtgcgcctgggggcaccgctgccgttccgagccatccgggtgacctgcataggttcctgcggggtctccaacaaggctaatgacacagcgtgggtagtggaggagggttacttcaacagttccctgtcgctggcagacaaggggagcctgcccgctggagagcacagcttccccttccagttcctgcttcctgccactgcacccacgtcctttgagggtcctttcgggaagatcgtgcaccaggtgagggccgccatccacacgccacggttttccaaggatcacaagtgcagcctcgtgttctatatcttgagccccttgaacctgaacagcatcccagacattgagcaacccaacgtggcctctgccaccaagaagttctcctacaagctggtgaagacgggcagcgtggtcctcacagccagcactgatctccgcggctatgtggtggggcaggcactgcagctgcatgccgacgttgagaaccagtcaggcaaggacaccagccctgtggtggccagtctgctgcagaaagtgtcctataaggccaagcgctggatccacgacgtacggaccattgcggaggtggagggtgcgggcgtcaaggcctggcggcgggcgcagtggcacgagcagatcctggtgcctgccttgccccagtcggccctgccgggctgcagcctcatccacatcgactactacttacagtcccaggttagcattttcaatgact

SEQ ID NO: 278330 - DNA, 917 bp, Homo sapiens
acatacatcgggtgtgagcacggaatagctgggcggcggctggtccacagacactgggagacagaaggggccggtccccaggcgcccgtgctgcagcagtgggatccactggggagaggctggagaccaccggtgtgaaggcctcgcgggtaaattcactgcagctggacttgccaaagatgacctgggagagtggattcatgagggacccatgggggatgccctaccccccttccctggggcacagccactgaccggcagagcctggctggggtcctcgcctgtcatgtactgcactcgcacggcaaggttgcgcacggagccctggcggctgctgaagttgaggctgtgcagatggaggaggatattctgcagctgcaggcagaggccacagctgaggtgctgggggaggtggcccaggcacagaaggtgctacgggacagcgtgcagcggctagaagtccagctgaggagcgcctggctgggccctgcctaccgagaatttgaggtcttaaaggctcacgctgacaagcagagccacatcctatgggccctcacaggccacgtgcagcggcagaggcgggagatggtggcacagcagcatcggctgcgacagatccaggagagactccacacagcggcgctcccagcctgaatctgcctggatggaactgaggaccaatcatgctgcaaggaacacttccacgccccgtgaggcccctgtgcagggaggagctgcctgttcactgggatcagccagggcgccgggccccacttctgagcacagagcagagacagacgcaggcggggacaaaggcagaggatgtagccccattggggaggggtggaggaaggacatgtaccctttcatgcctacacacccctcattaaagcagagtcgtggcatctcaaaaaaaa

SEQ ID NO: 278331 - DNA, 701 bp, Homo sapiens
gtcatgccagtgcctgctctgtgcctgctgtgggccctggcaatggtgacccggcctgcctcagcggcccccatgggcggcccagaactggcacagcatgaggagctgaccctgctcttccatgggaccctgcagctgggccaggccctcaacggtgtgtacaggaccacggagggacggctgacaaaggccaggaacagcctgggtctctatggccgcacaatagaactcctggggcaggaggtcagccggggccgggatgcagcccaggaacttcgggcaagcctgttggagactcaggctcacgctgacaagcagagccacatcctatgggccctcacaggccacgtgcagcggcagaggcgggagatggtggcacagcagcatcggctgcgacagatccaggagagactccacacagcggcgctcccagcctgaatctgcctggatggaactgaggaccaatcatgctgcaaggaacacttccacgccccgtgaggcccctgtgcagggaggagctgcctgttcactgggatcagccagggcgccgggccccacttctgagcacagagcagagacagacgcaggcggggacaaaggcagaggatgtagccccattggggaggggtggaggaaggacatgtaccctttcatgcctacacacccctcattaaagcagagtcgtggcatctcaaaaaaaa

SEQ ID NO: 278332 - DNA, 863 bp, Homo sapiens
gtcatgccagtgcctgctctgtgcctgctgtgggccctggcaatggtgacccggcctgcctcagcggcccccatgggcggcccagaactggcacagcatgaggagctgaccctgctcttccatgggaccctgcagctgggccaggccctcaacggtgtgtacaggaccacggagggacggctgacaaaggccaggaacagcctgggtctctatggccgcacaatagaactcctggggcaggaggtcagccggggccgggatgcagcccaggaacttcgggcaagcctgttggagactcagatggaggaggatattctgcagctgcaggcagaggccacagctgaggtgctgggggaggtggcccaggcacagaaggtgctacgggacagcgtgcagcggctagaagtccagctgaggagcgcctggctgggccctgcctaccgagaatttgaggtcttaaaggctcacgctgacaagcagagccacatcctatgggccctcacaggccacgtgcagcggcagaggcgggagatggtggcacagcagcatcggctgcgacagatccaggagagactccacacagcggcgctcccagcctgaatctgcctggatggaactgaggaccaatcatgctgcaaggaacacttccacgccccgtgaggcccctgtgcagggaggagctgcctgttcactgggatcagccagggcgccgggccccacttctgagcacagagcagagacagacgcaggcggggacaaaggcagaggatgtagccccattggggaggggtggaggaaggacatgtaccctttcatgcctacacacccctcattaaagcagagtcgtggcatctcaaaaaaaa

SEQ ID NO: 278333 - DNA, 867 bp, Homo sapiens
gccttaggtagacctcttacagctcacaagaaatgcagtttatgaggaaagaccatgaatcggggggcggcccggggagggtattaccaaacagatcagcatcaggaacatcattcccagagagaaatttggccaattgtcagttcaagtacacatctctccctccttttacagcatattgcaatagattatagccatgcgaaataatccataaacttagctaattccaccaaacagataggaaagaaggtagagtcctacaagagcctagtcagaataagaactacagtaattttgccaaaaccctgttaagttcttgaataattctggtcaaaatggatttcaatctgagttaactcacagtcaacaatttggctgtttttcttgcttctcactctactgccttactctcttccacagtgttaagtagccatttaaatgggtttgttctgctgcaggtggctgagcctgggatttccaacttgggagactacacagtggactctataatgattagtggcagcatccaatgtctcttccaagtctaaaatttgtgagtttcaaagttgactctccccaaacctggcctttgctgcctcagattctgtcactctagcaaggcagagagagcaaaaggggcaagacaaacctcatcaacagcacagaaatcccagaatcacacactctctggtccagccaagccaagtgtttttttttttgttgttgttgttgttttttaaatcaccctccattactcaacattctcgttcccagatgaattttaaactggagttgcaccaactgtgagacagcctcaaccccaatgttaaatactaccagttatatatatatatatatatatatata

SEQ ID NO: 278334 - DNA, 536 bp, Homo sapiens
tagtcagaatccactactctaccactaatgtctcttccatccggctctgcagcacctgagcaaaagacctctgcagctgagtccaaagagcattcccatgtgaaccgagcaaccaagtatcatcggagtggctgagcctgggatttccaacttgggagactacacagtggactctataatgattagtggcagcatccaatgtctcttccaagtctaaaatttgtgagtttcaaagttgactctccccaaacctggcctttgctgcctcagattctgtcactctagcaaggcagagagagcaaaaggggcaagacaaacctcatcaacagcacagaaatcccagaatcacacactctctggtccagccaagccaagtgtttttttttttgttgttgttgttgttttttaaatcaccctccattactcaacattctcgttcccagatgaattttaaactggagttgcaccaactgtgagacagcctcaaccccaatgttaaatactaccagttatatatatatatatatatatatata

SEQ ID NO: 278335 - DNA, 1315 bp, Homo sapiens
cgcgctatgcatgctaggattagtagttcctccgtccctcatggcgcggggtcagggcggagctcaggttgactctgcagcagagaactacaattcccatggggccgcgcggcagaaagaaaggggcgggacgggagggggcgcgtcgcgcttgcgcaggtcccggggccggagggaggcggaggcgtagcggtccaactgctgaagtccccatgtgacagtgagcggggtccccgctccaggagacgctcgagtctgcgtcccggccctcagcactgtccactgtttcggtgccagcagagaccagcaggcccgggacagttggtgtttggccgtgccgctgtctaacttggtgtgcagagtgaattgccgctgccggagcggagagaggcggagcggccaggagagaggggatttctgtcagcgccggcctcgggagctcggagacatgaacggcttcacgcctgacgagatgagccgcggcggggatgcggccgccgcagtggccgcagtggtcgctgccgcggccgccgccgcctcggcggggaacgggaccggcgcgggcaccggggctgaggtgccgggcgcgggggcggtctcagcggctgggcccccgggggcggccgggccgggccccgggcaactgtgctgcctgcgggaggatggtgagcggtgcggccgggcggcaggcaacgccagcttcagcaagaggatccagaagagcatctcccagaagaaggtgaagatcgagctggataagagcgcaaggcatctttacatatgtgattatcataaaaacttaattcagagtgttcgaaacagaagaaagagaaaagggagtgatgatgatggaggtgattcacctgttcaagatattgataccccagaggttgatttataccaattacaagtaaatacacttaggagatacaaaagacacttcaagctaccaaccagaccaggacttaataaagcacaacttgttgagatagttggttgccactttaggtctattccagtgaatgaaaaagacaccttaacatatttcatctactcagtgaagaatgacaagaacaaatcagatctcaaggttgatagtggtgttcactaggagacgtggaattgagactaataacttggatgttaacactgtttactgttttttcacatgtagaaatgttctttgtgtattttttctacagaggattttctctgattttattttctttgtttctgactctaataattagttggaaactcatataaaatgagctttcctaaattaaatctattttaaataaaggttattactatt

SEQ ID NO: 278336 - DNA, 458 bp, Homo sapiens
aatataatttttaaaggaaatagcccttatcacatagcactttttcttttgatgaaaccgtattttttacgtagtttatgaaacctgttatatctaaaatttaatttccttaatttttcttttctttgtagatagttggttgccactttaggtctattccagtgaatgaaaaagacaccttaacatatttcatctactcagtgaagaatgacaagaacaaatcagatctcaaggttgatagtggtgttcactaggagacgtggaattgagactaataacttggatgttaacactgtttactgttttttcacatgtagaaatgttctttgtgtattttttctacagaggattttctctgattttattttctttgtttctgactctaataattagttggaaactcatataaaatgagctttcctaaattaaatctattttaaataaaggttattactatt

SEQ ID NO: 278337 - DNA, 381 bp, Homo sapiens
ttttttttgattttggaagtaaatttttattgtgctgaagttaaaatgtttgttattatacatatcaatgataaattttcaacaaattgtatgaactcatttatacatgttaattttttctaggttgatttataccaattacaagtaaatacacttaggagatacaaaagacacttcaagctaccaaccagaccaggacttaataaagcacaacttgttgaggtatatatgagttttaaactatttgaactatctgcacaaccgagaggttattaagtgctaatggaagttttaatgtagtgtatgtaacagtacattttaattagaaagaacaaagttaaaaaatctgttgtggaagaatctagttgtgtagaaatgttt

SEQ ID NO: 278338 - DNA, 1551 bp, Homo sapiens
cgcgctatgcatgctaggattagtagttcctccgtccctcatggcgcggggtcagggcggagctcaggttgactctgcagcagagaactacaattcccatggggccgcgcggcagaaagaaaggggcgggacgggagggggcgcgtcgcgcttgcgcaggtcccggggccggagggaggcggaggcgtagcggtccaactgctgaagtccccatgtgacagtgagcggggtccccgctccaggagacgctcgagtctgcgtcccggccctcagcactgtccactgtttcggtgccagcagagaccagcaggcccgggacagttggtgtttggccgtgccgctgtctaacttggtgtgcagagtgaattgccgctgccggagcggagagaggcggagcggccaggagagaggggatttctgtcagcgccggcctcgggagctcggagacatgaacggcttcacgcctgacgagatgagccgcggcggggatgcggccgccgcagtggccgcagtggtcgctgccgcggccgccgccgcctcggcggggaacgggaccggcgcgggcaccggggctgaggtgccgggcgcgggggcggtctcagcggctgggcccccgggggcggccgggccgggccccgggcaactgtgctgcctgcgggaggatggtgagcggtgcggccgggcggcaggcaacgccagcttcagcaagaggatccagaagagcatctcccagaagaaggtgaagatcgagctggataagagcgcaaggcatctttacatatgtgattatcataaaaacttaattcagagtgttcgaaacagaagaaagagaaaagggagtgatgatgatggaggtgattcacctgttcaagatattgataccccagaggttgatttataccaattacaagtaaatacacttaggagatacaaaagacacttcaagctaccaaccagaccaggacttaataaagcacaacttgttgagatagttggttgccactttaggtctattccagtgaatgaaaaagacaccttaacatatttcatctactcagtgaagaatgacaagaacaaatcagatctcaaggttgatagtggtgttcactaggagacgtggaattgagactaataacttggatgttaacactgtttactgttttttcacatgtagaaatgttctttgtgtattttttctacagaggattttctctgattttattttctttgtttctgactctaataattagttggaaactcatataaaatgagctttcctaaattaaatctattttaaataaaggttattactattatagttgcttcagtgtatttattttgtgaaacttgatttttcttttaaactgactaagagatcagtattgagattttaatgtaaagtccttcattttgtaatccttttttttttttttttttaaacttccaagaaattaacagggtaaggagaagtaacaaatgtagcacatttgcattctctgggacaatctgacttggaagtgaagataatctaaatagcattattttttaaag

SEQ ID NO: 278339 - DNA, 836 bp, Homo sapiens
aaataaaaataagaaatcaataggtatcgagacaaaaaaaaaagtttagcaaggcatctttacatatgtgattatcataaaaacttaattcagagtgttcgaaacagaagaaagagaaaagggagtgatgatgatggaggtgattcacctgttcaagatattgataccccagaggttgatttataccaattacaagtaaatacacttaggagatacaaaagacacttcaagctaccaaccagaccaggacttaataaagcacaacttgttgagatagttggttgccactttaggtctattccagtgaatgaaaaagacaccttaacatatttcatctactcagtgaagaatgacaagaacaaatcagatctcaaggttgatagtggtgttcactaggagacgtggaattgagactaataacttggatgttaacactgtttactgttttttcacatgtagaaatgttctttgtgtattttttctacagaggattttctctgattttattttctttgtttctgactctaataattagttggaaactcatataaaatgagctttcctaaattaaatctattttaaataaaggttattactattatagttgcttcagtgtatttattttgtgaaacttgatttttcttttaaactgactaagagatcagtattgagattttaatgtaaagtccttcattttgtaatccttttttttttttttttttaaacttccaagaaattaacagggtaaggagaagtaacaaatgtagcacatttgcattctctgggacaatctgacttggaagtgaagataatctaaatagcattattttttaaag

SEQ ID NO: 278340 - DNA, 549 bp, Homo sapiens
ttttttttgattttggaagtaaatttttattgtgctgaagttaaaatgtttgttattatacatatcaatgataaattttcaacaaattgtatgaactcatttatacatgttaattttttctaggttgatttataccaattacaagtaaatacacttaggagatacaaaagacacttcaagctaccaaccagaccaggacttaataaagcacaacttgttgagatagttggttgccactttaggtctattccagtgaatgaaaaagacaccttaacatatttcatctactcagtgaagaatgacaagaacaaatcagatctcaaggttgatagtggtgttcactaggagacgtggaattgagactaataacttggatgttaacactgtttactgttttttcacatgtagaaatgttctttgtgtattttttctacagaggattttctctgattttattttctttgtttctgactctaataattagttggaaactcatataaaatgagctttcctaaattaaatctattttaaataaaggttattactatt

SEQ ID NO: 278341 - DNA, 514 bp, Homo sapiens
tccattggccaacgctctgggaagaaagagaaaagggagtgatgatgatggaggtgattcacctgttcaagatattgataccccagaggttgatttataccaattacaagtaaatacacttaggagatacaaaagacacttcaagctaccaaccagaccaggacttaataaagcacaacttgttgagatagttggttgccactttaggtctattccagtgaatgaaaaagacaccttaacatatttcatctactcagtgaagaatgacaagaacaaatcagatctcaaggttgatagtggtgttcactaggagacgtggaattgagactaataacttggatgttaacactgtttactgttttttcacatgtagaaatgttctttgtgtattttttctacagaggattttctctgattttattttctttgtttctgactctaataattagttggaaactcatataaaatgagctttcctaaattaaatctattttaaataaaggttattactatt

SEQ ID NO: 278342 - DNA, 1463 bp, Homo sapiens
tcaggaaatgcgctttctgctccccgcgcccggtagagctaatgcagggaagtttctgggaacattcgaccagcgtttgtattggagtcgaggaacttctctgaaaaccaattctacgatattccagcagctaaacacagcccgaattccctagaaacagagagagcgagagaaaacactgtaaaccccaatcacacgctcctgttttcccgagaccagcaggcccgggacagttggtgtttggccgtgccgctgtctaacttggtgtgcagagtgaattgccgctgccggagcggagagaggcggagcggccaggagagaggggatttctgtcagcgccggcctcgggagctcggagacatgaacggcttcacgcctgacgagatgagccgcggcggggatgcggccgccgcagtggccgcagtggtcgctgccgcggccgccgccgcctcggcggggaacgggaccggcgcgggcaccggggctgaggtgccgggcgcgggggcggtctcagcggctgggcccccgggggcggccgggccgggccccgggcaactgtgctgcctgcgggaggatggtgagcggtgcggccgggcggcaggcaacgccagcttcagcaagaggatccagaagagcatctcccagaagaaggtgaagatcgagctggataagagcgcaaggcatctttacatatgtgattatcataaaaacttaattcagagtgttcgaaacagaagaaagagaaaagggagtgatgatgatggaggtgattcacctgttcaagatattgataccccagaggttgatttataccaattacaagtaaatacacttaggagatacaaaagacacttcaagctaccaaccagaccaggacttaataaagcacaacttgttgagatagttggttgccactttaggtctattccagtgaatgaaaaagacaccttaacatatttcatctactcagtgaagaatgacaagaacaaatcagatctcaaggttgatagtggtgttcactaggagacgtggaattgagactaataacttggatgttaacactgtttactgttttttcacatgtagaaatgttctttgtgtattttttctacagaggattttctctgattttattttctttgtttctgactctaataattagttggaaactcatataaaatgagctttcctaaattaaatctattttaaataaaggttattactattatagttgcttcagtgtatttattttgtgaaacttgatttttcttttaaactgactaagagatcagtattgagattttaatgtaaagtccttcattttgtaatccttttttttttttttttttaaacttccaagaaattaacagggtaaggagaagtaacaaatgtagcacatttgcattctctgggacaatctgacttggaagtgaagataatctaaatagcattattttttaaag

SEQ ID NO: 278343 - DNA, 750 bp, Homo sapiens
tccattggccaacgctctgggaagaaagagaaaagggagtgatgatgatggaggtgattcacctgttcaagatattgataccccagaggttgatttataccaattacaagtaaatacacttaggagatacaaaagacacttcaagctaccaaccagaccaggacttaataaagcacaacttgttgagatagttggttgccactttaggtctattccagtgaatgaaaaagacaccttaacatatttcatctactcagtgaagaatgacaagaacaaatcagatctcaaggttgatagtggtgttcactaggagacgtggaattgagactaataacttggatgttaacactgtttactgttttttcacatgtagaaatgttctttgtgtattttttctacagaggattttctctgattttattttctttgtttctgactctaataattagttggaaactcatataaaatgagctttcctaaattaaatctattttaaataaaggttattactattatagttgcttcagtgtatttattttgtgaaacttgatttttcttttaaactgactaagagatcagtattgagattttaatgtaaagtccttcattttgtaatccttttttttttttttttttaaacttccaagaaattaacagggtaaggagaagtaacaaatgtagcacatttgcattctctgggacaatctgacttggaagtgaagataatctaaatagcattattttttaaag

SEQ ID NO: 278344 - DNA, 1109 bp, Homo sapiens
cattctctcggcggcatctggggttccaggcgggcagcagctgcaggctgaccttgcagcttggcggaatggactggcctcacaacctgctgtttcttcttaccatttccatcttcctggggctgggccagcccaggagccccaaaagcaagaggaaggggcaagggcggcctgggcccctggcccctggccctcaccaggtgccactggacctggtgtcacggatgaaaccgtatgcccgcatggaggagtatgagaggaacatcgaggagatggtggcccagctgaggaacagctcagagctggcccagagaaagtgtgaggtcaacttgcagctgtggatgtccaacaagaggagcctgtctccctggggctacagcatcaaccacgaccccagccgtatccccgtggacctgccggaggcacggtgcctgtgtctgggctgtgtgaaccccttcaccatgcaggaggaccgcagcatggtgagcgtgccggtgttcagccaggttcctgtgcgccgccgcctctgcccgccaccgccccgcacagggccttgccgccagcgcgcagtcatggagaccatcgctgtgggctgcacctgcatcttctgaatcacctggcccagaagccaggccagcagcccgagaccatcctccttgcacctttgtgccaagaaaggcctatgaaaaagtggatactggttaaaattaccccaggaagcttcggctgggttccagacacatggaaaacagacttcctgtgccagcgcatgctgatcccttcagcagccgcttctccacccttggggctgctctccagcacctggcagtgtccagagcggataggggcgccgtgtttggtgaatgagtgcacagacgcctctagggggagcccaagatctgcctcctgcctccctctattatgccttcataggtgggtcagaacaaagaattccttatcaacctcccgggtcccccactgccaatcacccacctccattctaccctctacagctgccccttatcccccaaagtcctgaaattttgcttgggtcacctgctccaggaggcagagttcccatgaagggtattaaacgtctactacactgc

SEQ ID NO: 278345 - DNA, 722 bp, Homo sapiens
cattctctcggcggcatctggggttccaggcgggcagcagctgcaggctgaccttgcagcttggcggaatggactggcctcacaacctgctgtttcttcttaccatttccatcttcctggggctgggccagcccaggagccccaaaagcaagaggaaggggcaagggcggcctgggcccctggcccctggccctcaccaggtgccactggacctggtgtcacggatgaaaccgtatgcccgcatggaggagtatgagaggaacatcgaggagatggtggcccagctgaggaacagctcagagctggcccagagaaagtgtgaggtcaacttgcagctgtggatgtccaacaagaggagcctgtctccctggggctacagcatcaaccacgaccccagccgtatccccgtggacctgccggaggcacggtgcctgtgtctgggctgtgtgaaccccttcaccatgcaggaggaccgcagcatggtgagcgtgccggtgttcagccaggttcctgtgcgccgccgcctctgcccgccaccgccccgcacagggccttgccgccagcgcgcagtcatggagaccatcgctgtgggctgcacctgcatcttctgaatcacctggcccagaagccaggccagcagcccgagaccatcctccttgcacctttgtgccaagaaaggcctatgaaaagtaaacactgacttttgaaagcaaaaaaaaaag

SEQ ID NO: 278346 - DNA, 352 bp, Homo sapiens
gattgtaagtgactttatattatttaacctcagtattggatggttttgggttcaaagattgtcccatgttttgtggcagtattctttttaatgaattgttcctgtgcaattcagaaaatgttgcttgtagtcctggatttatttcttattagactgggactttgagagagtcagtatacccttgtgtgcctcattttcttatccatataatgaaggggtcagtgacctgtggaaatacctcaaagatcatctcacattctctctaggatgcatgagccaccatgcctggcctaatttttattttttgtagggacagagtcttgctatgttgcctagactggccttgaactca

SEQ ID NO: 278347 - DNA, 448 bp, Homo sapiens
taccagttttccacagagaattccacatgtctccactccccgggcagtgttggcactggctaactggagaaactgtgggcacagccgcccaggcaccaccacatggcgcaatccatcgattgtgggaactgtaaaggagaaaggagaatagtctgcgaccactgagccctgcctcctcaagcagacctcacagccagcagccctggaggagcaacattaagccactgggattcccccaacttcaggcagatctggtactcagatgcagagactactacttttatcttgaagtcagtctgtgctgctctgaagcttttagatgggcaacaatgaaagtgaagacccacctttactgtgtctttcttttcaggaatgacagcagatttgtaatctcgatgttttggtagtttctcaataaagagcctaaggaaacagttcaaaatgatta

SEQ ID NO: 278348 - DNA, 484 bp, Homo sapiens
taccagttttccacagagaattccacatgtctccactccccgggcagtgttggcactggctaactggagaaactgtgggcacagccgcccaggcaccaccacatggcgcaatccatcgattgtgggaactgtaaaggagaaaggagaatagtctgcgaccactgagccctgcctcctcaagcagacctcacagccagcagccctggaggagcaacattaagccactgggattcccccaacttcaggcagtgagtagggatctcattctaatggcaccaaaaaaagggctgtaaagtgtcttctccaatcttgggccacagctgtaaggagcacattacttcaagaagagaaaatagtaggctttaattattcaagttaagaaaagggcaaactactaccttaagaaaagttttcttaaaaataaccttaagaatgtaattggattgtttgtaactcaaaggataaatacttgaggggatggaaa

SEQ ID NO: 278349 - DNA, 326 bp, Homo sapiens
cttgccgggcttcttgtcgtcgcggggcaccttgacgaagcactcgttgagcgagaggttgtggcggatgctgttctgccagccctgcttgttctcccggtagaaggggaagcggtccatgatgaactggtagatgccgttcaaggtttccttgcacccttcctggctgttcatcggctgcgtattcgattctcagcaaaaggatgttgagacaacccaccaggcctcttcgcttcggcctcttcgcttcggggaggcgactagaaggcaatggggcgtgccacttatttccaataaaagaacagaagacgaaaatgtagatgcat

SEQ ID NO: 278350 - DNA, 697 bp, Homo sapiens
agtaaaggaagcctggaatgctggaagatctacaaacaatattatctgaacaacagttacagctgtgattaaagtacaaagagaaaaaaaacagtagatttaacagtaaactaggtggaggaagggatagaagctaaacagcatttcactgtagtaggaaaaacactgacttgagagttaataagtgttcaagtattttattgtaattctttaattgtttgttaaacctaaacatagtttgatagtgtttttttgctgctgattatatatcctgatatcagctggtttatattccttaaattagggaaaaatgttcaattttttcaaatggtttttcaaagtttctacttgttcaaatcaagtagaactaattaattctctatccaaagattttagacatgcctccagacccaaatactctgatgagaaaaagacagcttctctgtttttggaactcaaactttcagcaacatgctttcaatattaacatataatagactactgttatatgacactaaatgtaaaatctaagtgaatatactttattggacatacttttttgataactttcataacaagttagcatgaacacaaataatatctcactttattatagaacacaacataatcttttacattctatttaaggtccttcctacaccctactgcataatcatccacaaatataactttatcc

SEQ ID NO: 278351 - DNA, 439 bp, Homo sapiens
atttaaaagtaataaagacaaactacagttacttgggtgagttggctccccaggcttttgagatacctgccttttgtccagcactgcatcgtcctcgcatatccaaggctgtgtctcccttcagcatcaccactcggcttttagcagactgaagccatggtttttagttttgtctctagtgatgagcagaaaagagggatgaggaagaggctttactggtccaaccagaaagagaagctaagaacccatgactggattctctcccttggacaccccacagaccaatatctcaccttccaggagaagacccttccagctcttgcttctttaaacctattaacttagttttctttagctagactcccaaacatcagcttttacaattcagcctatggttcaatcactatggcaagataaacatttgtttaggtgtgaaaca

SEQ ID NO: 278352 - DNA, 649 bp, Homo sapiens
cttaatgagactccttactatactggaatattcattctagcttaagctagaatctggtttgcaatactattatgtcattgattctgaaacatcttatggttataattgcattttttcattcctgctggcacataaaatagtggtatgtcttataactgatgagacagtgaccttattctgataaggagtgccatgaaaactctaacgggtcttcagcttcttgttctacatttagcctatcctgtgagaatgcttcaggcccttcttttaaaagtctacataatgttgcaggaaatgttggttagcttcaggagagtgtaataatagtagctgagcctgattcattttatatagcagcaaagagcttcccaccattcaggtgtagccttgggtgcttccactgcactgatgtttgtttctctctttcagttacttgggtgagttggctccccaggcttttgagatacctgccttttgtccagcactgcatcgtcctcgcatatccaaggctgtgtctcccttcagcatcaccactcggtagttataattccgccttttatcagaagctgatacattttcatcggcatcagaccgtatttctatgtattcaatatctgacacaggaagaagaatattttagaggaaccta

SEQ ID NO: 278353 - DNA, 394 bp, Homo sapiens
gcctcttcgctttgctctggccccgaagcgctgggattgggacctcccttcctcccgaccagctcatcctgggaaagctggggttgctttttcgggtttctctggactctgggtctccgttggcaaagacatgatgcccagtcaggaggagtaaggcctgagagagttgtttttttacttgggtgagttggctccccaggcttttgagatacctgccttttgtccagcactgcatcgtcctcgcatatccaaggctgtgtctcccttcagcatcaccactcggtagttataattccgccttttatcagaagctgatacattttcatcggcatcagaccgtatttctatgtattcaatatctgacacaggaagaagaatattttagaggaaccta

SEQ ID NO: 278354 - DNA, 1697 bp, Homo sapiens
cttaatgagactccttactatactggaatattcattctagcttaagctagaatctggtttgcaatactattatgtcattgattctgaaacatcttatggttataattgcattttttcattcctgctggcacataaaatagtggtatgtcttataactgatgagacagtgaccttattctgataaggagtgccatgaaaactctaacgggtcttcagcttcttgttctacatttagcctatcctgtgagaatgcttcaggcccttcttttaaaagtctacataatgttgcaggaaatgttggttagcttcaggagagtgtaataatagtagctgagcctgattcattttatatagcagcaaagagcttcccaccattcaggtgtagccttgggtgcttccactgcactgatgtttgtttctctctttcagttacttgggtgagttggctccccaggcttttgagatacctgccttttgtccagcactgcatcgtcctcgcatatccaaggctgtgtctcccttcagcatcaccactcggcttttagcagactgaagccatggtttttagttttgtctctagtgatgagcagaaaagagggatgaggaagaggctttactggtccaaccagaaagagaagctaagaacccatgactggattctctcccttggacaccccacagaccaatatctcaccttccaggagaagacccttccagctcttgcttctttaaacctattaacttagttttctttagctagactcccaaacatcagcttttacaattcagcctatggttcaatcactatggcaagataaacatttgtttaggtgtgaaacaccactggctatctttgggttttgtaatctaccctcttgaggttgcaggagctactgtgaaaccttactgcatccatggtcatgatagagatggtgactctaaggtgagccctgaataaagccctcatctgaagctcccctcgaatgcagggacccaggctctgaagagcctcacagaaagctggctaccttggatgcaaaactgtaaaggttacgtgtttacaatgagtcttaaaagaagcatgacctggccaggtgcgtggctcatgcttgtaatcccagcactttgggaggccaaggcaggtggatcacaaggtcaagagatcaagaccatcctggccaacatggtgaaaccccgtctctactaaaaatacaaaaaattagcccgggtgtggtggcaggcgcctgtaatcccagctacttgggaggccgaggcagaaaattgcttgaacccgggaggtggagatggcagtgagctgagatcgcaccattgggagtccagcctgggcaaaaagagcgaaactctgtctcaaaaaaaaaaaaaaaagtattacctaatatgcaaccttccacatctggggaaaaatgagagtagaacattttgggcatggggtagaacaccatatcttgagtgatatattctaacatcatttaaattggtatattgtattagtatggggtaatacattccaaatgatggataatttcccccttttcatctatgtgtctctgaccactgccaatgcttatacttagtgatgtttttagatgattactaataacagatggtaatcagcttttcttgaaaatgcactgctgacttcctgtgttaccttaaatagacagctgaacgcaaca

SEQ ID NO: 278355 - DNA, 414 bp, Homo sapiens
accccgcgggcccggccgagcggcagcccctgccctggagggtggtctccagggaccaaggcgtggcgggcggtgcggagaggcgcggcacagatggctacatcagaggaatttctccacatattcagaacgtcctaaaagctccacaaaatcttcatcatgagtgattaccagaagctggaagttacgctgctttacttgggtgagttggctccccaggcttttgagatacctgccttttgtccagcactgcatcgtcctcgcatatccaaggctgtgtctcccttcagcatcaccactcggtagttataattccgccttttatcagaagctgatacattttcatcggcatcagaccgtatttctatgtattcaatatctgacacaggaagaagaatattttagaggaaccta

SEQ ID NO: 278356 - DNA, 899 bp, Homo sapiens
  misc_feature (1)..(3): n is a, c, g, or t
  misc_feature (5)..(6): n is a, c, g, or t
  misc_feature (17)..(17): n is a, c, g, or t
  misc_feature (24)..(24): n is a, c, g, or t
  misc_feature (26)..(27): n is a, c, g, or t
  misc_feature (54)..(54): n is a, c, g, or t
  misc_feature (70)..(70): n is a, c, g, or t
  misc_feature (85)..(85): n is a, c, g, or t
  misc_feature (97)..(97): n is a, c, g, or t
nnncnncactgcctgcnctgctgnannacccgcacatcaatgccatgtttcttnaggtactccacagttnatgaaggcacctggnaaggtggaaaanagatgagtaagtagggggaaaggccccccaggggttcctttactgccatgaggcaggtgtactctacagaattagacagtgacaatcgtcacttcacgatcactcagtgtatcaccagtccaaaatttggcagtgagccccaatgagtcaaaaaggcctctttgtcagaggtatcataatacccatgcataaagctcaagtgaaatggaaatgaaagaacatgggatttgcagttagccttggatttacatccttactagcactgtaaccttgggtaagtaaattaaattctctgagtctttgttttcatgtctgtaaattagggacattaacacctagggttggtatgacaactaactgagctaagggtatgtgaaacatctaccttggtgtgcaaactccataaatgttaaatgtttgagttagtctaaactgagtctaaatttcttctttgccgcatactagctaagaaatgttaggctagctctttaaagtctcccagccccaatttcttcccttgtaaaataggtataatagtacttacatcacagggttggtgtgaggatgaaattgactcatgtatgtacactgcagctcaaatgtcttctcacaaaggcctttcttgcccaccccctactagcccagcataagtcaccattttcctcactgcgtttattattatctgaagttgtctagttttttattatccatgaggggcatgaaccttgtttgtcttgtttatcgcaccgtcaccagtttctagaatagtgccttacccatagaaaatgcttaataaatatct

SEQ ID NO: 278357 - DNA, 488 bp, Homo sapiens
ctcagcttcggcattccagcctggaacaatcctcccagacctggaggtccgccccctccaaaacttccaccgcctccgccaccacctcctccgccaaatccgccgcctccaccaaagccaccaccaccgcctccagcaccagctcctttaggttctgtagaagaagagacacccgacagactatgccccctggtctggcccagaaatggactggagaagctaaaaaagacactgctggacttgtcacagccgccgggaaacaagaattaagacagtttggaagagtcccattcaaagtgggcggtctagaaaatgaaaattttaaattccacagcagcaacagcagctctcatgtatggagaatctgctggatccagggctctatccttgcgtggtctctgactcctaagacagcggaagccagcatcgctgtgctcatttgatagactcagagaaattaaatcactccctaaaacaccctgaagcaa

SEQ ID NO: 278358 - DNA, 538 bp, Homo sapiens
tgcactgtcagcttgtccacttttgaggtgttggcacttggactgatccaccactggcttcctcgctccccagcttgcagacggcctattgtgggacttcaccttgtgatcagaggccagtttgctattcttagttccagcggaagtggatctgacgtgggcgatcagcaccttcctttaccaatggcttatggaactcacgtccagcacgagagtggatatttgcccaacaaaactcacagtaatactgcagaatatgtacagacaaaaacaagtatgctaatgaaatttcttcaaatactataaacaattagtgaagactgctactataggctgctgctgtatttttaagaggctcaacttcaaatacttcaaccttttatggaaagatggaaacacacaacaaactatgtagatcttgatacaagtctccatcaagttgattcattttcaaaagtaaattacatcctaatctcaaacctgtggcaagacaagtcaaatcatcaaagaatggtaaatccatcaaaacgctaataat

SEQ ID NO: 278359 - DNA, 2932 bp, Homo sapiens
gttatgaataaagcaagggcagaaaaaaacatgtaggggagagaatgaggaactaggtccaggagatgctgaaactgaataataaagacgtcatatcacaccccttggggtatccatctgagagcttgctttccattgccagcatgctggacagcagtgacagctccagtcagccccactggagcaacgagctcatagcggaacagctacagcagcaagtctctcagctgcaggatcagctggatgctgagctggaggacaagagaaaagttttacttgagctgtccagggagaaagcccaaaatgaggatctgaagcttgaagtcaccaacatacttcagaagcataaacaggaagtagagctcctccaaaatgcagccacaatttcccaacctcctgacaggcaatctgaaccagccactcacccagctgtattgcaagagaacactcagatcgagccaagtgaacccaaaaaccaagaagaaaagaaactgtcccaggtgctaaatgagttgcaagtatcacacgcagagaccacattggaactagaaaagaccagggacatgcttattctgcagcgcaaaatcaacgtgtgttatcaggtgcaaggaaagatggtacaggaaggggatggataacaggaacgtgggaaccactcacaggactgggaatgaagcaagacctaagtttccagggctgataccaggaggaactggaggcaatgatgacaaaagctgacaatgataatagagatcacaaagaaaagctggagaggttgactcgactactagacctcaagaataaccgtatcaagcagctggaaggtattttaagaagccatgaccttccaacatctgggtgagaatctttttgaactgcacatccaccaggccttcctgacatctgccgccctagctcaggctggagatacccaacctaccactttctgcacctattccttctatgactttgaaacccactgtaccccattatctgtggggccacagcccctctatgacttcacctcccagtatgtgatggagacagattcgcttttcttacactaccttcaagaggcttcagcccggcttgacatacaccaggccatggccagtgaacacagcactcttgctgcaggatggatttgctttgacagggtgctagagactgtggagaaagtccatggcttggccacactgattggagctggtggagaagagttcggggttctagagtactggatgaggctgcgtttccccataaaacccagcctacaggcgtgcaataaacgaaagaaagcccaggtctacctgtcaaccgatgtgcttggaggccggaaggcccaggaagaggagttcagatcggagtcttgggaacctcagaacgagctgtggattgaaatcaccaagtgctgtggcctccggagtcgatggctgggaactcaacccagtccatatgctgtgtaccgcttcttcaccttttctgaccatgacactgccatcattccagccagtaacaacccctactttagagaccaggctcgattcccagtgcttgtgacctctgacctggaccattatctgagacgggaggccttgtctatacatgtttttgatgatgaagacttagagcctggctcgtatcttggccgagcccgagtgcctttactgcctcttgcaaaaaatgaatctatcaaaggtgattttaacctcactgaccctgcagagaaacccaacggatctattcaagtgcaactggattggaagtttccctacataccccctgagagcttcctgaaaccagaagctcagactaaggggaaggataccaaggacagttcaaagatctcatctgaagaggaaaaggcttcatttccttcccaggatcagatggcatctcctgaggttcccattgaagctggccagtatcgatctaagagaaaacctcctcatgggggagaaagaaaggagaaggagcaccaggttgtgagctactcaagaagaaaacatggcaaaagaataggtgttcaaggaaagaatagaatggagtatcttagccttaacatcttaaatggaaatacaccagagcaggtgaattacactgagtggaagttctcagagactaacagcttcataggtgatggctttaaaaatcagcacgaggaagaggaaatgacattatcccattcagcactgaaacagaaggaacctctacatcctgtaaatgacaaagaatcctctgaacaaggttctgaagtcagtgaagcacaaactaccgacagtgatgatgtcatagtgccacccatgtctcagaaatatcctaaggcagattcagagaagatgtgcattgaaattgtctccctggccttctacccagaggcagaagtgatgtctgatgagaacataaaacaggtgtatgtggagtacaaattctacgacctacccttgtcggagacagagactccagtgtccctaaggaagcctagggcaggagaagaaatccactttcactttagcaaggtaatagacctggacccacaggagcagcaaggccgaaggcggtttctgttcgacatgctgaatggacaagatcctgatcaaggacatttaaagtttacagtggtaagtgatcctctggatgaagaaaagaaagaatgtgaagaagtgggatatgcatatcttcaactgtggcagatcctggagtcaggaagagatattctagagcaagagctagacattgttagccctgaagatctggctaccccaataggaaggctgaaggtttcccttcaagcagctgctgtcctccatgctatttacaaggagatgactgaagatttgttttcatgaaggaacaagtgctattccaatctaaaagtctctgagggaaccatagtaaaaagtctcttataaagttagcttgctataacatg

SEQ ID NO: 278360 - DNA, 2801 bp, Homo sapiens
gttatgaataaagcaagggcagaaaaaaacatgtaggggagagaatgaggaactaggtccaggagatgctgaaactgaataataaagacgtcatatcacaccccttggggtatccatctgagagcttgctttccattgccagcatgctggacagcagtgacagctccagtcagccccactggagcaacgagctcatagcggaacagctacagcagcaagtctctcagctgcaggatcagctggatgctgagctggaggacaagagaaaagttttacttgagctgtccagggagaaagcccaaaatgaggatctgaagcttgaagtcaccaacatacttcagaagcataaacaggaagtagagctcctccaaaatgcagccacaatttcccaacctcctgacaggcaatctgaaccagccactcacccagctgtattgcaagagaacactcagatcgagccaagtgaacccaaaaaccaagaagaaaagaaactgtcccaggtgctaaatgagttgcaagtatcacacgcagagaccacattggaactagaaaagaccagggacatgcttattctgcagcgcaaaatcaacgtgtgttatcaggaggaactggaggcaatgatgacaaaagctgacaatgataatagagatcacaaagaaaagctggagaggttgactcgactactagacctcaagaataaccgtatcaagcagctggaagaaagagctccctaccctttaacggataggcagctttctttcccctctagaacagctcaaagatgttgcttatggcacccgaccgttgtcgttatgtttggaaacactgccagcccatggagatgaggataaagtggatatttctctgctgcatcagcccctctatgacttcacctcccagtatgtgatggagacagattcgcttttcttacactaccttcaagaggcttcagcccggcttgacatacaccaggccatggccagtgaacacagcactcttgctgcaggatggatttgctttgacagggtgctagagactgtggagaaagtccatggcttggccacactgattggagctggtggagaagagttcggggttctagagtactggatgaggctgcgtttccccataaaacccagcctacaggcgtgcaataaacgaaagaaagcccaggtctacctgtcaaccgatgtgcttggaggccggaaggcccaggaagaggagttcagatcggagtcttgggaacctcagaacgagctgtggattgaaatcaccaagtgctgtggcctccggagtcgatggctgggaactcaacccagtccatatgctgtgtaccgcttcttcaccttttctgaccatgacactgccatcattccagccagtaacaacccctactttagagaccaggctcgattcccagtgcttgtgacctctgacctggaccattatctgagacgggaggccttgtctatacatgtttttgatgatgaagacttagagcctggctcgtatcttggccgagcccgagtgcctttactgcctcttgcaaaaaatgaatctatcaaaggtgattttaacctcactgaccctgcagagaaacccaacggatctattcaagtgcaactggattggaagtttccctacataccccctgagagcttcctgaaaccagaagctcagactaaggggaaggataccaaggacagttcaaagatctcatctgaagaggaaaaggcttcatttccttcccaggatcagatggcatctcctgaggttcccattgaagctggccagtatcgatctaagagaaaacctcctcatgggggagaaagaaaggagaaggagcaccaggttgtgagctactcaagaagaaaacatggcaaaagaataggtgttcaaggaaagaatagaatggagtatcttagccttaacatcttaaatggaaatacaccagagcaggtgaattacactgagtggaagttctcagagactaacagcttcataggtgatggctttaaaaatcagcacgaggaagaggaaatgacattatcccattcagcactgaaacagaaggaacctctacatcctgtaaatgacaaagaatcctctgaacaaggttctgaagtcagtgaagcacaaactaccgacagtgatgatgtcatagtgccacccatgtctcagaaatatcctaaggcagattcagagaagatgtgcattgaaattgtctccctggccttctacccagaggcagaagtgatgtctgatgagaacataaaacaggtgtatgtggagtacaaattctacgacctacccttgtcggagacagagactccagtgtccctaaggaagcctagggcaggagaagaaatccactttcactttagcaaggtaatagacctggacccacaggagcagcaaggccgaaggcggtttctgttcgacatgctgaatggacaagatcctgatcaaggacatttaaagtttacagtggtaagtgatcctctggatgaagaaaagaaagaatgtgaagaagtgggatatgcatatcttcaactgtggcagatcctggagtcaggaagagatattctagagcaagagctagacattgttagccctgaagatctggctaccccaataggaaggctgaaggtttcccttcaagcagctgctgtcctccatgctatttacaaggagatgactgaagatttgttttcatgaaggaacaagtgctattccaatctaaaagtctctgagggaaccatagtaaaaagtctcttataaagttagcttgctataacatg

SEQ ID NO: 278361 - DNA, 2935 bp, Homo sapiens
gttatgaataaagcaagggcagaaaaaaacatgtaggggagagaatgaggaactaggtccaggagatgctgaaactgaataataaagacgtcatatcacaccccttggggtatccatctgagagcttgctttccattgccagcatgctggacagcagtgacagctccagtcagccccactggagcaacgagctcatagcggaacagctacagcagcaagtctctcagctgcaggatcagctggatgctgagctggaggacaagagaaaagttttacttgagctgtccagggagaaagcccaaaatgaggatctgaagcttgaagtcaccaacatacttcagaagcataaacaggaagtagagctcctccaaaatgcagccacaatttcccaacctcctgacaggcaatctgaaccagccactcacccagctgtattgcaagagaacactcagatcgagccaagtgaacccaaaaaccaagaagaaaagaaactgtcccaggtgctaaatgagttgcaagtatcacacgcagagaccacattggaactagaaaagaccagggacatgcttattctgcagcgcaaaatcaacgtgtgttatcaggaggaactggaggcaatgatgacaaaagctgacaatgataatagagatcacaaagaaaagctggagaggttgactcgactactagacctcaagaataaccgtatcaagcagctggaaggtattttaagaagccatgaccttccaacatctgaacagctcaaagatgttgcttatggcacccgaccgttgtcgttatgtttggaaacactgccagcccatggagatgaggataaagtggatatttctctgctgcatcagggtgagaatctttttgaactgcacatccaccaggccttcctgacatctgccgccctagctcaggctggagatacccaacctaccactttctgcacctattccttctatgactttgaaacccactgtaccccattatctgtggggccacagcccctctatgacttcacctcccagtatgtgatggagacagattcgcttttcttacactaccttcaagaggcttcagcccggcttgacatacaccaggccatggccagtgaacacagcactcttgctgcaggatggatttgctttgacagggtgctagagactgtggagaaagtccatggcttggccacactgattggagctggtggagaagagttcggggttctagagtactggatgaggctgcgtttccccataaaacccagcctacaggcgtgcaataaacgaaagaaagcccaggtctacctgtcaaccgatgtgcttggaggccggaaggcccaggaagaggagttcagatcggagtcttgggaacctcagaacgagctgtggattgaaatcaccaagtgctgtggcctccggagtcgatggctgggaactcaacccagtccatatgctgtgtaccgcttcttcaccttttctgaccatgacactgccatcattccagccagtaacaacccctactttagagaccaggctcgattcccagtgcttgtgacctctgacctggaccattatctgagacgggaggccttgtctatacatgtttttgatgatgaagacttagagcctggctcgtatcttggccgagcccgagtgcctttactgcctcttgcaaaaaatgaatctatcaaaggtgattttaacctcactgaccctgcagagaaacccaacggatctattcaagtgcaactggattggaagtttccctacataccccctgagagcttcctgaaaccagaagctcagactaaggggaaggataccaaggacagttcaaagatctcatctgaagaggaaaaggcttcatttccttcccaggatcagatggcatctcctgaggttcccattgaagctggccagtatcgatctaagagaaaacctcctcatgggggagaaagaaaggagaaggagcaccaggttgtgagctactcaagaagaaaacatggcaaaagaataggtgttcaaggaaagaatagaatggagtatcttagccttaacatcttaaatggaaatacaccagagcaggtgaattacactgagtggaagttctcagagactaacagcttcataggtgatggctttaaaaatcagcacgaggaagaggaaatgacattatcccattcagcactgaaacagaaggaacctctacatcctgtaaatgacaaagaatcctctgaacaaggttctgaagtcagtgaagcacaaactaccgacagtgatgatgtcatagtgccacccatgtctcagaaatatcctaaggcagattcagagaagatgtgcattgaaattgtctccctggccttctacccagaggcagaagtgatgtctgatgagaacataaaacaggtgtatgtggagtacaaattctacgacctacccttgtcggagacagagactccagtgtccctaaggaagcctagggcaggagaagaaatccactttcactttagcaaggtaatagacctggacccacaggagcagcaaggccgaaggcggtttctgttcgacatgctgaatggacaagatcctgatcaaggacatttaaagtttacagtggtaagtgatcctctggatgaagaaaagaaagaatgtgaagaagtgggatatgcatatcttcaactgtggcagatcctggagtcaggaagagatattctagagcaagagctagacattgttagccctgaagatctggctaccccaataggaaggctgaaggtttcccttcaagcagctgctgtcctccatgctatttacaaggagatgactgaagatttgttttcatgaaggaacaagtgctattccaatctaaaagtctctgagggaaccatagtaaaaagtctcttataaagttagcttgctataacatg

SEQ ID NO: 278362 - DNA, 3117 bp, Homo sapiens
gttatgaataaagcaagggcagaaaaaaacatgtaggggagagaatgaggaactaggtccaggagatgctgaaactgaataataaagacgtcatatcacaccccttggggtatccatctgagagcttgctttccattgccagcatgctggacagcagtgacagctccagtcagccccactggagcaacgagctcatagcggaacagctacagcagcaagtctctcagctgcaggatcagctggatgctgagctggaggacaagagaaaagttttacttgagctgtccagggagaaagcccaaaatgaggatctgaagcttgaagtcaccaacatacttcagaagcataaacaggaagtagagctcctccaaaatgcagccacaatttcccaacctcctgacaggcaatctgaaccagccactcacccagctgtattgcaagagaacactcagatcgagccaagtgaacccaaaaaccaagaagaaaagaaactgtcccaggtgctaaatgagttgcaagtatcacacgcagagaccacattggaactagaaaagaccagggacatgcttattctgcagcgcaaaatcaacgtgtgttatcaggaggaactggaggcaatgatgacaaaagctgacaatgataatagagatcacaaagaaaagctggagaggttgactcgactactagacctcaagaataaccgtatcaagcagctggaaggtattttaagaagccatgaccttccaacatctgaacagctcaaagatgttgcttatggcacccgaccgttgtcgttatgtttggaaacactgccagcccatggagatgaggataaagtggatatttctctgctgcatcagggtgagaatctttttgaactgcacatccaccaggccttcctgacatctgccgccctagctcaggctggagatacccaacctaccactttctgcacctattccttctatgactttgaaacccactgtaccccattatctgtggggccacagcccctctatgacttcacctcccagtatgtgatggagacagattcgcttttcttacactaccttcaagaggcttcagcccggcttgacatacaccaggccatggccagtgaacacagcactcttgctgcaggatggatttgctttgacagggtgctagagactgtggagaaagtccatggcttggccacactgattggagctggtggagaagagttcggggttctagagtactggatgaggctgcgtttccccataaaacccagcctacaggcgtgcaataaacgaaagaaagcccaggtctacctgtcaaccgatgtgcttggaggccggaaggcccaggaagaggagttcagatcggagtcttgggaacctcagaacgagctgtggattgaaatcaccaagtgctgtggcctccggagtcgatggctgggaactcaacccagtccatatgctgtgtaccgcttcttcaccttttctgaccatgacactgccatcattccagccagtaacaacccctactttagagaccaggctcgattcccagtgcttgtgacctctgacctggaccattatctgagacgggaggccttgtctatacatgtttttgatgatgaagacttagagcctggctcgtatcttggccgagcccgagtgcctttactgcctcttgcaaaaaatgaatctatcaaaggtgattttaacctcactgaccctgcagagaaacccaacggatctattcaagtgcaactggattggaagtttccctacataccccctgagagcttcctgaaaccagaagctcagactaaggggaaggataccaaggacagttcaaagatctcatctgaagaggaaaaggcttcatttccttcccaggatcagatggcatctcctgaggttcccattgaagctggccagtatcgatctaagagaaaacctcctcatgggggagaaagaaaggagaaggagcaccaggttgtgagctactcaagaagaaaacatggcaaaagaataggtgttcaaggaaagaatagaatggagtatcttagccttaacatcttaaatggaaatacaccagagcaggtgaattacactgagtggaagttctcagagactaacagcttcataggtgatggctttaaaaatcagcacgaggaagaggaaatgacattatcccattcagcactgaaacagaaggaacctctacatcctgtaaatgacaaagaatcctctgaacaaggttctgaagtcagtgaagcacaaactaccgacagtgatgatgtcatagtgccacccatgtctcagaaatatcctaaggcagattcagagaagatgtgcattgaaattgtctccctggccttctacccagaggcagaagtgatgtctgatgagaacataaaacaggtgtatgtggagtacaaattctacgacctacccttgtcggagacagagactccagtgtccctaaggaagcctagggcaggagaagaaatccactttcactttagcaaggtaatagacctggacccacaggagcagcaaggccgaaggcggtttctgttcgacatgctgaatggacaagatcctgatcaaggacatttaaagtttacagtggtaagtgatcctctggatgaagaaaagaaagaatgtgaagaagtgggatatgcatatcttcaactgtggcagatcctggagtcaggaagagatattctagagcaagagctagacattgttagccctgaagatctggctaccccaataggaaggctgaaggtttcccttcaagcagctgctgtcctccatgctatttacaaggagatgactgaagatttgttttcatgaaggaacaagtgctattccaatctaaaagtctctgagggaaccatagtaaaaagtctcttataaagttagcttgctataacatgaatttggtttactgtgatgtctagtgtctctcaatctaatgatgaaagtttagaatgatgaaagtttcatttgtaaaactagctagctaaaggcatttttctccagtaccttagcactttaccaggcaggaagcaggcttgctttcaagaactgaaaatgaacggtcacaggtgaatttaca

SEQ ID NO: 278363 - DNA, 1045 bp, Homo sapiens
  misc_feature (1)..(1): n is a, c, g, or t
ncatgcatacagcccagtctaacgtacaggatcaaaaagagaccttatttcggctggcaattaccttacccgcttgttcattatctgactcctgcactcctcccaagtgttcaatgttaaccagatggcaaagttaaccagacagaggaaatccacataattactctagatgaagccccctaactgcggattagaaggaaaagagatgaagggtgctgcactaataataacaaccattttcaaccaaggcaggattctgggcctagaatcttcagtgacaaattaccaggagaggaggagggaaatgaagagctggaggcctagggagatggtgtgaggagaggagactgtgcctttccacttcttaataattaatgttctcctgctgctctgagtctgcatcaccagtgattcagtttgagtcagacatccaacaacaactgagcaaaagaatcatctcagatccaagcaatggtgacgcgcagatagaagagactgaggccaacgaccaaagcaaaggacagcagaactgactgacacagctcagaaaatatccaaagctctgtatgctctggaaaggaagacaagaaatgctaaagactctggatattgctctgtttctataaggtcccacccatataccatctcttcttttggatttcctttggcagggttcccttgtatggaagttctcaggagaacaacactctcagagtcccactgtctcaaagaattcttaatggacagctatacttggccccaaggtttcaacctcacactgaagaaagtgacataagaaaacacaagtcccagtgctatcaggggctatctggaaaagctgcttaaacagcaagtgaaagaaggctctcccctaccccgttctagactcaccctgaagttatttgaaggatccttgagactcttttggattgctgcttggagaacattcctgtaacttgtccctgctccttgaactataaaagcagaagggaggtactgagttaaaacttacaaattattatcaaataaatcttcaatagtggtt

SEQ ID NO: 278364 - DNA, 782 bp, Homo sapiens
tctgtcaaaaaaaaaaaaaaaaaaaaaagaaagaaaagaaaatagaatattcctagcaaattagttctaagtagaacaaaaaaaatttaatggagagaatagtacctatattatggtattattcatgaggattaagcaagaatccgtgtaaagcaattagcaaagtacctggcacgtagtagatttttaataaattatatactctgagcacagctatgcctaggttagtcctatcatgttcttgtttctttctttcagagaccttatttcggctggcaattaccttacccgcttgttcattatctgactcctgcactcctcccaagtgttcaatgttaaccagatggcaaagttaaccagacagaggaaatccacataattactctagatgaagccccctaactgcggattagaaggaaaagagatgaagggtgctgcactaataataacaaccattttcaaccaaggcaggattctgggcctagaatcttcagtgacaaattaccaggagaggaggagggaaatgaagagctggaggcctagggagatggtgtgaggagaggagactgtgcctttccacttcttaataattaatgttctcctgctgctctgagtctgcatgtaagtggatttgtgacctctcagctgatgaaaaccatagcacaagaagagtaaaagtgtgctgccttgtttcttacttgctaattagccacctgagcccaggggggtttataagtggcctcaagcccaattactgattttgttcccagaggcagagaagg

SEQ ID NO: 278365 - DNA, 1006 bp, Homo sapiens
ccatgctggcaatacacagggagacttcacttgcctagggcagggtatgcagtctacttgagtacagtggccacacagtggctatcaagactgggctatatatctactagtttgctgcatggcatgtacataggagaggcggagatcggattagtagtattactgcttcagcggtgctgcactaataataacaaccattttcaaccaaggcaggattctgggcctagaatcttcagtgacaaattaccaggagaggaggagggaaatgaagagctggaggcctagggagatggtgtgaggagaggagactgtgcctttccacttcttaataattaatgttctcctgctgctctgagtctgcatcaccagtgattcagtttgagtcagacatccaacaacaactgagcaaaagaatcatctcagatccaagcaatggtgacgcgcagatagaagagactgaggccaacgaccaaagcaaaggacagcagaactgactgacacagctcagaaaatatccaaagctctgtatgctctggaaaggaagacaagaaatgctaaagactctggatattgctctgtttctataaggtcccacccatataccatctcttcttttggatttcctttggcagggttcccttgtatggaagttctcaggagaacaacactctcagagtcccactgtctcaaagaattcttaatggacagctatacttggccccaaggtttcaacctcacactgaagaaagtgacataagaaaacacaagtcccagtgctatcaggggctatctggaaaagctgcttaaacagcaagtgaaagaaggctctcccctaccccgttctagactcaccctgaagttatttgaaggatccttgagactcttttggattgctgcttggagaacattcctgtaacttgtccctgctccttgaactataaaagcagaagggaggtactgagttaaaacttacaaattattatcaaataaatcttcaatagtggtt

SEQ ID NO: 278366 - DNA, 271 bp, Homo sapiens
ttcctgaatggatttcttcactggttcttctgggggatgagagagagaaaccatttacaaagctgaaggagagctaagtccacccctacactggctgagtttctttgtataacaactgttctcccttcctattttcttcaattatctcttctttccccagctatacttggccccaaggtttcaacctcacactgaagaaagtgacataagaaaacacaagtcccagtgctatcaggggctatctggaaaagctgcttaaacagcaagtgaa

SEQ ID NO: 278367 - DNA, 339 bp, Homo sapiens
gctaaataattaaacagaatgtcattccacttatctaggctcttctcattctcttttgatgcagcaccagtgattcagtttgagtcagacatccaacaacaactgagcaaaagaatcatctcagatccaagcaatggtgacgcgcagatagaagagactgaggccaacgaccaaagcaaaggacagcagaactgactgacacagctcagaaaatatccaaagctctgtaagtgaacacacatttattatgtctttaatgttcccaggaaagcttttgtcgtctatctaggtgaaatgatggggcatgtgataatatgtgaagccagaatgccttccatt

SEQ ID NO: 278368 - DNA, 2554 bp, Homo sapiens
gggggcgggcggcggcgaggcggcctgcagggagcagccgcgagccggccgggcgcgccgagcccgagccccagccggagcggggcgggggagggaggagccagagcggccgccgcctctgccggaggagccgcggggccgccacactcgccccccgccccccccgcgctcactcgcactcacacccgggcgcaggaggcgggcggcccgggccccaccggccccccatggacgcccccagcacggggcgctgagacccccgcgtcgctgcccagcccggtccggcgcgccacgccgagggatctctggacaggacaagactccgaagctactcccccagcacacagcccgggacccacaaacccagcttgcccccagccctcccacctgccactccctggcccctcccaccgcccgccccccttggggcgcagggcatggtgtgaaaggccaagtgctgaggcgggtatcatgggtgctgtgccctagggcctgggtggcagggggtgggtggcctgtgggtgtgccgggggggccagtgtgcccaccccagtctcttggcgtgctggagggcatcctggatggaattgaagtgaatggaacagaagccaagcaaggtggagtgtgggtcagacccagaggagaacagtgccaggtcaccagatggaaagcgaaaaagaaagaacggccaatgttccctgaaaaccagcatgtcagggtatatccctagttacctggacaaagacgagcagtgtgtcgtgtgtggggacaaggcaactggttatcactaccgctgtatcacttgtgagggctgcaagggcttctttcgccgcacaatccagaagaacctccatcccacctattcctgcaaatatgacagctgctgtgtcattgacaagatcacccgcaatcagtgccagctgtgccgcttcaagaagtgcatcgccgtgggcatggccatggacttggttctagatgactcgaagcgggtggccaagcgtaagctgattgagcagaaccgggagcggcggcggaaggaggagatgatccgatcactgcagcagcgaccagagcccactcctgaagagtgggatctgatccacattgccacagaggcccatcgcagcaccaatgcccagggcagccattggaaacagaggcggaaattcctgcccgatgacattggccagtcacccattgtctccatgccggacggagacaaggtggacctggaagccttcagcgagtttaccaagatcatcaccccggccatcacccgtgtggtggactttgccaaaaaactgcccatgttctccgagctgccttgcgaagaccagatcatcctcctgaaggggtgctgcatggagatcatgtccctgcgggcggctgtccgctacgaccctgagagcgacaccctgacgctgagtggggagatggctgtcaagcgggagcagctcaagaatggcggcctgggcgtagtctccgacgccatctttgaactgggcaagtcactctctgcctttaacctggatgacacggaagtggctctgctgcaggctgtgctgctaatgtcaacagaccgctcgggcctgctgtgtgtggacaagatcgagaagagtcaggaggcgtacctgctggcgttcgagcactacgtcaaccaccgcaaacacaacattccgcacttctggcccaagctgctgatgaaggagagagaagtgcagagttcgattctgtacaagggggcagcggcagaaggccggccgggcgggtcactgggcgtccacccggaaggacagcagcttctcggaatgcatgttgttcagggtccgcaggtccggcagcttgagcagcagcttggtgaagcgggaagtctccaagggccggttcttcagcaccagagcccgaagagcccgcagcagcgtctcctggagctgctccaccgaagcggaattctccatgcccgagcggtctgtggggaagacgacagcagtgaggcggactccccgagctcctctgaggaggaaccggaggtctgcgaggacctggcaggcaatgcagcctctccctgaagccccccagaaggccgatggggaaggagaaggagtgccataccttctcccaggcctctgccccaagagcaggaggtgcctgaaagctgggagcgtgggctcagcagggctggtcacctcccatcccgtaagaccaccttcccttcctcagcaggccaaacatggccagactcccttgctttttgctgtgtagttccctctgcctgggatgcccttccccctttctctgcctggcaacatcttacttgtcctttgaggccccaactcaagtgtcacctccttccccagctcccccaggcagaaatagttgtctgtgcttccttggttcatgcttctactgtgacacttatctcactgttttataattagtcgggcatgagtctgtttcccaagctagactgtgtctgaatcatgtctgtatccccagtgcccggtgcagggcctggcatagagtaggtactccataaaaggtgtgttgaattgaa

SEQ ID NO: 278369 - DNA, 410 bp, Homo sapiens
tgaggatccgtggggaaatctggtgccatgcgttagaccttgtgcctctctgttcacagtggttctagatgactcgaagcgggtggccaagcgtaagctgattgagcagaaccgggagcggcggcggaaggaggagatgatccgatcactgcagcagcgaccagagcccactcctgaagagtgggatctgatccacattgccacagaggcccatcgcagcaccaatgcccagggcagccattggaaacagaggcggaaattcctggtaaggagaaagggggcatggggagagcagtagccaggtggcagggagaagagagtgagctcggagtcttgcctcctccaggaagtcttcttagtgtaatccaacccaaaatacatactcttcacacttttgctgtccagatttt

SEQ ID NO: 278370 - DNA, 2617 bp, Homo sapiens
attcggcacgaggcctgcgctttgcactattggggcaaaaatgtcttaagcagtggggaacctgccaccccaccctgaccctcagcctgccacagccccctacacacacacacacacacacacacacacacacacacacacggacatgcacacacggacatgggaaggcaatgctatgctgcccgtcagggcactgtccttccccaatcgttcaggtgttccaacaggggtggagggcctggaggagcacccgctgtcacctgtgcatgtgcctgtcccaccggccccccatggacgcccccagcacggggcgctgagacccccgcgtcgctgcccagcccggtccggcgcgccacgccgagggatctctggacaggacaagactccgaagctactcccccagcacacagcccgggacccacaaacccagcttgcccccagccctcccacctgccactccctggcccctcccaccgcccgccccccttggggcgcagggcatggtgtgaaaggccaagtgctgaggcgggtatcatgggtgctgtgccctagggcctgggtggcagggggtgggtggcctgtgggtgtgccgggggggccagtgtgcccaccccagtctcttggcgtgctggagggcatcctggatggaattgaagtgaatggaacagaagccaagcaaggtggagtgtgggtcagacccagaggagaacagtgccaggtcaccagatggaaagcgaaaaagaaagaacggccaatgttccctgaaaaccagcatgtcagggtatatccctagttacctggacaaagacgagcagtgtgtcgtgtgtggggacaaggcaactggttatcactaccgctgtatcacttgtgagggctgcaagggcttctttcgccgcacaatccagaagaacctccatcccacctattcctgcaaatatgacagctgctgtgtcattgacaagatcacccgcaatcagtgccagctgtgccgcttcaagaagtgcatcgccgtgggcatggccatggacttggttctagatgactcgaagcgggtggccaagcgtaagctgattgagcagaaccgggagcggcggcggaaggaggagatgatccgatcactgcagcagcgaccagagcccactcctgaagagtgggatctgatccacattgccacagaggcccatcgcagcaccaatgcccagggcagccattggaaacagaggcggaaattcctgcccgatgacattggccagtcacccattgtctccatgccggacggagacaaggtggacctggaagccttcagcgagtttaccaagatcatcaccccggccatcacccgtgtggtggactttgccaaaaaactgcccatgttctccgagctgccttgcgaagaccagatcatcctcctgaaggggtgctgcatggagatcatgtccctgcgggcggctgtccgctacgaccctgagagcgacaccctgacgctgagtggggagatggctgtcaagcgggagcagctcaagaatggcggcctgggcgtagtctccgacgccatctttgaactgggcaagtcactctctgcctttaacctggatgacacggaagtggctctgctgcaggctgtgctgctaatgtcaacagaccgctcgggcctgctgtgtgtggacaagatcgagaagagtcaggaggcgtacctgctggcgttcgagcactacgtcaaccaccgcaaacacaacattccgcacttctggcccaagctgctgatgaaggagagagaagtgcagagttcgattctgtacaagggggcagcggcagaaggccggccgggcgggtcactgggcgtccacccggaaggacagcagcttctcggaatgcatgttgttcagggtccgcaggtccggcagcttgagcagcagcttggtgaagcgggaagtctccaagggccggttcttcagcaccagagcccgaagagcccgcagcagcgtctcctggagctgctccaccgaagcggaattctccatgcccgagcggtctgtggggaagacgacagcagtgaggcggactccccgagctcctctgaggaggaaccggaggtctgcgaggacctggcaggcaatgcagcctctccctgaagccccccagaaggccgatggggaaggagaaggagtgccataccttctcccaggcctctgccccaagagcaggaggtgcctgaaagctgggagcgtgggctcagcagggctggtcacctcccatcccgtaagaccaccttcccttcctcagcaggccaaacatggccagactcccttgctttttgctgtgtagttccctctgcctgggatgcccttccccctttctctgcctggcaacatcttacttgtcctttgaggccccaactcaagtgtcacctccttccccagctcccccaggcagaaatagttgtctgtgcttccttggttcatgcttctactgtgacacttatctcactgttttataattagtcgggcatgagtctgtttcccaagctagactgtgtctgaatcatgtctgtatccccagtgcccggtgcagggcctggcatagagtaggtactccataaaaggtgtgttgaattgaa

SEQ ID NO: 278371 - DNA, 2416 bp, Homo sapiens
gcccagccctcgcagctgaagcttgaggaagctctgcccccgacagcagtggcgatttgtcaaggtcacacagtgagttaccggcggagaagggacccgaactcccaaacaaactacacctgcaagcgtttggtgtttagactttctccccgatgtataagggatctctggacaggacaagactccgaagctactcccccagcacacagcccgggacccacaaacccagcttgcccccagccctcccacctgccactccctggcccctcccaccgcccgccccccttggggcgcagggcatggtgtgaaaggccaagtgctgaggcgggtatcatgggtgctgtgccctagggcctgggtggcagggggtgggtggcctgtgggtgtgccgggggggccagtgtgcccaccccagtctcttggcgtgctggagggcatcctggatggaattgaagtgaatggaacagaagccaagcaaggtggagtgtgggtcagacccagaggagaacagtgccaggtcaccagatggaaagcgaaaaagaaagaacggccaatgttccctgaaaaccagcatgtcagggtatatccctagttacctggacaaagacgagcagtgtgtcgtgtgtggggacaaggcaactggttatcactaccgctgtatcacttgtgagggctgcaagggcttctttcgccgcacaatccagaagaacctccatcccacctattcctgcaaatatgacagctgctgtgtcattgacaagatcacccgcaatcagtgccagctgtgccgcttcaagaagtgcatcgccgtgggcatggccatggacttggttctagatgactcgaagcgggtggccaagcgtaagctgattgagcagaaccgggagcggcggcggaaggaggagatgatccgatcactgcagcagcgaccagagcccactcctgaagagtgggatctgatccacattgccacagaggcccatcgcagcaccaatgcccagggcagccattggaaacagaggcggaaattcctgcccgatgacattggccagtcacccattgtctccatgccggacggagacaaggtggacctggaagccttcagcgagtttaccaagatcatcaccccggccatcacccgtgtggtggactttgccaaaaaactgcccatgttctccgagctgccttgcgaagaccagatcatcctcctgaaggggtgctgcatggagatcatgtccctgcgggcggctgtccgctacgaccctgagagcgacaccctgacgctgagtggggagatggctgtcaagcgggagcagctcaagaatggcggcctgggcgtagtctccgacgccatctttgaactgggcaagtcactctctgcctttaacctggatgacacggaagtggctctgctgcaggctgtgctgctaatgtcaacagaccgctcgggcctgctgtgtgtggacaagatcgagaagagtcaggaggcgtacctgctggcgttcgagcactacgtcaaccaccgcaaacacaacattccgcacttctggcccaagctgctgatgaaggagagagaagtgcagagttcgattctgtacaagggggcagcggcagaaggccggccgggcgggtcactgggcgtccacccggaaggacagcagcttctcggaatgcatgttgttcagggtccgcaggtccggcagcttgagcagcagcttggtgaagcgggaagtctccaagggccggttcttcagcaccagagcccgaagagcccgcagcagcgtctcctggagctgctccaccgaagcggaattctccatgcccgagcggtctgtggggaagacgacagcagtgaggcggactccccgagctcctctgaggaggaaccggaggtctgcgaggacctggcaggcaatgcagcctctccctgaagccccccagaaggccgatggggaaggagaaggagtgccataccttctcccaggcctctgccccaagagcaggaggtgcctgaaagctgggagcgtgggctcagcagggctggtcacctcccatcccgtaagaccaccttcccttcctcagcaggccaaacatggccagactcccttgctttttgctgtgtagttccctctgcctgggatgcccttccccctttctctgcctggcaacatcttacttgtcctttgaggccccaactcaagtgtcacctccttccccagctcccccaggcagaaatagttgtctgtgcttccttggttcatgcttctactgtgacacttatctcactgttttataattagtcgggcatgagtctgtttcccaagctagactgtgtctgaatcatgtctgtatccccagtgcccggtgcagggcctggcatagagtaggtactccataaaaggtgtgttgaattgaa

SEQ ID NO: 278372 - DNA, 2437 bp, Homo sapiens
gggggcgggcggcggcgaggcggcctgcagggagcagccgcgagccggccgggcgcgccgagcccgagccccagccggagcggggcgggggagggaggagccagagcggccgccgcctctgccggaggagccgcggggccgccacactcgccccccgccccccccgcgctcactcgcactcacacccgggcgcaggaggcgggcggcccgggccccaccggccccccatggacgcccccagcacggggcgctgagacccccgcgtcgctgcccagcccggtccggcgcgccacgccgagggatctctggacaggacaagactccgaagctactcccccagcacacagcccgggacccacaaacccagcttgcccccagccctcccacctgccactccctggcccctcccaccgcccgccccccttggggcgcagggcatggtgtgaaaggccaagtgctgaggcgggtatcatgggtgctgtgccctagggcctgggtggcagggggtgggtggcctgtgggtgtgccgggggggccagtgtgcccaccccagtctcttggcgtgctggagggcatcctggatggaattgaagtgaatggaacagaagccaagcaaggtggagtgtgggtcagacccagaggagaacagtgccaggtcaccagatggaaagcgaaaaagaaagaacggccaatgttccctgaaaaccagcatgtcagggtatatccctagttacctggacaaagacgagcagtgtgtcgtgtgtggggacaaggcaactggttatcactaccgctgtatcacttgtgagggctgcaagggcttctttcgccgcacaatccagaagaacctccatcccacctattcctgcaaatatgacagctgctgtgtcattgacaagatcacccgcaatcagtgccagctgtgccgcttcaagaagtgcatcgccgtgggcatggccatggacttggttctagatgactcgaagcgggtggccaagcgtaagctgattgagcagaaccgggagcggcggcggaaggaggagatgatccgatcactgcagcagcgaccagagcccactcctgaagagtgggatctgatccacattgccacagaggcccatcgcagcaccaatgcccagggcagccattggaaacagaggcggaaattcctgcccgatgacattggccagtcacccattgtctccatgccggacggagacaaggtggacctggaagccttcagcgagtttaccaagatcatcaccccggccatcacccgtgtggtggactttgccaaaaaactgcccatgttctccgagctgccttgcgaagaccagatcatcctcctgaaggggtgctgcatggagatcatgtccctgcgggcggctgtccgctacgaccctgagagcgacaccctgacgctgagtggggagatggctgtcaagcgggagcagctcaagaatggcggcctgggcgtagtctccgacgccatctttgaactgggcaagtcactctctgcctttaacctggatgacacggaagtggctctgctgcaggctgtgctgctaatgtcaacagaccgctcgggcctgctgtgtgtggacaagatcgagaagagtcaggaggcgtacctgctggcgttcgagcactacgtcaaccaccgcaaacacaacattccgcacttctggcccaagctgctgatgaagggtccgcaggtccggcagcttgagcagcagcttggtgaagcgggaagtctccaagggccggttcttcagcaccagagcccgaagagcccgcagcagcgtctcctggagctgctccaccgaagcggaattctccatgcccgagcggtctgtggggaagacgacagcagtgaggcggactccccgagctcctctgaggaggaaccggaggtctgcgaggacctggcaggcaatgcagcctctccctgaagccccccagaaggccgatggggaaggagaaggagtgccataccttctcccaggcctctgccccaagagcaggaggtgcctgaaagctgggagcgtgggctcagcagggctggtcacctcccatcccgtaagaccaccttcccttcctcagcaggccaaacatggccagactcccttgctttttgctgtgtagttccctctgcctgggatgcccttccccctttctctgcctggcaacatcttacttgtcctttgaggccccaactcaagtgtcacctccttccccagctcccccaggcagaaatagttgtctgtgcttccttggttcatgcttctactgtgacacttatctcactgttttataattagtcgggcatgagtctgtttcccaagctagactgtgtctgaatcatgtctgtatccccagtgcccggtgcagggcctggcatagagtaggtactccataaaaggtgtgttgaattgaa

SEQ ID NO: 278373 - DNA, 1619 bp, Homo sapiens
ggacgcgtgggcgtgggcatggccatggacttggttctagatgactcgaagcgggtggccaagcgtaagctgattgagcagaaccgggagcggcggcggaaggaggagatgatccgatcactgcagcagcgaccagagcccactcctgaagagtgggatctgatccacattgccacagaggcccatcgcagcaccaatgcccagggcagccattggaaacagaggcggaaattcctgcccgatgacattggccagtcacccattgtctccatgccggacggagacaaggtggacctggaagccttcagcgagtttaccaagatcatcaccccggccatcacccgtgtggtggactttgccaaaaaactgcccatgttctccgagctgccttgcgaagaccagatcatcctcctgaaggggtgctgcatggagatcatgtccctgcgggcggctgtccgctacgaccctgagagcgacaccctgacgctgagtggggagatggctgtcaagcgggagcagctcaagaatggcggcctgggcgtagtctccgacgccatctttgaactgggcaagtcactctctgcctttaacctggatgacacggaagtggctctgctgcaggctgtgctgctaatgtcaacagaccgctcgggcctgctgtgtgtggacaagatcgagaagagtcaggaggcgtacctgctggcgttcgagcactacgtcaaccaccgcaaacacaacattccgcacttctggcccaagctgctgatgaaggagagagaagtgcagagttcgattctgtacaagggggcagcggcagaaggccggccgggcgggtcactgggcgtccacccggaaggacagcagcttctcggaatgcatgttgttcagggtccgcaggtccggcagcttgagcagcagcttggtgaagcgggaagtctccaagggccggttcttcagcaccagagcccgaagagcccgcagcagcgtctcctggagctgctccaccgaagcggaattctccatgcccgagcggtctgtggggaagacgacagcagtgaggcggactccccgagctcctctgaggaggaaccggaggtctgcgaggacctggcaggcaatgcagcctctccctgaagccccccagaaggccgatggggaaggagaaggagtgccataccttctcccaggcctctgccccaagagcaggaggtgcctgaaagctgggagcgtgggctcagcagggctggtcacctcccatcccgtaagaccaccttcccttcctcagcaggccaaacatggccagactcccttgctttttgctgtgtagttccctctgcctgggatgcccttccccctttctctgcctggcaacatcttacttgtcctttgaggccccaactcaagtgtcacctccttccccagctcccccaggcagaaatagttgtctgtgcttccttggttcatgcttctactgtgacacttatctcactgttttataattagtcgggcatgagtctgtttcccaagctagactgtgtctgaatcatgtctgtatccccagtgcccggtgcagggcctggcatagagtaggtactccataaaaggtgtgttgaattgaa

SEQ ID NO: 278374 - DNA, 2406 bp, Homo sapiens
gggggcgggcggcggcgaggcggcctgcagggagcagccgcgagccggccgggcgcgccgagcccgagccccagccggagcggggcgggggagggaggagccagagcggccgccgcctctgccggaggagccgcggggccgccacactcgccccccgccccccccgcgctcactcgcactcacacccgggcgcaggaggcgggcggcccgggccccaccggccccccatggacgcccccagcacggggcgctgagacccccgcgtcgctgcccagcccggtccggcgcgccacgccgagggatctctggacaggacaagactccgaagctactcccccagcacacagcccgggacccacaaacccagcttgcccccagccctcccacctgccactccctggcccctcccaccgcccgccccccttggggcgcagggcatggtgtgaaaggccaagtgctgaggcgggtatcatgggtgctgtgccctagggcctgggtggcagggggtgggtggcctgtgggtgtgccgggggggccagtgtgcccaccccagtctcttggcgtgctggagggcatcctggatggaattgaagtgaatggaacagaagccaagcaaggtggagtgtgggtcagacccagaggagaacagtgccaggtcaccagatggaaagcgaaaaagaaagaacggccaatgttccctgaaaaccagcatgtcagggtatatccctagttacctggacaaagacgagcagtgtgtcgtgtgtggggacaaggcaactggttatcactaccgctgtatcacttgtgagggctgcaagggcttctttcgccgcacaatccagaagaacctccatcccacctattcctgcaaatatgacagctgctgtgtcattgacaagatcacccgcaatcagtgccagctgtgccgcttcaagaagtgcatcgccgtgggcatggccatggacttggttctagatgactcgaagcgggtggccaagcgtaagctgattgagcagaaccgggagcggcggcggaaggaggagatgatccgatcactgcagcagcgaccagagcccactcctgaagagtgggatctgatccacattgccacagaggcccatcgcagcaccaatgcccagggcagccattggaaacagaggcggaaattcctgcccgatgacattggccagtcacccattgtctccatgccggacggagacaaggtggacctggaagccttcagcgagtttaccaagatcatcaccccggccatcacccgtgtggtggactttgccaaaaaactgcccatgttctccgagctgccttgcgaagaccagatcatcctcctgaaggggtgctgcatggagatcatgtccctgcgggcggctgtccgctacgaccctgagagcgacaccctgacgctgagtggggagatggctgtcaagcgggagcagctcaagaatggcggcctgggcgtagtctccgacgccatctttgaactgggcaagtcactctctgcctttaacctggatgacacggaagtggctctgctgcaggctgtgctgctaatgtcaacagaccgctcgggcctgctgtgtgtggacaagatcgagaagagtcaggaggcgtacctgctggcgttcgagcactacgtcaaccaccgcaaacacaacattccgcacttctggcccaagctgctgatgaaggtgactgacctccgcatgatcggggcctgccacgccagccgcttcctccacatgaaagtcgagtgccccaccgaactcttccccccactcttcctcgaggtctttgaggatcaggaagtctaaagcctcaggcggccagagggtgtgcggagctggtggggaggagcctggagagaaggggcagagctgggggctgagggagacccccccacaccccttctctccttcctctcgtccttggatagattcagctcccacacacacacccgcactgcccaggtccctcctcagacctccagccctgggacagggcaaacaactgaacttgctatggaaaggacagtgtgggaggctgggggagctgtgtcctgcagttcccaggaccccatcctctcagaaggtaggggaagggcgggaggattgagaagggacaagccaccttgaccgtaggggaaggaggaatgtgggctgggggaagatgccctcaactcaccccctacacacacatgagagagagcccccacccagttccttggcctaggtctcccctccaggctgagggcctctctacttccccagatgcctgggtgcaaagaacggcttggcttggctcctcctctggaggttaaaatttatagtcattctaactgcactttggaaaccaagcaaggggagaagtgcgcctgatgcgggagcctct

SEQ ID NO: 278375 - DNA, 1774 bp, Homo sapiens
gggggcgggcggcggcgaggcggcctgcagggagcagccgcgagccggccgggcgcgccgagcccgagccccagccggagcggggcgggggagggaggagccagagcggccgccgcctctgccggaggagccgcggggccgccacactcgccccccgccccccccgcgctcactcgcactcacacccgggcgcaggaggcgggcggcccgggccccaccggccccccatggacgcccccagcacggggcgctgagacccccgcgtcgctgcccagcccggtccggcgcgccacgccgagggatctctggacaggacaagactccgaagctactcccccagcacacagcccgggacccacaaacccagcttgcccccagccctcccacctgccactccctggcccctcccaccgcccgccccccttggggcgcagggcatggtgtgaaaggccaagtgctgaggcgggtatcatgggtgctgtgccctagggcctgggtggcagggggtgggtggcctgtgggtgtgccgggggggccagtgtgcccaccccagtctcttggcgtgctggagggcatcctggatggaattgaagtgaatggaacagaagccaagcaaggtggagtgtgggtcagacccagaggagaacagtgccaggtcaccagatggaaagcgaaaaagaaagaacggccaatgttccctgaaaaccagcatgtcagggtatatccctagttacctggacaaagacgagcagtgtgtcgtgtgtggggacaaggcaactggttatcactaccgctgtatcacttgtgagggctgcaagggcttctttcgccgcacaatccagaagaacctccatcccacctattcctgcaaatatgacagctgctgtgtcattgacaagatcacccgcaatcagtgccagctgtgccgcttcaagaagtgcatcgccgtgggcatggccatggacttggttctagatgactcgaagcgggtggccaagcgtaagctgattgagcagaaccgggagcggcggcggaaggaggagatgatccgatcactgcagcagcgaccagagcccactcctgaagagtgggatctgatccacattgccacagaggcccatcgcagcaccaatgcccagggcagccattggaaacagaggcggaaattcctgcccgatgacattggccagtcacccattgtctccatgccggacggagacaaggtggacctggaagccttcagcgagtttaccaagatcatcaccccggccatcacccgtgtggtggactttgccaaaaaactgcccatgttctccgagctgccttgcgaagaccagatcatcctcctgaaggggtgctgcatggagatcatgtccctgcgggcggctgtccgctacgaccctgagagcgacaccctgacgctgagtggggagatggctgtcaagcgggagcagctcaagaatggcggcctgggcgtagtctccgacgccatctttgaactgggcaagtcactctctgcctggcaacatcttacttgtcctttgaggccccaactcaagtgtcacctccttccccagctcccccaggcagaaatagttgtctgtgcttccttggttcatgcttctactgtgacacttatctcactgttttataattagtcgggcatgagtctgtttcccaagctagactgtgtctgaatcatgtctgtatccccagtgcccggtgcagggcctggcatagagtaggtactccataaaaggtgtgttgaattgaa

SEQ ID NO: 278376 - DNA, 1687 bp, Homo sapiens
gggggcgggcggcggcgaggcggcctgcagggagcagccgcgagccggccgggcgcgccgagcccgagccccagccggagcggggcgggggagggaggagccagagcggccgccgcctctgccggaggagccgcggggccgccacactcgccccccgccccccccgcgctcactcgcactcacacccgggcgcaggaggcgggcggcccgggccccaccggccccccatggacgcccccagcacggggcgctgagacccccgcgtcgctgcccagcccggtccggcgcgccacgccgagggatctctggacaggacaagactccgaagctactcccccagcacacagcccgggacccacaaacccagcttgcccccagccctcccacctgccactccctggcccctcccaccgcccgccccccttggggcgcagggcatggtgtgaaaggccaagtgctgaggcgggtatcatgggtgctgtgccctagggcctgggtggcagggggtgggtggcctgtgggtgtgccgggggggccagtgtgcccaccccagtctcttggcgtgctggagggcatcctggatggaattgaagtgaatggaacagaagccaagcaaggtggagtgtgggtcagacccagaggagaacagtgccaggtcaccagatggaaagcgaaaaagaaagaacggccaatgttccctgaaaaccagcatgtcagggtatatccctagttacctggacaaagacgagcagtgtgtcgtgtgtggggacaaggcaactggttatcactaccgctgtatcacttgtgagggctgcaagggcttctttcgccgcacaatccagaagaacctccatcccacctattcctgcaaatatgacagctgctgtgtcattgacaagatcacccgcaatcagtgccagctgtgccgcttcaagaagtgcatcgccgtgggcatggccatggacttggttctagatgactcgaagcgggtggccaagcgtaagctgattgagcagaaccgggagcggcggcggaaggaggagatgatccgatcactgcagcagcgaccagagcccactcctgaagagtgggatctgatccacattgccacagaggcccatcgcagcaccaatgcccagggcagccattggaaacagaggcggaaattcctgcccgatgacattggccagtcacccattgtctccatgccggacggagacaaggtggacctggaagccttcagcgagtttaccaagatcatcaccccggccatcacccgtgtggtggactttgccaaaaaactgcccatgttctccgagctcccatcccgtaagaccaccttcccttcctcagcaggccaaacatggccagactcccttgctttttgctgtgtagttccctctgcctgggatgcccttccccctttctctgcctggcaacatcttacttgtcctttgaggccccaactcaagtgtcacctccttccccagctcccccaggcagaaatagttgtctgtgcttccttggttcatgcttctactgtgacacttatctcactgttttataattagtcgggcatgagtctgtttcccaagctagactgtgtctgaatcatgtctgtatccccagtgcccggtgcagggcctggcatagagtaggtactccataaaaggtgtgttgaattgaa

SEQ ID NO: 278377 - DNA, 1160 bp, Homo sapiens
  misc_feature (1122)..(1122): n is a, c, g, or t
gggggcgggcggcggcgaggcggcctgcagggagcagccgcgagccggccgggcgcgccgagcccgagccccagccggagcggggcgggggagggaggagccagagcggccgccgcctctgccggaggagccgcggggccgccacactcgccccccgccccccccgcgctcactcgcactcacacccgggcgcaggaggcgggcggcccgggccccaccggccccccatggacgcccccagcacggggcgctgagacccccgcgtcgctgcccagcccggtccggcgcgccacgccgagggatctctggacaggacaagactccgaagctactcccccagcacacagcccgggacccacaaacccagcttgcccccagccctcccacctgccactccctggcccctcccaccgcccgccccccttggggcgcagggcatggtgtgaaaggccaagtgctgaggcgggtatcatgggtgctgtgccctagggcctgggtggcagggggtgggtggcctgtgggtgtgccgggggggccagtgtgcccaccccagtctcttggcgtgctggagggcatcctggatggaattgaagtgaatggaacagaagccaagcaaggtggagtgtgggtcagacccagaggagaacagtgccaggtcaccagatggaaagcgaaaaagaaagaacggccaatgttccctgaaaaccagcatgtcagggtatatccctagttacctggacaaagacgagcagtgtgtcgtgtgtggggacaaggcaactggttatcactaccgctgtatcacttgtgagggctgcaagggcttctttcgccgcacaatccagaagaacctccatcccacctattcctgcaaatatgacagctgctgtgtcattgacaagatcacccgcaatcagtgccagctgtgccgcttcaagaagtgcatcgccgtgggcatggccatggacttggttctagatgactcgaagcgggtggccaagcgtaagctgattgagcagaaccgggagcggcggcggaaggaggagatgatccgatcactgcagcagcgaccagagcccactcctgaagagtgggatctgataaaaattgaaaaagaggaaaatngaagaaaaaatgaaaagggaagaaattggaaaaagagg

SEQ ID NO: 278378 - DNA, 557 bp, Homo sapiens
agagagcgagcgatagagagagatgatattaagttattaactgaggctgaccagaggggaggaccccccctttaccaccccatgcactttgcgagctgccccttcttcccccacatcagagagaaatgcccccacaccagagccccaagggtagggctgccgatcagagctgtgagttaacacaacagggtcctggccaccccccttgccataccccgccctctgtgcccctttggcaccccccaaccctagtatgtcctctgctttctgccactcgtgcccgctgagttccatctacctctcatgctggatgccagctggcccctcaccagcctgccctgctgcccacacagctcccctttaagtgcccagccctaggggcctctccccatccacctcctccttccacaccttggcacccacccaggaaaaaactgtggctccaactcctaccctccttatatcctgcagtattagctagaaaccggatgctgctgcattggttgggtcgggggtaggagggctgtgcgtgagcgtctcccagaaccctccacccc

SEQ ID NO: 278379 - DNA, 3040 bp, Homo sapiens
attcggcacgaggcctgcgctttgcactattggggcaaaaatgtcttaagcagtggggaacctgccaccccaccctgaccctcagcctgccacagccccctacacacacacacacacacacacacacacacacacacacacggacatgcacacacggacatgggaaggcaatgctatgctgcccgtcagggcactgtccttccccaatcgttcaggtgttccaacaggggtggagggcctggaggagcacccgctgtcacctgtgcatgtgcctgtcccaccggccccccatggacgcccccagcacggggcgctgagacccccgcgtcgctgcccagcccggtccggcgcgccacgccgagggatctctggacaggacaagactccgaagctactcccccagcacacagcccgggacccacaaacccagcttgcccccagccctcccacctgccactccctggcccctcccaccgcccgccccccttggggcgcagggcatggtgtgaaaggccaagtgctgaggcgggtatcatgggtgctgtgccctagggcctgggtggcagggggtgggtggcctgtgggtgtgccgggggggccagtgtgcccaccccagtctcttggcgtgctggagggcatcctggatggaattgaagtgaatggaacagaagccaagcaaggtggagtgtgggtcagacccagaggagaacagtgccaggtcaccagatggaaagcgaaaaagaaagaacggccaatgttccctgaaaaccagcatgtcagggtatatccctagttacctggacaaagacgagcagtgtgtcgtgtgtggggacaaggcaactggttatcactaccgctgtatcacttgtgagggctgcaagggcttctttcgccgcacaatccagaagaacctccatcccacctattcctgcaaatatgacagctgctgtgtcattgacaagatcacccgcaatcagtgccagctgtgccgcttcaagaagtgcatcgccgtgggcatggccatggacttggttctagatgactcgaagcgggtggccaagcgtaagctgattgagcagaaccgggagcggcggcggaaggaggagatgatccgatcactgcagcagcgaccagagcccactcctgaagagtgggatctgatccacattgccacagaggcccatcgcagcaccaatgcccagggcagccattggaaacagaggcggaaattcctgcccgatgacattggccagtcacccattgtctccatgccggacggagacaaggtggacctggaagccttcagcgagtttaccaagatcatcaccccggccatcacccgtgtggtggactttgccaaaaaactgcccatgttctccgagctgccttgcgaagaccagatcatcctcctgaaggggtgctgcatggagatcatgtccctgcgggcggctgtccgctacgaccctgagagcgacaccctgacgctgagtggggagatggctgtcaagcgggagcagctcaagaatggcggcctgggcgtagtctccgacgccatctttgaactgggcaagtcactctctgcctttaacctggatgacacggaagtggctctgctgcaggctgtgctgctaatgtcaacagaccgctcgggcctgctgtgtgtggacaagatcgagaagagtcaggaggcgtacctgctggcgttcgagcactacgtcaaccaccgcaaacacaacattccgcacttctggcccaagctgctgatgaaggtgactgacctccgcatgatcggggcctgccacgccagccgcttcctccacatgaaagtcgagtgccccaccgaactcttccccccactcttcctcgaggtctttgaggatcaggaagtctaaagcctcaggcggccagagggtgtgcggagctggtggggaggagcctggagagaaggggcagagctgggggctgagggagacccccccacaccccttctctccttcctctcgtccttggatagattcagctcccacacacacacccgcactgcccaggtccctcctcagacctccagccctgggacagggcaaacaactgaacttgctatggaaaggacagtgtgggaggctgggggagctgtgtcctgcagttcccaggaccccatcctctcagaaggtaggggaagggcgggaggattgagaagggacaagccaccttgaccgtaggggaaggaggaatgtgggctgggggaagatgccctcaactcaccccctacacacacatgagagagagcccccacccagttccttggcctaggtctcccctccaggctgagggcctctctacttccccagatgcctgggtgcaaagaacggcttggcttggctcctcctctggaggttaaaatttatagtcattctaactgcatttgcgagctgccccttcttcccccacatcagagagaaatgcccccacaccagagccccaagggtagggctgccgatcagagctgtgagttaacacaacagggtcctggccaccccccttgccataccccgccctctgtgcccctttggcaccccccaaccctagtatgtcctctgctttctgccactcgtgcccgctgagttccatctacctctcatgctggatgccagctggcccctcaccagcctgccctgctgcccacacagctcccctttaagtgcccagccctaggggcctctccccatccacctcctccttccacaccttggcacccacccaggaaaaaactagacagagagaaaaatacaaaaaagagagagcgagcgatagagagagatgatattaagttattaactgaggctgaccagaggggaggaccccccctttaccaccccatgcactttgcgagctgccccttcttcccctcgagtttttttttttttttttttggagtcaaattttcaactgtgcatttattggcctgggcttagacatattaaaaagcaacacttactgagaacataacataaccagacatttctgccaggtgctgttaggt

SEQ ID NO: 278380 - DNA, 2659 bp, Homo sapiens
gggggcgggcggcggcgaggcggcctgcagggagcagccgcgagccggccgggcgcgccgagcccgagccccagccggagcggggcgggggagggaggagccagagcggccgccgcctctgccggaggagccgcggggccgccacactcgccccccgccccccccgcgctcactcgcactcacacccgggcgcaggaggcgggcggcccgggccccaccggccccccatggacgcccccagcacggggcgctgagacccccgcgtcgctgcccagcccggtccggcgcgccacgccgagggatctctggacaggacaagactccgaagctactcccccagcacacagcccgggacccacaaacccagcttgcccccagccctcccacctgccactccctggcccctcccaccgcccgccccccttggggcgcagggcatggtgtgaaaggccaagtgctgaggcgggtatcatgggtgctgtgccctagggcctgggtggcagggggtgggtggcctgtgggtgtgccgggggggccagtgtgcccaccccagtctcttggcgtgctggagggcatcctggatggaattgaagtgaatggaacagaagccaagcaaggtggagtgtgggtcagacccagaggagaacagtgccaggtcaccagatggaaagcgaaaaagaaagaacggccaatgttccctgaaaaccagcatgtcagggtatatccctagttacctggacaaagacgagcagtgtgtcgtgtgtggggacaaggcaactggttatcactaccgctgtatcacttgtgagggctgcaagggcttctttcgccgcacaatccagaagaacctccatcccacctattcctgcaaatatgacagctgctgtgtcattgacaagatcacccgcaatcagtgccagctgtgccgcttcaagaagtgcatcgccgtgggcatggccatggacttggttctagatgactcgaagcgggtggccaagcgtaagctgattgagcagaaccgggagcggcggcggaaggaggagatgatccgatcactgcagcagcgaccagagcccactcctgaagagtgggatctgatccacattgccacagaggcccatcgcagcaccaatgcccagggcagccattggaaacagaggcggaaattcctgcccgatgacattggccagtcacccattgtctccatgccggacggagacaaggtggacctggaagccttcagcgagtttaccaagatcatcaccccggccatcacccgtgtggtggactttgccaaaaaactgcccatgttctccgagctgccttgcgaagaccagatcatcctcctgaaggggtgctgcatggagatcatgtccctgcgggcggctgtccgctacgaccctgagagcgacaccctgacgctgagtggggagatggctgtcaagcgggagcagctcaagaatggcggcctgggcgtagtctccgacgccatctttgaactgggcaagtcactctctgcctttaacctggatgacacggaagtggctctgctgcaggctgtgctgctaatgtcaacagaccgctcgggcctgctgtgtgtggacaagatcgagaagagtcaggaggcgtacctgctggcgttcgagcactacgtcaaccaccgcaaacacaacattccgcacttctggcccaagctgctgatgaaggagagagaagtgcagagttcgattctgtacaagggggcagcggcagaaggccggccgggcgggtcactgggcgtccacccggaaggacagcagcttctcggaatgcatgttgttcagggtccgcaggtccggcagcttgagcagcagcttggtgaagcgggaagtctccaagggccggttcttcagcaccagagcccgaagagcccgcagcagcgtctcctggagctgctccaccgaagcggaattctccatgcccgagcggtctgtggggaagacgacagcagtgaggcggactccccgagctcctctgaggaggaaccggaggtctgcgaggacctggcaggcaatgcagcctctccctgaagccccccagaaggccgatggggaaggagaaggagtgccataccttctcccaggcctctgccccaagagcaggaggtgcctgaaagctgggagcgtgggctcagcagggctggtcacctcccatcccgtaagaccaccttcccttcctcagcaggccaaacatggccagactcccttgctttttgctgtgtagttccctctgcctgggatgcccttccccctttctctgcctggcaacatcttacttgtcctttgaggccccaactcaagtgtcacctccttccccagctcccccaggcagaaatagttgtctgtgcttccttggttcatgcttctactgtgacacttatctcactgttttataattagtcgggcatgagtctgtttcccaagctagactgtgtctgaatcatgtctgtatccccagtgcccggtgcagggcctggcatagagtaggtactccataaaaggtgtgttgaattgaaaaaaaaaaaaacacaggggggcggttaaaataccgggggccaaggtaggatacgttttggcaaggggcccaagggagcgaaaaagagaggggcgtaaaggggtga

SEQ ID NO: 278381 - DNA, 2378 bp, Homo sapiens
cacgtccccaaccccaccaaacccagccagggctcctctggacctggatgtggaacagtaattcatgtgttccctggggggagcctcctagagggcttgggatggacttgtctgggggtgagaaaggtaatgtgggatgtgcccagcttttgagggtggattaggtcaggacggcctcttccctcttcccctaataccctcatctgaggccctaccagaatcagggcctgagctgaaggactgaggggctgtattatccccagtgagcagctgacgtttatttttccctctccaccatcctctgccttgtagatagatcaagaagaaagccctgaatgggcagtcagaagaactgagattcttcatactcttagggcagagatggacaggttcacctcgtgtctctctaggattctaccagggaggctgggctaggagaggggtcagaaacaaaaagttgagggatggggaaaagtgtgagagcctctctgctgggactccaagccatgcctgccttcctccatcctttccttcctcccagggtatatccctagttacctggacaaagacgagcagtgtgtcgtgtgtggggacaaggcaactggttatcactaccgctgtatcacttgtgagggctgcaagggcttctttcgccgcacaatccagaagaacctccatcccacctattcctgcaaatatgacagctgctgtgtcattgacaagatcacccgcaatcagtgccagctgtgccgcttcaagaagtgcatcgccgtgggcatggccatggacttggttctagatgactcgaagcgggtggccaagcgtaagctgattgagcagaaccgggagcggcggcggaaggaggagatgatccgatcactgcagcagcgaccagagcccactcctgaagagtgggatctgatccacattgccacagaggcccatcgcagcaccaatgcccagggcagccattggaaacagaggcggaaattcctgcccgatgacattggccagtcacccattgtctccatgccggacggagacaaggtggacctggaagccttcagcgagtttaccaagatcatcaccccggccatcacccgtgtggtggactttgccaaaaaactgcccatgttctccgagctgccttgcgaagaccagatcatcctcctgaaggggtgctgcatggagatcatgtccctgcgggcggctgtccgctacgaccctgagagcgacaccctgacgctgagtggggagatggctgtcaagcgggagcagctcaagaatggcggcctgggcgtagtctccgacgccatctttgaactgggcaagtcactctctgcctttaacctggatgacacggaagtggctctgctgcaggctgtgctgctaatgtcaacagaccgctcgggcctgctgtgtgtggacaagatcgagaagagtcaggaggcgtacctgctggcgttcgagcactacgtcaaccaccgcaaacacaacattccgcacttctggcccaagctgctgatgaaggagagagaagtgcagagttcgattctgtacaagggggcagcggcagaaggccggccgggcgggtcactgggcgtccacccggaaggacagcagcttctcggaatgcatgttgttcagggtccgcaggtccggcagcttgagcagcagcttggtgaagcgggaagtctccaagggccggttcttcagcaccagagcccgaagagcccgcagcagcgtctcctggagctgctccaccgaagcggaattctccatgcccgagcggtctgtggggaagacgacagcagtgaggcggactccccgagctcctctgaggaggaaccggaggtctgcgaggacctggcaggcaatgcagcctctccctgaagccccccagaaggccgatggggaaggagaaggagtgccataccttctcccaggcctctgccccaagagcaggaggtgcctgaaagctgggagcgtgggctcagcagggctggtcacctcccatcccgtaagaccaccttcccttcctcagcaggccaaacatggccagactcccttgctttttgctgtgtagttccctctgcctgggatgcccttccccctttctctgcctggcaacatcttacttgtcctttgaggccccaactcaagtgtcacctccttccccagctcccccaggcagaaatagttgtctgtgcttccttggttcatgcttctactgtgacacttatctcactgttttataattagtcgggcatgagtctgtttcccaagctagactgtgtctgaatcatgtctgtatccccagtgcccggtgcagggcctggcatagagtaggtactccataaaaggtgtgttgaattgaa

SEQ ID NO: 278382 - DNA, 3132 bp, Homo sapiens
gggggcgggcggcggcgaggcggcctgcagggagcagccgcgagccggccgggcgcgccgagcccgagccccagccggagcggggcgggggagggaggagccagagcggccgccgcctctgccggaggagccgcggggccgccacactcgccccccgccccccccgcgctcactcgcactcacacccgggcgcaggaggcgggcggcccgggccccaccggccccccatggacgcccccagcacggggcgctgagacccccgcgtcgctgcccagcccggtccggcgcgccacgccgagggatctctggacaggacaagactccgaagctactcccccagcacacagcccgggacccacaaacccagcttgcccccagccctcccacctgccactccctggcccctcccaccgcccgccccccttggggcgcagggcatggtgtgaaaggccaagtgctgaggcgggtatcatgggtgctgtgccctagggcctgggtggcagggggtgggtggcctgtgggtgtgccgggggggccagtgtgcccaccccagtctcttggcgtgctggagggcatcctggatggaattgaagtgaatggaacagaagccaagcaaggtggagtgtgggtcagacccagaggagaacagtgccaggtcaccagatggaaagcgaaaaagaaagaacggccaatgttccctgaaaaccagcatgtcagggtatatccctagttacctggacaaagacgagcagtgtgtcgtgtgtggggacaaggcaactggttatcactaccgctgtatcacttgtgagggctgcaagggcttctttcgccgcacaatccagaagaacctccatcccacctattcctgcaaatatgacagctgctgtgtcattgacaagatcacccgcaatcagtgccagctgtgccgcttcaagaagtgcatcgccgtgggcatggccatggacttggttctagatgactcgaagcgggtggccaagcgtaagctgattgagcagaaccgggagcggcggcggaaggaggagatgatccgatcactgcagcagcgaccagagcccactcctgaagagtgggatctgatccacattgccacagaggcccatcgcagcaccaatgcccagggcagccattggaaacagaggcggaaattcctgcccgatgacattggccagtcacccattgtctccatgccggacggagacaaggtggacctggaagccttcagcgagtttaccaagatcatcaccccggccatcacccgtgtggtggactttgccaaaaaactgcccatgttctccgagctgccttgcgaagaccagatcatcctcctgaaggggtgctgcatggagatcatgtccctgcgggcggctgtccgctacgaccctgagagcgacaccctgacgctgagtggggagatggctgtcaagcgggagcagctcaagaatggcggcctgggcgtagtctccgacgccatctttgaactgggcaagtcactctctgcctttaacctggatgacacggaagtggctctgctgcaggctgtgctgctaatgtcaacagaccgctcgggcctgctgtgtgtggacaagatcgagaagagtcaggaggcgtacctgctggcgttcgagcactacgtcaaccaccgcaaacacaacattccgcacttctggcccaagctgctgatgaaggtgactgacctccgcatgatcggggcctgccacgccagccgcttcctccacatgaaagtcgagtgccccaccgaactcttccccccactcttcctcgaggtctttgaggatcaggaagtctaaagcctcaggcggccagagggtgtgcggagctggtggggaggagcctggagagaaggggcagagctgggggctgagggagacccccccacaccccttctctccttcctctcgtccttggatagattcagctcccacacacacacccgcactgcccaggtccctcctcagacctccagccctgggacagggcaaacaactgaacttgctatggaaaggacagtgtgggaggctgggggagctgtgtcctgcagttcccaggaccccatcctctcagaaggtaggggaagggcgggaggattgagaagggacaagccaccttgaccgtaggggaaggaggaatgtgggctgggggaagatgccctcaactcaccccctacacacacatgagagagagcccccacccagttccttggcctaggtctcccctccaggctgagggcctctctacttccccagatgcctgggtgcaaagaacggcttggcttggctcctcctctggaggttaaaatttatagtcattctaactgcactttggaaaccaagcaaggggagaagacaaatgaagaaaaactagacagagagaaaaatacaaaaaagagagagcgagcgatagagagagatgatattaagttattaactgaggctgaccagaggggaggaccccccctttaccaccccatgcactttgcgagctgccccttcttcccccacatcagagagaaatgcccccacaccagagccccaagggtagggctgccgatcagagctgtgagttaacacaacagggtcctggccaccccccttgccataccccgccctctgtgcccctttggcaccccccaaccctagtatgtcctctgctttctgccactcgtgcccgctgagttccatctacctctcatgctggatgccagctggcccctcaccagcctgccctgctgcccacacagctcccctttaagtgcccagccctaggggcctctccccatccacctcctccttccacaccttggcacccacccaggaaaaaactagacagagagaaaaatacaaaaaagagagagcgagcgatagagagagatgatattaagttattaactgaggctgaccagaggggaggaccccccctttaccaccccatgcactttgcgagctgccccttcttcccctcgagtttttttttttttttttttggagtcaaattttcaactgtgcatttattggcctgggcttagacatattaaaaagcaacacttactgagaacataacataaccagacatttctgccaggtgctgttaggt

SEQ ID NO: 278383 - DNA, 2411 bp, Homo sapiens
gggggcgggcggcggcgaggcggcctgcagggagcagccgcgagccggccgggcgcgccgagcccgagccccagccggagcggggcgggggagggaggagccagagcggccgccgcctctgccggaggagccgcggggccgccacactcgccccccgccccccccgcgctcactcgcactcacacccgggcgcaggaggcgggcggcccgggccccaccggccccccatggacgcccccagcacggggcgctgagacccccgcgtcgctgcccagcccggtccggcgcgccacgccgagggatctctggacaggacaagactccgaagctactcccccagcacacagcccgggacccacaaacccagcttgcccccagccctcccacctgccactccctggcccctcccaccgcccgccccccttggggcgcagggcatggtgtgaaaggccaagtgctgaggcgggtatcatgggtgctgtgccctagggcctgggtggcagggggtgggtggcctgtgggtgtgccgggggggccagtgtgcccaccccagtctcttggcgtgctggagggcatcctggatggaattgaagtgaatggaacagaagccaagcaaggtggagtgtgggtcagacccagaggagaacagtgccaggtcaccagatggaaagcgaaaaagaaagaacggccaatgttccctgaaaaccagcatgtcagggtatatccctagttacctggacaaagacgagcagtgtgtcgtgtgtggggacaaggcaactggttatcactaccgctgtatcacttgtgagggctgcaagggcttctttcgccgcacaatccagaagaacctccatcccacctattcctgcaaatatgacagctgctgtgtcattgacaagatcacccgcaatcagtgccagctgtgccgcttcaagaagtgcatcgccgtgggcatggccatggacttggttctagatgactcgaagcgggtggccaagcgtaagctgattgagcagaaccgggagcggcggcggaaggaggagatgatccgatcactgcagcagcgaccagagcccactcctgaagagtgggatctgatccacattgccacagaggcccatcgcagcaccaatgcccagggcagccattggaaacagaggcggaaattcctgcccgatgacattggccagtcacccattgtctccatgccggacggagacaaggtggacctggaagccttcagcgagtttaccaagatcatcaccccggccatcacccgtgtggtggactttgccaaaaaactgcccatgttctccgagctgccttgcgaagaccagatcatcctcctgaaggggtgctgcatggagatcatgtccctgcgggcggctgtccgctacgaccctgagagcgacaccctgacgctgagtggggagatggctgtcaagcgggagcagctcaagaatggcggcctgggcgtagtctccgacgccatctttgaactgggcaagtcactctctgcctttaacctggatgacacggaagtggctctgctgcaggctgtgctgctaatgtcaacagaccgctcgggcctgctgtgtgtggacaagatcgagaagagtcaggaggcgtacctgctggcgttcgagcactacgtcaaccaccgcaaacacaacattccgcacttctggcccaagctgctgatgaaggtgactgacctccgcatgatcggggcctgccacgccagccgcttcctccacatgaaagtcgagtgccccaccgaactcttccccccactcttcctcgaggtctttgaggatcaggaagtctaaagcctcaggcggccagagggtgtgcggagctggtggggaggagcctggagagaaggggcagagctgggggctgagggagacccccccacaccccttctctccttcctctcgtccttggatagattcagctcccacacacacacccgcactgcccaggtccctcctcagacctccagccctgggacagggcaaacaactgaacttgctatggaaaggacagtgtgggaggctgggggagctgtgtcctgcagttcccaggaccccatcctctcagaaggtaggggaagggcgggaggattgagaagggacaagccaccttgaccgtaggggaaggaggaatgtgggctgggggaagatgccctcaactcaccccctacacacacatgagagagagcccccacccagttccttggcctaggtctcccctccaggctgagggcctctctacttccccagatgcctgggtgcaaagaacggcttggcttggctcctcctctggaggttaaaatttatagtcattctaactgcactttggaaaccaagcaaggggagaagacaaatgaagaaaaactagacagagag

SEQ ID NO: 278384 - DNA, 1688 bp, Homo sapiens
gggggcgggcggcggcgaggcggcctgcagggagcagccgcgagccggccgggcgcgccgagcccgagccccagccggagcggggcgggggagggaggagccagagcggccgccgcctctgccggaggagccgcggggccgccacactcgccccccgccccccccgcgctcactcgcactcacacccgggcgcaggaggcgggcggcccgggccccaccggccccccatggacgcccccagcacggggcgctgagacccccgcgtcgctgcccagcccggtccggcgcgccacgccgagggatctctggacaggacaagactccgaagctactcccccagcacacagcccgggacccacaaacccagcttgcccccagccctcccacctgccactccctggcccctcccaccgcccgccccccttggggcgcagggcatggtgtgaaaggccaagtgctgaggcgggtatcatgggtgctgtgccctagggcctgggtggcagggggtgggtggcctgtgggtgtgccgggggggccagtgtgcccaccccagtctcttggcgtgctggagggcatcctggatggaattgaagtgaatggaacagaagccaagcaaggtggagtgtgggtcagacccagaggagaacagtgccaggtcaccagatggaaagcgaaaaagaaagaacggccaatgttccctgaaaaccagcatgtcagggtatatccctagttacctggacaaagacgagcagtgtgtcgtgtgtggggacaaggcaactggttatcactaccgctgtatcacttgtgagggctgcaagggcttctttcgccgcacaatccagaagaacctccatcccacctattcctgcaaatatgacagctgctgtgtcattgacaagatcacccgcaatcagtgccagctgtgccgcttcaagaagtgcatcgccgtgggcatggccatggacttggttctagatgactcgaagcgggtggccaagcgtaagctgattgagcagaaccgggagcggcggcggaaggaggagatgatccgatcactgcagcagcgaccagagcccactcctgaagagtgggatctgatccacattgccacagaggcccatcgcagcaccaatgcccagggcagccattggaaacagaggcggaaattcctgcccgatgacattggccagtcacccattgtctccatgccggacggagacaaggtggacctggaagccttcagcgagtttaccaagatcatcaccccggccatcacccgtgtggtggactttgccaaaaaactgcccatgttctccgagctgccttgcgaagaccagatcatcctcctgaaggggtgctgcatggagatcatgtccctgcgggcggctgtccgctacgaccctgagagcgacaccctgacgctgagtggggagatggctgtcaagcgggagcagctcaagaatggcggcctgggcgtagtctccgacgccatctttgaactgggcaagtcactctctgcctttaacctggatgacacggaagtggctctgctgcaggctgtgctgctaatgtcaacagaccgctcgggcctgctgtgtgtggacaagatcgagaagagtcaggaggcgtacctgctggcgttcgagcactacgtcaaccgcagtcacccgtcgggatcctcgagagca

SEQ ID NO: 278385 - DNA, 1651 bp, Homo sapiens
gggggcgggcggcggcgaggcggcctgcagggagcagccgcgagccggccgggcgcgccgagcccgagccccagccggagcggggcgggggagggaggagccagagcggccgccgcctctgccggaggagccgcggggccgccacactcgccccccgccccccccgcgctcactcgcactcacacccgggcgcaggaggcgggcggcccgggccccaccggccccccatggacgcccccagcacggggcgctgagacccccgcgtcgctgcccagcccggtccggcgcgccacgccgagggatctctggacaggacaagactccgaagctactcccccagcacacagcccgggacccacaaacccagcttgcccccagccctcccacctgccactccctggcccctcccaccgcccgccccccttggggcgcagggcatggtgtgaaaggccaagtgctgaggcgggtatcatgggtgctgtgccctagggcctgggtggcagggggtgggtggcctgtgggtgtgccgggggggccagtgtgcccaccccagtctcttggcgtgctggagggcatcctggatggaattgaagtgaatggaacagaagccaagcaaggtggagtgtgggtcagacccagaggagaacagtgccaggtcaccagatggaaagcgaaaaagaaagaacggccaatgttccctgaaaaccagcatgtcagggtatatccctagttacctggacaaagacgagcagtgtgtcgtgtgtggggacaaggcaactggttatcactaccgctgtatcacttgtgagggctgcaagggcttctttcgccgcacaatccagaagaacctccatcccacctattcctgcaaatatgacagctgctgtgtcattgacaagatcacccgcaatcagtgccagctgtgccgcttcaagaagtgcatcgccgtgggcatggccatggacttggttctagatgactcgaagcgggtggccaagcgtaagctgattgagcagaaccgggagcggcggcggaaggaggagatgatccgatcactgcagcagcgaccagagcccactcctgaagagtgggatctgatccacattgccacagaggcccatcgcagcaccaatgcccagggcagccattggaaacagaggcggaaattcctgcccgatgacattggccagtcacccattgtctccatgccggacggagacaaggtggacctggaagccttcagcgagtttaccaagatcatcaccccggccatcacccgtgtggtggactttgccaaaaaactgcccatgttctccgaggtgagtggcagaagtggggagagatgtgatgctgtgctggagggaaacctgctcccccggtcacccagtacaggctcatctgaggttctctggacaaggagcaattcctgtaggtcaacatacacagataacatacacagacacacacacacacatgcatacacatacacccagcacacaggcacacatgcagacacatacacggacacacacacacacctagcatacagatacgtacacagacacacatacacacacacatacacccagcacacagacacacacatctcatttctctagtgtcttttgcctttaaaaaaaactaaacagat

SEQ ID NO: 278386 - DNA, 1362 bp, Homo sapiens
ttttgtttgtttgttttttgagacagggtcccattctgtcacccaggctggagtgcagtggcagtcacagctcattgcagccttgacctcctgggctcaagcaatcctcccacctcagcctcttcagcctcagccttcccggtagctgagaccacagcctcggctaagtttttaattttttgtaaagatggggtctcaccatgttgcccaggctggtcttggactgctagtctcaagcgatcctcccaccttggcctcccagagtgctgtgctggcattacaggtttgatttttgtgtatggtgtaagaaaagagtccgatttcaatcttttgcacatggatatccagcttttccaacaccatgtattgaagagactaccttttcccttttgtggattcttggcaaccttgttgaagggccttcctttgcttcacctcatggctcacatacaagtgacctgagtcactccatcttcctgatcaaactgtccgtcgtctaattcccggaggacgttgtcactgctgctgaacccagagaagctgttgtgctgtgccagccttccctcctttgtccagcattcccgggagggagaaaggcggcactcctcaggcaggtgtctgctctctgcaggttgtgacgaggttgtgtctaatccgatgcttctactagtggctatattcttgtcttcaccttttatgtggcggctggctttcttctgaaacacaagacattggtgaccaggagagttaaaaagatgggtgtttcctgtccctctggtctagcacatgctgcctttctgcctccaggaatgtccttttgcccagctcttcaaaatcctgctcatcttcaacgaccagctcagagctacctccacattcccctctccacccaaatacaaatgaactcccttctccctgttttgtaactctttgtaggttcctggcacatcattcttgttgatgggtatgttatgtacacatctcggccctcagtgacatctctaaggaaggaaatttgttgaaatcatactttgggagaacaaagcaaggtataaatactaatatgtttttcttcttagtgttagttcagatctatacagcagaaaaggtgctttgatggccaccttacacccatgtcatgtagacacaggctgcacagaagagtcacagtgatatggtttggctgtgtccccacccaaatctcatcttgaattgtaactcccatatttcccatgtgttgtgggaggggcccagtgggaggtagtcaaatcatgggggtgggtcttatcccatgaataagtatcatgagatctgatggttttataaaggggagttcccttgcacatgctctctcttgcctgc

SEQ ID NO: 278387 - DNA, 881 bp, Homo sapiens
  misc_feature (843)..(843): n is a, c, g, or t
  misc_feature (851)..(851): n is a, c, g, or t
  misc_feature (860)..(860): n is a, c, g, or t
agcggagtccgcggtcctcacccgcgccgggcggtagtagtagctgtgctctttggggtccaggcgccgcggcgggatgtagctgaaggcggactgcgccgagacgggcggcggcctgggcttgccccgcagcgtggacgcggtggtctcctcctcgtcgtcctccatgccgccaccgtccagcgcccccgccttggccgcggtccgtcccgcccgcccaggggcccagtcggagtctgcaggcctcaggttgctcagcgccagcgtctagcccgcgtctgtgttcggtcgttgcctggaaaccgccgcctggcgacccggagctgccctgcagcattcccgctccagggtggagcgaccctcccctcctccctcccggcccctcgactacacctggggtctctccttccttcctcctcgggaggagcccgactgggagacgccgcggggactacccatttccagcccgctcacctttcccatgcagcagcccctgcttcactcactgattcactccttcgcgagaccattagtgactgagcacctagcgcatggtgtgtcaggagctggagattgagccttgaacggagcaggccttgtccacaggaagcttacagtctggagaagacacatgaaagacgcgaagaagccaaatgacttgccgaggctccagggcagcgctgtccaatagaaacatgatgagagccacgtgtgtcgtttcttatttgactcagaggaactgactgcttccgttttcccagaattctatcaaatatctttcaagtgtccacatgtacccaagcgacgcacattcctcacataggaggaaggcaaggaaaggtnggcagagntcctttcantcccagactgttgaaggaagg

SEQ ID NO: 278388 - DNA, 916 bp, Homo sapiens
agcggagtccgcggtcctcacccgcgccgggcggtagtagtagctgtgctctttggggtccaggcgccgcggcgggatgtagctgaaggcggactgcgccgagacgggcggcggcctgggcttgccccgcagcgtggacgcggtggtctcctcctcgtcgtcctccatgccgccaccgtccagcgcccccgccttggccgcggtccgtcccgcccgcccaggggcccagtcggagtctgcaggcctcaggttgctcagcgccagcgtctagcccgcgtctgtgttcggtcgttgcctggaaaccgccgcctggcgacccggagctgccctgcagcattcccgctccagggtggagcgaccctcccctcctccctcccggcccctcgactacacctggggtctctccttccttcctcctcgggaggagcccgactgggagacgccgcggggactacccatttccagcccgctcacctttcccatgcagcagcccctgcttcactcactgattcactccttcgcgagaccattagtgactgagcacctagcgcatggtgtgtcaggagctggagattgagccttgaacggagcaggccttgtccacaggaagcttacagtctggagaagacacatgaaagacgcgaagaagccaaatgacttgccgaggctccagggcagcgctgtccaatagaaacatgatgagagccacgtgtgtcgtttcttatttgactcagaggaactgactgcttccgttttcccagaattctatcaaatatctttcaagtgtccacatgtacccaagcgacgcacattcctcacataggaggaaggcaaggaaagaatcatatctatttttttcaccttcttgagaaaaagataccgctgcttattagcctcaacgagtcttgtaatgtga

SEQ ID NO: 278389 - DNA, 1167 bp, Homo sapiens
agcggagtccgcggtcctcacccgcgccgggcggtagtagtagctgtgctctttggggtccaggcgccgcggcgggatgtagctgaaggcggactgcgccgagacgggcggcggcctgggcttgccccgcagcgtggacgcggtggtctcctcctcgtcgtcctccatgccgccaccgtccagcgcccccgccttggccgcggtccgtcccgcccgcccaggggcccagtcggagtctgcaggcctcaggttgctcagcgccagcgtctagcccgcgtctgtgttcggtcgttgcctggaaaccgccgcctggcgacccggagctgccctgcagcattcccgctccagggtggagcgaccctcccctcctccctcccggcccctcgactacacctggggtctctccttccttcctcctcgggaggagcccgactgggagacgccgcggggactacccatttccagcccgctcacctttcccatgcagcagcccctgcttcactcactgattcactccttcgcgagaccattagtgactgagcacctagcgcatggtgtgtcaggagctggagattgagccttgaacggagcaggccttgtccacaggaagcttacagtctggagaagacacatgaaagacgcgaagaagccaaatgacttgccgaggctccagggcagcgctgtccaatagaaacatgatgagagccacgtgtgtcgtttcttatttgactcagaggaactgactgcttccgttttcccagaattctatcaaatatctttcaagtgtccacatgtacccaagcgacgcacattcctcacataggaggaaggcaaggaaaggtaaagaagactgcctgtgttgttcaggcagaactgtcaccacactcttccacagctcctgcctgcctgccatctacacacacactcacaacacacactcagagaggatccactctctcctccagagatcctctagtttcaactgctgcagcccaaagtcctgaactttgctgccccctattgataggcccaaagactatcactgttgctgcaggggttgtgctagcaagtaaaacaattttttttcattcatttttcttgctttgctttacttttgaaaacaaatatagaaaggttatgcaattattaaaaatattatcaaatata

SEQ ID NO: 278390 - DNA, 685 bp, Homo sapiens
attcccgctccagggtggagcgaccctcccctcctccctcccggcccctcgactacacctggggtctctccttccttcctcctcgggaggagcccgactgggagacgccgcggggactacccatttccagcccgctcacctttcccatgcagcagcccctgcttcactcactgattcactccttcgcgagaccattagtgactgagcacctagcgcatggtgtgtcaggagctggagattgagccttgaacggagcaggccttgtccacaggaagcttacagtctggagaagacacatgaaagacgcgaagaagccaaatgacttgccgaggctccagggcagcgctgtccaatagaaacatgatgagagccacgtgtgtcgtttcttatttgactcagtaagtccaaaacgttatcatttcaacaaatggcactagctgcctttcaagctctcggtggccacgtgtggctagcagttacagtattggccagtgcaggtgtaaggctgcatgaatttacagaatctggcagaactcagctgctgtggacagggctcttgcaatcctttgccagtgtgtttacgttggcccttgatctgaatgctgggtcaatacctgcgttccgtttgttgaaaatgtgttaagctgtatactcgtgattggtgggtgtacagccaagaaaagtt

SEQ ID NO: 278391 - DNA, 652 bp, Homo sapiens
attgatcgaaatgcagaaaattggtgttattatgaaggcttggaaaaagctctacaaattagcactttagaagagaggcttcaaatttatgaagaaattagtaagcagcaccccaaagcaattacacccagaagattacctttgactcttgtcccaggtttctataatccaggaacttgttactaattatgaagcctctcttaaaacgtgtgacttttttagcccatatgagaatggggagaaggaacccccgacaacactactctgggttcagtatttcctggcacagcactttgataaacttggacagtattctttggctttggattatattaatgctgcaattgctagtactccaactctaatagaattattctatatgaaagcaaaaatttacaaggtaaaatctgaatcctgttttttgagtagttgaagaattcagctactttaagaatccttggagttttttctttgtggaaacaagttctagggcaccctgataatctttttctaataatcctgtgtagtttcatgttatattaattgtataatcaatgtgtaattagatgtgtaatcatttgagctcttagtaaatgtgaactgtaattttgatttctaaataaatttgacagaaatggtgacagaaaaaaaa

SEQ ID NO: 278392 - DNA, 3164 bp, Homo sapiens
attgatcgaaatgcagaaaattggtgttattatgaaggcttggaaaaagctctacaaattagcactttagaagagaggcttcaaatttatgaagaaattagtaagcagcaccccaaagcaattacacccagaagattacctttgactcttgtcccaggtttctataatccaggaacttgttactaattatgaagcctctcttaaaacgtgtgacttttttagcccatatgagaatggggagaaggaacccccgacaacactactctgggttcagtatttcctggcacagcactttgataaacttggacagtattctttggctttggattatattaatgctgcaattgctagtactccaactctaatagaattattctatatgaaagcaaaaatttacaagcatataggtaatctcaaagaagctgcaaagtggatggatgaagcacagtctttggacacagctgatagattcatcaattccaaatgtgcaaaatacatgcttcgagcaaatatgataaaagaagcagaggaaatgtgctccaagttcacaagggaaggaacatctgccatggaaaatctaaatgaaatgcagtgtatgtggtttcagacagaatgcatttcagcttatcagcgtctggggagatacggggatgccttgaaaaaatgtcatgaagtagaaaggcatttttttgagataactgatgaccaattcgacttccatacatactgcatgagaaagatgacccttcgtgcctatgttgaccttttgagattagaagatatactcagaagacatgccttttatttcaaggctgctagatcagcgattgaaatatacttgaaattgtatgataatcccttaaccaatgaaagcaaacaacaagaaataaactcagaaaacttgtcagccaaagaattgaagaaaatgcttagcaagcagagaagagctcagaaaaaggctaaactagaagaagaaagaaagcatgcagaaagagaacgtcaacagaaaaatcaaaagaaaaaaagagatgaagaagaagaagaagccagtggccttaaggaagaacttatacctgaaaaattagaaagggtagaaaatccattagaggaagccgttaagttccttatacctcttaagaaccttgttgctgataacattgacactcatctgttagcatttgaaatatattttagaaaaggaaagtttctgttaatgctgcagtctgtcaaacgaggttttgccattaacagtaataacccatggttacatgaatgtttaattagattttctaaatctgtgtctaatcatagtaatcttccagacattgtgagcaaagttctatctcaagaaatgcagaaaatatttgtcaaaaaggatttggaaagttttaatgaggattttctgaaacgtaacgctacctctcttcagcatctactttcaggtgctaaaatgatgtattttctggacaagtcaaggcaggagaaagcaattgctatagccactagactagatgaaactataaaagataaagatgtaaagacattaataaaggtttctgaagcactgcttgatggcagctttgggaactgtagttcccaatatgaagaatataggatggccagtcataacctgcttccttttacatctgccttcttgcctgctgtgaatgaagtcgacaatcctaatgtggcactgaaccatacagctaattatgatgtcttggcaaatgaaatttgaaatcttctagaaagtagactcctatagactcaaagctgaattgagatcagggtttcttttccaggttgcattttaatatacgtatgaaatgaaatatttggttaggatttttaaatggcatattctgtaagcttattttgttctttacccggcctgccaatttacataaccatctgttaaaattacctgtttattcttacacagttttgtggtagctccgattgcttctgtataattataatttcttactaagctaagttgtatacaaccccactgtattattttctttagattctgatttcaggatctgtgctttgattccttgtctgttttatcgtatatttgcttgctttttaattaaagcacatcagttttaaagtgttaactatatgttaacaatatggaggctgggcgtggtggctcacacctgtaatcccagcactttgggaggcccagactggcggatcacctgaggtcaggagatcgagatcagcctggccaacatggtgaaaccccttctctactgaaaatacaaaaattagccagacgtgatggcacatacctgtaatccaagctgcccaggagctgaggccggagaatcgcttgaacctgggaggtggaggttgcagtgagccgagatcatgccactgcactccagcctgggcaacagagcaagactccatctcgaaaaaaaggaattcctcttggcagatattgaagtttatttgaaaatttaattcgtccttttttcattgtaatatttcatggtttactatttccttttagtattcatgaaaatggtattttctggttgaataagggtgctctagttttatgtagatgatttcagaatgtgaaggctggtttgcctgtcagtcatggaaattcactggtaaaattgttgcatatttctctctcccagtcttaaaagcccacaggcaagaattaatgctttcttaactaagttactttgagtattaacaagtagcttatactgaggtgtgcttcaagggagcattatagggcagaaaacaaattaaaatgaaatgttgttgttatagccatgcattgaccattaaatgcattttaatatctcggcaaaatgagatttgaaactcattagtttaactcttaaaacatagtgttgttaaacagtattttttgggggcgggtggatagctttttgttctatcttgtacagaaaacagtaatggaatcactcatgttcagaaccttgtaaatatgtctgtaatattaatgcttccctttattaagacaaatatacattcaaaaagggagattttatttagacacacattttcttttcaccctaatctatttagattcatacttattgagacgggaaaaactcgctgtaaaataatgccaacctagataatgctataataaattattttgtacacag

SEQ ID NO: 278393 - DNA, 3086 bp, Homo sapiens
attgatcgaaatgcagaaaattggtgttattatgaaggcttggaaaaagctctacaaattagcactttagaagagaggcttcaaatttatgaagaaattagtaagcagcaccccaaagcaattacacccagaagattacctttgactcttgtcccaggtttctataatccaggaacttgttactaattatgaagcctctcttaaaacgtgtgacttttttagcccatatgagaatggggagaaggaacccccgacaacactactctgggttcagtatttcctggcacagcactttgataaacttggacagtattctttggctttggattatattaatgctgcaattgctagtactccaactctaatagaattattctatatgaaagcaaaaatttacaagcatataggtaatctcaaagaagctgcaaagtggatggatgaagcacagtctttggacacagctgatagattcatcaattccaaatgtgcaaaatacatgcttcgagcaaatatgataaaagaagcagaggaaatgtgctccaagttcacaagggaaggaacatctgccatggaaaatctaaatgaaatgcagtgtatgtggtttcagacagaatgcatttcagcttatcagcgtctggggagatacggggatgccttgaaaaaatgtcatgaagtagaaaggcatttttttgagataactgatgaccaattcgacttccatacatactgcatgagaaagatgacccttcgtgcctatgttgaccttttgagattagaagatatactcagaagacatgccttttatttcaaggctgctagatcagcgattgaaatatacttgaaattgtatgataatcccttaaccaatgaaagcaaacaacaagaaataaactcagaaaacttgtcagccaaagaattgaagaaaatgcttagcaagcagagaagagctcagaaaaaggctaaactagaagaagaaagaaagcatgcagaaagagaacgtcaacagaaaaatcaaaagaaaaaaagagatgaagaagaagaagaagccagtggccttaaggaagaacttatacctgaaaaattagaaagggtagaaaatccattagaggaagccgttaagttccttatacctcttaagaaccttgttgctgataacattgacactcatctgttagcatttgaaatatattttagaaaaggaaagtttctgttaatgctgcagtctgtcaaacgaggttttgccattaacagtaataacccatggttacatgaatgtttaattagattttctaaatctgacattgtgagcaaagttctatctcaagaaatgcagaaaatatttgtcaaaaaggatttggaaagttttaatgaggattttctgaaacgtaacgctacctctcttcagcatctactttcaggtgctactagactagatgaaactataaaagataaagatgtaaagacattaataaaggtttctgaagcactgcttgatggcagctttgggaactgtagttcccaatatgaagaatataggatggccagtcataacctgcttccttttacatctgccttcttgcctgctgtgaatgaagtcgacaatcctaatgtggcactgaaccatacagctaattatgatgtcttggcaaatgaaatttgaaatcttctagaaagtagactcctatagactcaaagctgaattgagatcagggtttcttttccaggttgcattttaatatacgtatgaaatgaaatatttggttaggatttttaaatggcatattctgtaagcttattttgttctttacccggcctgccaatttacataaccatctgttaaaattacctgtttattcttacacagttttgtggtagctccgattgcttctgtataattataatttcttactaagctaagttgtatacaaccccactgtattattttctttagattctgatttcaggatctgtgctttgattccttgtctgttttatcgtatatttgcttgctttttaattaaagcacatcagttttaaagtgttaactatatgttaacaatatggaggctgggcgtggtggctcacacctgtaatcccagcactttgggaggcccagactggcggatcacctgaggtcaggagatcgagatcagcctggccaacatggtgaaaccccttctctactgaaaatacaaaaattagccagacgtgatggcacatacctgtaatccaagctgcccaggagctgaggccggagaatcgcttgaacctgggaggtggaggttgcagtgagccgagatcatgccactgcactccagcctgggcaacagagcaagactccatctcgaaaaaaaggaattcctcttggcagatattgaagtttatttgaaaatttaattcgtccttttttcattgtaatatttcatggtttactatttccttttagtattcatgaaaatggtattttctggttgaataagggtgctctagttttatgtagatgatttcagaatgtgaaggctggtttgcctgtcagtcatggaaattcactggtaaaattgttgcatatttctctctcccagtcttaaaagcccacaggcaagaattaatgctttcttaactaagttactttgagtattaacaagtagcttatactgaggtgtgcttcaagggagcattatagggcagaaaacaaattaaaatgaaatgttgttgttatagccatgcattgaccattaaatgcattttaatatctcggcaaaatgagatttgaaactcattagtttaactcttaaaacatagtgttgttaaacagtattttttgggggcgggtggatagctttttgttctatcttgtacagaaaacagtaatggaatcactcatgttcagaaccttgtaaatatgtctgtaatattaatgcttccctttattaagacaaatatacattcaaaaagggagattttatttagacacacattttcttttcaccctaatctatttagattcatacttattgagacgggaaaaactcgctgtaaaataatgccaacctagataatgctataataaattattttgtacacag

SEQ ID NO: 278394 - DNA, 534 bp, Homo sapiens
gtatttcattaaaactaaaatattaatatatactaactttcaggtttaaaaaataacctgatcttttgacttatatagaagttgagtatcatcacaaaacatgatttgtagggaatgggcatggtttgtaggaagagaaagttcaagttgaatgccaaaaataattcatatcctttatagtgtaaaacattggagagggcagctaagtgaaaattgtgactgtttaaattgttttttgggctttttacaattttttttttctaaaggtagacattattgacataaatgtaaaggttaattttgtgatttttgtttttaagcatttttttgagataactgatgaccaattcgacttccatacatactgcatgagaaagatgacccttcgtgcctatgttgaccttttgagattagaagatatactcagaagacatgccttttatttcaaggctgctagatcagcgattgaaatatacttgaaattgtatgataatcccttaaccaatgaaagcaaacaacaagaaataaactcag

SEQ ID NO: 278395 - DNA, 3110 bp, Homo sapiens
attgatcgaaatgcagaaaattggtgttattatgaaggcttggaaaaagctctacaaattagcactttagaagagaggcttcaaatttatgaagaaattagtaagcagcaccccaaagcaattacacccagaagattacctttgactcttgtcccaggtttctataatccaggaacttgttactaattatgaagcctctcttaaaacgtgtgacttttttagcccatatgagaatggggagaaggaacccccgacaacactactctgggttcagtatttcctggcacagcactttgataaacttggacagtattctttggctttggattatattaatgctgcaattgctagtactccaactctaatagaattattctatatgaaagcaaaaatttacaagcatataggtaatctcaaagaagctgcaaagtggatggatgaagcacagtctttggacacagctgatagattcatcaattccaaatgtgcaaaatacatgcttcgagcaaatatgataaaagaagcagaggaaatgtgctccaagttcacaagggaaggaacatctgccatggaaaatctaaatgaaatgcagtgtatgtggtttcagacagaatgcatttcagcttatcagcgtctggggagatacggggatgccttgaaaaaatgtcatgaagtagaaaggcatttttttgagataactgatgaccaattcgacttccatacatactgcatgagaaagatgacccttcgtgcctatgttgaccttttgagattagaagatatactcagaagacatgccttttatttcaaggctgctagatcagcgattgaaatatacttgaaattgtatgataatcccttaaccaatgaaagcaaacaacaagaaataaactcagaaaacttgtcagccaaagaattgaagaaaatgcttagcaagcagagaagagctcagaaaaaggctaaactagaagaagaaagaaagcatgcagaaagagaacgtcaacagaaaaatcaaaagaaaaaaagagatgaagaagaagaagaagccagtggccttaaggaagaacttatacctgaaaaattagaaagggtagaaaatccattagaggaagccgttaagttccttatacctcttaagaaccttgttgctgataacattgacactcatctgttagcatttgaaatatattttagaaaaggaaagtttctgttaatgctgcagtctgtcaaacgaggttttgccattaacagtaataacccatggttacatgaatgtttaattagattttctaaatctgtgtctaatcatagtaatcttccagacattgtgagcaaagttctatctcaagaaatgcagaaaatatttgtcaaaaaggatttggaaagttttaatgaggattttctgaaacgtaacgctacctctcttcagcatctactttcaggtgctactagactagatgaaactataaaagataaagatgtaaagacattaataaaggtttctgaagcactgcttgatggcagctttgggaactgtagttcccaatatgaagaatataggatggccagtcataacctgcttccttttacatctgccttcttgcctgctgtgaatgaagtcgacaatcctaatgtggcactgaaccatacagctaattatgatgtcttggcaaatgaaatttgaaatcttctagaaagtagactcctatagactcaaagctgaattgagatcagggtttcttttccaggttgcattttaatatacgtatgaaatgaaatatttggttaggatttttaaatggcatattctgtaagcttattttgttctttacccggcctgccaatttacataaccatctgttaaaattacctgtttattcttacacagttttgtggtagctccgattgcttctgtataattataatttcttactaagctaagttgtatacaaccccactgtattattttctttagattctgatttcaggatctgtgctttgattccttgtctgttttatcgtatatttgcttgctttttaattaaagcacatcagttttaaagtgttaactatatgttaacaatatggaggctgggcgtggtggctcacacctgtaatcccagcactttgggaggcccagactggcggatcacctgaggtcaggagatcgagatcagcctggccaacatggtgaaaccccttctctactgaaaatacaaaaattagccagacgtgatggcacatacctgtaatccaagctgcccaggagctgaggccggagaatcgcttgaacctgggaggtggaggttgcagtgagccgagatcatgccactgcactccagcctgggcaacagagcaagactccatctcgaaaaaaaggaattcctcttggcagatattgaagtttatttgaaaatttaattcgtccttttttcattgtaatatttcatggtttactatttccttttagtattcatgaaaatggtattttctggttgaataagggtgctctagttttatgtagatgatttcagaatgtgaaggctggtttgcctgtcagtcatggaaattcactggtaaaattgttgcatatttctctctcccagtcttaaaagcccacaggcaagaattaatgctttcttaactaagttactttgagtattaacaagtagcttatactgaggtgtgcttcaagggagcattatagggcagaaaacaaattaaaatgaaatgttgttgttatagccatgcattgaccattaaatgcattttaatatctcggcaaaatgagatttgaaactcattagtttaactcttaaaacatagtgttgttaaacagtattttttgggggcgggtggatagctttttgttctatcttgtacagaaaacagtaatggaatcactcatgttcagaaccttgtaaatatgtctgtaatattaatgcttccctttattaagacaaatatacattcaaaaagggagattttatttagacacacattttcttttcaccctaatctatttagattcatacttattgagacgggaaaaactcgctgtaaaataatgccaacctagataatgctataataaattattttgtacacag

SEQ ID NO: 278396 - DNA, 256 bp, Homo sapiens
tacatcgagctcggtcctggggaacctatcggagtaacaatacaaatggattttgggagtgactcaagaagtgaagaatgcacaagaatggatcacaagatggaatttagcaaaccctagccttgcttgttaaattttttttttttttttttaagaatatctgtaatggtactgactttgcttgctttgaagtagctcttttttttttttttttttttttgggaaaacgtcgttttataaactctctcgtaggtgt

SEQ ID NO: 278397 - DNA, 577 bp, Homo sapiens
  misc_feature (121)..(121): n is a, c, g, or t
ttttttgggcaaggaaaagaaacccaaaattccaaacccttgggaaaacggggccaaaaaaatttttttaacccccaattttaaaactgcccccaaagggaaaaacccactcccccccccnaaaaaaaaaaaaaaaaaaaaaagcaaattaccagtgagtagtgtgttacttgggtttttaataggcatcttattaacatgttccaacttgagcccttaactttctccacctacccccttccacaaacctgttttcactgtcttctctgtcttagttaatgtcagctttgtctgtccagctgctcaggctaaaacttttctttcatataacacatcctatcagcagctcctgtttgtgggtaggcattttgcctttttttttttttttttttttaaactgctatatctctagcatgtagaacagtgcctggcagcacataataggtgcttaatataatatttgttgaaagaacaagtcagtgagtatttttaatgtgaggtgcaaagagaaaaaaaaaatgtatctttgaggtgtggagttttgaagaacttccattttctaagcatttgtgtaatg

SEQ ID NO: 278398 - DNA, 915 bp, Homo sapiens
cccatggagtatgggaaggcaggagctgccctcctgctggagggattctctttgacttggagcagatgtgtcaggcgaggactgtcttgctgtttggtgactcaagcctagaaagctagacaggaaatcagctgagaccatttgacagggatggggatcctgagtaagattcaaagacagattaatcatttgtccttgtcaagttgatgtggggtcagtgagaaatcttggaagggacctgttctcctgccagagcagctgtgaggttatggaggaagaaccccttggatatcgccaggatgatcctagctatcgttcttttcactctggtggatatggccaggatgccttgggtatggaccccatgatggaacatgagatgggtggccaccaccctggtgctgactatccagttgatgggctgccagatctggggcatgcccaggacctcatggatgggctgcctccaggtgacagcaatcagctggcctggtttgatactgacctgtaaatcatcctttaggaagtaggagtcaaagtgacccttgtctactgtgatgctgaattcatgactaagagactattggtgaacttatcctggctgtgattacagacgtcaagagggagtattccagcgacactaagaaaataatgcaagagaacgccagcgaagagtgcccaggcaacactgacagactagaaaaaaaatatcaggagatgaagctgacacagtgagagcagcccaggtgcttcttggtgcttgttattacagacacacacttcacacaggggaggattattttaattctgtggccttcagatctcataaatacaagtaaaaacaagcaggtaactatgataactttacttcagagagtttaaatttcaaaaataaacctatccatccagcccctt

SEQ ID NO: 278399 - DNA, 3446 bp, Homo sapiens
atagctgattgatgagttgacatgccatggatccagacagaaaagcggctgttagtcactggcagcaacagtcttacctggactctggaatccattctggtgccactaccacagctccttctctgagtggtaaaggcaatcctgaggaagaggatgtggatacctcccaagtcctgtatgagtgggaacagggattttctcagtccttcactcaagaacaagtagctgatattgatggacagtatgcaatgactcgagctcagagggtacgagctgctatgttccctgagacattagatgagggcatgcagatcccatctacacagtttgatgctgctcatcccactaatgtccagcgtttggctgaaccatcacagatgctgaaacatgcagttgtaaacttgattaactatcaagatgatgcagaacttgccacacgtgcaatccctgaactgacaaaactgctaaatgacgaggaccaggtggtggttaataaggctgcagttatggtccatcagctttctaaaaaggaagcttccagacacgctatcatgcgttctcctcagatggtgtctgctattgtacgtaccatgcagaatacaaatgatgtagaaacagctcgttgtaccgctgggaccttgcataacctttcccatcatcgtgagggcttactggccatctttaagtctggaggcattcctgccctggtgaaaatgcttggttcaccagtggattctgtgttgttttatgccattacaactctccacaaccttttattacatcaagaaggagctaaaatggcagtgcgtttagctggtgggctgcagaaaatggttgccttgctcaacaaaacaaatgttaaattcttggctattacgacagactgccttcaaattttagcttatggcaaccaagaaagcaagctcatcatactggctagtggtggaccccaagctttagtaaatataatgaggacctatacttacgaaaaactactgtggaccacaagcagagtgctgaaggtgctatctgtctgctctagtaataagccggctattgtagaagctggtggaatgcaagctttaggacttcacctgacagatccaagtcaacgtcttgttcagaactgtctttggactctcaggaatctttcagatgctgcaactaaacaggaagggatggaaggtctccttgggactcttgttcagcttctgggttcagatgatataaatgtggtcacctgtgcagctggaattctttctaacctcacttgcaataattataagaacaagatgatggtctgccaagtgggtggtatagaggctcttgtgcgtactgtccttcgggctggtgacagggaagacatcactgagcctgccatctgtgctcttcgtcatctgaccagccgacaccaagaagcagagatggcccagaatgcagttcgccttcactatggactaccagttgtggttaagctcttacacccaccatcccactggcctctgataaaggctactgttggattgattcgaaatcttgccctttgtcccgcaaatcatgcacctttgcgtgagcagggtgccattccacgactagttcagttgcttgttcgtgcacatcaggatacccagcgccgtacgtccatgggtgggacacagcagcaatttgtggagggggtccgcatggaagaaatagttgaaggttgtaccggagcccttcacatcctagctcgggatgttcacaaccgaattgttatcagaggactaaataccattccattgtttgtgcagctgctttattctcccattgaaaacatccaaagagtagctgcaggggtcctctgtgaacttgctcaggacaaggaagctgcagaagctattgaagctgagggagccacagctcctctgacagagttacttcactctaggaatgaaggtgtggcgacatatgcagctgctgttttgttccgaatgtctgaggacaagccacaagattacaagaaacggctttcagttgagctgaccagctctctcttcagaacagagccaatggcttggaatgagactgctgatcttggacttgatattggtgcccagggagaaccccttggatatcgccaggatgatcctagctatcgttcttttcactctggtggatatggccaggatgccttgggtatggaccccatgatggaacatgagatgggtggccaccaccctggtgctgactatccagttgatgggctgccagatctggggcatgcccaggacctcatggatgggctgcctccaggtgacagcaatcagctggcctggtttgatactgacctgtaaatcatcctttaggtaagaagttttaaaaagccagtttgggtaaaatacttttactctgcctacagaacttcagaaagacttggttggtagggtgggagtggtttaggctatttgtaaatctgccacaaaaacaggtatatactttgaaaggagatgtcttggaacattggaatgttctcagatttctggttgttatgtgatcatgtgtggaagttattaactttaatgttttttgccacagcttttgcaacttaatactcaaatgagtaacatttgctgttttaaacattaatagcagcctttctctctttatacagctgtattgtctgaacttgcattgtgattggcctgtagagttgctgagagggctcgaggggtgggctggtatctcagaaagtgcctgacacactaaccaagctgagtttcctatgggaacaattgaagtaaactttttgttctggtcctttttggtcgaggagtaacaatacaaatggattttgggagtgactcaagaagtgaagaatgcacaagaatggatcacaagatggaatttagcaaaccctagccttgcttgttaaattttttttttttttttttaagaatatctgtaatggtactgactttgcttgctttgaagtagctcttttttttttttttttttttttttttttttttgcagtaactgttttttaagtctctcgtagtgttaagttatagtgaatactgctacagcaatttctaatttttaagaattgagtaatggtgtagaacactaattaattcataatcactctaattaattgtaatctgaataaagtgtaacaattgtgtagcctttttgtataaaatagacaaatagaaaatggtccaattagtttcctttttaatatgcttaaaataagcaggtggatctatttcatgtttttgatcaaaaactatttgggatatgtatgggtagggtaaatcagtaagaggtgttatttggaaccttgttttggacagtttaccagttgccttttatcccaaagttgttgtaacctgctgtgatacgatgcttcaagagaaaatgcggttataaaaaatggttcagaattaaacttttaattcattcga

SEQ ID NO: 278400 - DNA, 3364 bp, Homo sapiens
atagctgattgatgagttgacatgccatggatccagacagaaaagcggctgttagtcactggcagcaacagtcttacctggactctggaatccattctggtgccactaccacagctccttctctgagtggtaaaggcaatcctgaggaagaggatgtggatacctcccaagtcctgtatgagtgggaacagggattttctcagtccttcactcaagaacaagtagctgatattgatggacagtatgcaatgactcgagctcagagggtacgagctgctatgttccctgagacattagatgagggcatgcagatcccatctacacagtttgatgctgctcatcccactaatgtccagcgtttggctgaaccatcacagatgctgaaacatgcagttgtaaacttgattaactatcaagatgatgcagaacttgccacacgtgcaatccctgaactgacaaaactgctaaatgacgaggaccaggtggtggttaataaggctgcagttatggtccatcagctttctaaaaaggaagcttccagacacgctatcatgcgttctcctcagatggtgtctgctattgtacgtaccatgcagaatacaaatgatgtagaaacagctcgttgtaccgctgggaccttgcataacctttcccatcatcgtgagggcttactggccatctttaagtctggaggcattcctgccctggtgaaaatgcttggttcaccagtggattctgtgttgttttatgccattacaactctccacaaccttttattacatcaagaaggagctaaaatggcagtgcgtttagctggtgggctgcagaaaatggttgccttgctcaacaaaacaaatgttaaattcttggctattacgacagactgccttcaaattttagcttatggcaaccaagaaagcaagctcatcatactggctagtggtggaccccaagctttagtaaatataatgaggacctatacttacgaaaaactactgtggaccacaagcagagtgctgaaggtgctatctgtctgctctagtaataagccggctattgtagaagctggtggaatgcaagctttaggacttcacctgacagatccaagtcaacgtcttgttcagaactgtctttggactctcaggaatctttcagatgctgcaactaaacaggaagggatggaaggtctccttgggactcttgttcagcttctgggttcagatgatataaatgtggtcacctgtgcagctggaattctttctaacctcacttgcaataattataagaacaagatgatggtctgccaagtgggtggtatagaggctcttgtgcgtactgtccttcgggctggtgacagggaagacatcactgagcctgccatctgtgctcttcgtcatctgaccagccgacaccaagaagcagagatggcccagaatgcagttcgccttcactatggactaccagttgtggttaagctcttacacccaccatcccactggcctctgataaaggctactgttggattgattcgaaatcttgccctttgtcccgcaaatcatgcacctttgcgtgagcagggtgccattccacgactagttcagttgcttgttcgtgcacatcaggatacccagcgccgtacgtccatgggtgggacacagcagcaatttgtggagggggtccgcatggaagaaatagttgaaggttgtaccggagcccttcacatcctagctcgggatgttcacaaccgaattgttatcagaggactaaataccattccattgtttgtgcagctgctttattctcccattgaaaacatccaaagagtagctgcaggggtcctctgtgaacttgctcaggacaaggaagctgcagaagctattgaagctgagggagccacagctcctctgacagagttacttcactctaggaatgaaggtgtggcgacatatgcagctgctgttttgttccgaatgtctgaggacaagccacaagattacaagaaacggctttcagttgagctgaccagctctctcttcagaacagagccaatggcttggaatgagactgctgatcttggacttgatattggtgcccagggagaaccccttggatatcgccaggatgatcctagctatcgttcttttcactctggtggatatggccaggatgccttgggtatggaccccatgatggaacatgagatgggtggccaccaccctggtgctgactatccagttgatgggctgccagatctggggcatgcccaggacctcatggatgggctgcctccaggtgacagcaatcagctggcctggtttgatactgacctgtaaatcatcctttaggtaagaagttttaaaaagccagtttgggtaaaatacttttactctgcctacagaacttcagaaagacttggttggtagggtgggagtggtttaggctatttgtaaatctgccacaaaaacaggtatatactttgaaaggagatgtcttggaacattggaatgttctcagatttctggttgttatgtgatcatgtgtggaagttattaactttaatgttttttgccacagcttttgcaacttaatactcaaatgagtaacatttgctgttttaaacattaatagcagcctttctctctttatacagctgtattgtctgaacttgcattgtgattggcctgtagagttgctgagagggctcgaggggtgggctggtatctcagaaagtgcctgacacactaaccaagctgagtttcctatgggaacaattgaagtaaactttttgttctggtcctttttggtcgaggagtaacaatacaaatggattttgggagtgactcaagaagtgaagaatgcacaagaatggatcacaagatggaatttagcaaaccctagccttgcttgttaaattttttttttttttgcagtaactgttttttaagtctctcgtagtgttaagttatagtgaatactgctacagcaatttctaatttttaagaattgagtaatggtgtagaacactaattaattcataatcactctaattaattgtaatctgaataaagtgtaacaattgtgtagcctttttgtataaaatagacaaatagaaaatggtccaattagtttcctttttaatatgcttaaaataagcaggtggatctatttcatgtttttgatcaaaaactatttgggatatgtatgggtagggtaaatcagtaagaggtgttatttggaaccttgttttggacagtttaccagttgccttttatcccaaagttgttgtaacctgctgtgatacgatgcttcaagagaaaatgcggttataaaaaatggttcagaattaaacttttaattcattcga

SEQ ID NO: 278401 - DNA, 4179 bp, Homo sapiens
atagctgattgatgagttgacatgccatggatccagacagaaaagcggctgttagtcactggcagcaacagtcttacctggactctggaatccattctggtgccactaccacagctccttctctgagtggtaaaggcaatcctgaggaagaggatgtggatacctcccaagtcctgtatgagtgggaacagggattttctcagtccttcactcaagaacaagtagctgatattgatggacagtatgcaatgactcgagctcagagggtacgagctgctatgttccctgagacattagatgagggcatgcagatcccatctacacagtttgatgctgctcatcccactaatgtccagcgtttggctgaaccatcacagatgctgaaacatgcagttgtaaacttgattaactatcaagatgatgcagaacttgccacacgtgcaatccctgaactgacaaaactgctaaatgacgaggaccaggtggtggttaataaggctgcagttatggtccatcagctttctaaaaaggaagcttccagacacgctatcatgcgttctcctcagatggtgtctgctattgtacgtaccatgcagaatacaaatgatgtagaaacagctcgttgtaccgctgggaccttgcataacctttcccatcatcgtgagggcttactggccatctttaagtctggaggcattcctgccctggtgaaaatgcttggttcaccagtggattctgtgttgttttatgccattacaactctccacaaccttttattacatcaagaaggagctaaaatggcagtgcgtttagctggtgggctgcagaaaatggttgccttgctcaacaaaacaaatgttaaattcttggctattacgacagactgccttcaaattttagcttatggcaaccaagaaagcaagctcatcatactggctagtggtggaccccaagctttagtaaatataatgaggacctatacttacgaaaaactactgtggaccacaagcagagtgctgaaggtgctatctgtctgctctagtaataagccggctattgtagaagctggtggaatgcaagctttaggacttcacctgacagatccaagtcaacgtcttgttcagaactgtctttggactctcaggaatctttcagatgctgcaactaaacaggaagggatggaaggtctccttgggactcttgttcagcttctgggttcagatgatataaatgtggtcacctgtgcagctggaattctttctaacctcacttgcaataattataagaacaagatgatggtctgccaagtgggtggtatagaggctcttgtgcgtactgtccttcgggctggtgacagggaagacatcactgagcctgccatctgtgctcttcgtcatctgaccagccgacaccaagaagcagagatggcccagaatgcagttcgccttcactatggactaccagttgtggttaagctcttacacccaccatcccactggcctctgataaaggctactgttggattgattcgaaatcttgccctttgtcccgcaaatcatgcacctttgcgtgagcagggtgccattccacgactagttcagttgcttgttcgtgcacatcaggatacccagcgccgtacgtccatgggtgggacacagcagcaatttgtggagggggtccgcatggaagaaatagttgaaggttgtaccggagcccttcacatcctagctcgggatgttcacaaccgaattgttatcagaggactaaataccattccattgtttgtgcagctgctttattctcccattgaaaacatccaaagagtagctgcaggggtcctctgtgaacttgctcaggacaaggaagctgcagaagctattgaagctgagggagccacagctcctctgacagagttacttcactctaggaatgaaggtgtggcgacatatgcagctgctgttttgttccgaatgtctgaggacaagccacaagattacaagaaacggctttcagttgagctgaccagctctctcttcagaacagagccaatggcttggaatgagactgctgatcttggacttgatattggtgcccagggagaaccccttggatatcgccaggatgatcctagctatcgttcttttcactctggtggatatggccaggatgccttgggtatggaccccatgatggaacatgagatgggtggccaccaccctggtgctgactatccagttgatgggctgccagatctggggcatgcccaggacctcatggatgggctgcctccaggtgacagcaatcagctggcctggtttgatactgacctgtaaatcatcctttaggtaagaagttttaaaaagccagtttgggtaaaatacttttactctgcctacagaacttcagaaagacttggttggtagggtgggagtggtttaggctatttgtaaatctgccacaaaaacaggtatatactttgaaaggagatgtcttggaacattggaatgttctcagatttctggttgttatgtgatcatgtgtggaagttattaactttaatgttttttgccacagcttttgcaacttaatactcaaatgagtaacatttgctgttttaaacattaatagcagcctttctctctttatacagctgtattgtctgaacttgcattgtgattggcctgtagagttgctgagagggctcgaggggtgggctggtatctcagaaagtgcctgacacactaaccaagctgagtttcctatgggaacaattgaagtaaactttttgttctggtcctttttggtcgaggagtaacaatacaaatggattttgggagtgactcaagaagtgaagaatgcacaagaatggatcacaagatggaatttagcaaaccctagccttgcttgttaaattttttttttttttttttaagaatatctgtaatggtactgactttgcttgctttgaagtagctcttttttttttttttttttttttttttttttttgcagtaactgttttttaagtctctcgtagtgttaagttatagtgaatactgctacagcaatttctaatttttaagaattgagtaatggtgtagaacactaattaattcataatcactctaattaattgtaatctgaataaagtgtaacaattgtgtagcctttttgtataaaatagacaaatagaaaatggtccaattagtttcctttttaatatgcttaaaataagcaggtggatctatttcatgtttttgatcaaaaactatttgggatatgtatgggtagggtaaatcagtaagaggtgttatttggaaccttgttttggacagtttaccagttgccttttatcccaaagttgttgtaacctgctgtgatacgatgcttcaagagaaaatgcggttataaaaaatggttcagaattaaacttttaattcattcgaaaaaaaaaaaaaaaaaaaaaaaaaaaaaaaaaaaaaaaaaaaaaaaaaaaaaaaaaaaaaaaaaaaaaaacaaaaaggacaggagaaaaaaaaaaaaaaaaacaaaaaaaaaaaaaaaaaaaaaaaaaaaaggggggggacagaaagaattaactaaccggggggagaggcgccaaattaataagcacccaccaccagtgtataaaaacaaacgcaggccgcataagagaagaatacatagtcaaaactaggaacagaacggggggggaagcccacaaaaccgaggtgatgactcgaaaaaaaatggcaacccgtgtgcctagttagagaaaacaacccccccgagggcatggtacgacaaacacaccgggaaacacacgacgcaaaaaaaagaagcgacgagcagagcagaaaaacaatatgggcgcgaggtagagagacgaataacaccccaatctatgggcgggagacagaaaatcagcctcggatggatatattctcacaacatcctccccgcccccttctcaacaacaggtcgcgaaacagacaagacaacgagaatgaagaaagataatatagagcaacccagcaagacagacaagaagacgaagagacaaaacaacgaaaacacgtaggcaggacaaaacgagaacgccgacagaacgatataggagcagaagagaaaaaagcagacagaacgaaccaaaacaaaagaaggcaacagacgcaacag

SEQ ID NO: 278402 - DNA, 2615 bp, Homo sapiens
  misc_feature (69)..(69): n is a, c, g, or t
cgtagtggtggctgagatatgttgcttgccacaacaatgtaatctggtatacgacagactgcttcaatntagttatggcacccagagagcagctcatcatactggctagtggtggaccccaagctttagtaaatataatgaggacctatacttacgaaaaactactgtggaccacaagcagagtgctgaaggtgctatctgtctgctctagtaataagccggctattgtagaagctggtggaatgcaagctttaggacttcacctgacagatccaagtcaacgtcttgttcagaactgtctttggactctcaggaatctttcagatgctgcaactaaacaggaagggatggaaggtctccttgggactcttgttcagcttctgggttcagatgatataaatgtggtcacctgtgcagctggaattctttctaacctcacttgcaataattataagaacaagatgatggtctgccaagtgggtggtatagaggctcttgtgcgtactgtccttcgggctggtgacagggaagacatcactgagcctgccatctgtgctcttcgtcatctgaccagccgacaccaagaagcagagatggcccagaatgcagttcgccttcactatggactaccagttgtggttaagctcttacacccaccatcccactggcctctgataaaggctactgttggattgattcgaaatcttgccctttgtcccgcaaatcatgcacctttgcgtgagcagggtgccattccacgactagttcagttgcttgttcgtgcacatcaggatacccagcgccgtacgtccatgggtgggacacagcagcaatttgtggagggggtccgcatggaagaaatagttgaaggttgtaccggagcccttcacatcctagctcgggatgttcacaaccgaattgttatcagaggactaaataccattccattgtttgtgcagctgctttattctcccattgaaaacatccaaagagtagctgcaggggtcctctgtgaacttgctcaggacaaggaagctgcagaagctattgaagctgagggagccacagctcctctgacagagttacttcactctaggaatgaaggtgtggcgacatatgcagctgctgttttgttccgaatgtctgaggacaagccacaagattacaagaaacggctttcagttgagctgaccagctctctcttcagaacagagccaatggcttggaatgagactgctgatcttggacttgatattggtgcccagggagaaccccttggatatcgccaggatgatcctagctatcgttcttttcactctggtggatatggccaggatgccttgggtatggaccccatgatggaacatgagatgggtggccaccaccctggtgctgactatccagttgatgggctgccagatctggggcatgcccaggacctcatggatgggctgcctccaggtgacagcaatcagctggcctggtttgatactgacctgtaaatcatcctttaggtaagaagttttaaaaagccagtttgggtaaaatacttttactctgcctacagaacttcagaaagacttggttggtagggtgggagtggtttaggctatttgtaaatctgccacaaaaacaggtatatactttgaaaggagatgtcttggaacattggaatgttctcagatttctggttgttatgtgatcatgtgtggaagttattaactttaatgttttttgccacagcttttgcaacttaatactcaaatgagtaacatttgctgttttaaacattaatagcagcctttctctctttatacagctgtattgtctgaacttgcattgtgattggcctgtagagttgctgagagggctcgaggggtgggctggtatctcagaaagtgcctgacacactaaccaagctgagtttcctatgggaacaattgaagtaaactttttgttctggtcctttttggtcgaggagtaacaatacaaatggattttgggagtgactcaagaagtgaagaatgcacaagaatggatcacaagatggaatttagcaaaccctagccttgcttgttaaattttttttttttttttttaagaatatctgtaatggtactgactttgcttgctttgaagtagctcttttttttttttttttttttttttttttttttgcagtaactgttttttaagtctctcgtagtgttaagttatagtgaatactgctacagcaatttctaatttttaagaattgagtaatggtgtagaacactaattaattcataatcactctaattaattgtaatctgaataaagtgtaacaattgtgtagcctttttgtataaaatagacaaatagaaaatggtccaattagtttcctttttaatatgcttaaaataagcaggtggatctatttcatgtttttgatcaaaaactatttgggatatgtatgggtagggtaaatcagtaagaggtgttatttggaaccttgttttggacagtttaccagttgccttttatcccaaagttgttgtaacctgctgtgatacgatgcttcaagagaaaatgcggttataaaaaatggttcagaattaaacttttaattcattcga

SEQ ID NO: 278403 - DNA, 3312 bp, Homo sapiens
atagctgattgatgagttgacatgccatggatccagacagaaaagcggctgttagtcactggcagcaacagtcttacctggactctggaatccattctggtgccactaccacagctccttctctgagtggtaaaggcaatcctgaggaagaggatgtggatacctcccaagtcctgtatgagtgggaacagggattttctcagtccttcactcaagaacaagtagctgatattgatggacagtatgcaatgactcgagctcagagggtacgagctgctatgttccctgagacattagatgagggcatgcagatcccatctacacagtttgatgctgctcatcccactaatgtccagcgtttggctgaaccatcacagatgctgaaacatgcagttgtaaacttgattaactatcaagatgatgcagaacttgccacacgtgcaatccctgaactgacaaaactgctaaatgacgaggaccaggtggtggttaataaggctgcagttatggtccatcagctttctaaaaaggaagcttccagacacgctatcatgcgttctcctcagatggtgtctgctattgtacgtaccatgcagaatacaaatgatgtagaaacagctcgttgtaccgctgggaccttgcataacctttcccatcatcgtgagggcttactggccatctttaagtctggaggcattcctgccctggtgaaaatgcttggttcaccagtggattctgtgttgttttatgccattacaactctccacaaccttttattacatcaagaaggagctaaaatggcagtgcgtttagctggtgggctgcagaaaatggttgccttgctcaacaaaacaaatgttaaattcttggctattacgacagactgccttcaaattttagcttatggcaaccaagaaagcaagctcatcatactggctagtggtggaccccaagctttagtaaatataatgaggacctatacttacgaaaaactactgtggaccacaagcagagtgctgaaggtgctatctgtctgctctagtaataagccggctattgtagaagctggtggaatgcaagctttaggacttcacctgacagatccaagtcaacgtcttgttcagaactgtctttggactctcaggaatctttcagatgctgcaactaaacaggaagggatggaaggtctccttgggactcttgttcagcttctgggttcagatgatataaatgtggtcacctgtgcagctggaattctttctaacctcacttgcaataattataagaacaagatgatggtctgccaagtgggtggtatagaggctcttgtgcgtactgtccttcgggctggtgacagggaagacatcactgagcctgccatctgtgctcttcgtcatctgaccagccgacaccaagaagcagagatggcccagaatgcagttcgccttcactatggactaccagttgtggttaagctcttacacccaccatcccactggcctctgataaaggctactgttggattgattcgaaatcttgccctttgtcccgcaaatcatgcacctttgcgtgagcagggtgccattccacgactagttcagttgcttgttcgtgcacatcaggatacccagcgccgtacgtccatgggtgggacacagcagcaatttgtggagggggtccgcatggaagaaatagttgaaggttgtaccggagcccttcacatcctagctcgggatgttcacaaccgaattgttatcagaggactaaataccattccattgtttgtgcagctgctttattctcccattgaaaacatccaaagagtagctgcaggggtcctctgtgaacttgctcaggacaaggaagctgcagaagctattgaagctgagggagccacagctcctctgacagagttacttcactctaggaatgaaggtgtggcgacatatgcagctgctgttttgttccgaatgtctgaggacaagccacaagattacaagaaacggctttcagttgagctgaccagctctctcttcagaacagagccaatggcttggaatgagactgctgatcttggacttgatattggtgcccagggagaaccccttggatatcgccaggatgatcctagctatcgttcttttcactctggtggatatggccaggatgccttgggtatggaccccatgatggaacatgagatgggtggccaccaccctggtgctgactatccagttgatgggctgccagatctggggcatgcccaggacctcatggatgggctgcctccaggtgacagcaatcagctggcctggtttgatactgacctgtaaatcatcctttaggtaagaagttttaaaaagccagtttgggtaaaatacttttactctgcctacagaacttcagaaagacttggttggtagggtgggagtggtttaggctatttgtaaatctgccacaaaaacaggtatatactttgaaaggagatgtcttggaacattggaatgttctcagatttctggttgttatgtgatcatgtgtggaagttattaactttaatgttttttgccacagcttttgcaacttaatactcaaatgagtaacatttgctgttttaaacattaatagcagcctttctctctttatacagctgtattgtctgaacttgcattgtgattggcctgtagagttgctgagagggctcgaggggtgggctggtatctcagaaagtgcctgacacactaaccaagctgagtttcctatgggaacaattgaagtaaactttttgttctggtcctttttggtcgaggagtaacaatacaaatggattttgggagtgactcaagaagtgaagaatgcacaagaatggatcacaagatggaatttagcaaaccctagccttgcttgttaaattttttttttttttttttaagaatatctgtaatggtactgactttgcttgctttgaagtagctcttttttttttttttttttttttttttttttttgcagtaactgttttttaagtctctcgtagtgttaagttatagtgaatactgctacagcaatttctaatttttaagaattgagtaatggtgtagaacactaattaattcataatcactctaattaattgtaatctgaataaagtgtaacaattgtgtagcctttttgtataaaatagacaaatagaaaatggtccaattagtttcctttttaatatgcttaaaataagcaggtggatctatttcatgtttttgatcaaaaactatttgggatatgtatggcccaggggatactctagaagttgac

SEQ ID NO: 278404 - DNA, 3077 bp, Homo sapiens
atagctgattgatgagttgacatgccatggatccagacagaaaagcggctgttagtcactggcagcaacagtcttacctggactctggaatccattctggtgccactaccacagctccttctctgagtggtaaaggcaatcctgaggaagaggatgtggatacctcccaagtcctgtatgagtgggaacagggattttctcagtccttcactcaagaacaagtagctgatattgatggacagtatgcaatgactcgagctcagagggtacgagctgctatgttccctgagacattagatgagggcatgcagatcccatctacacagtttgatgctgctcatcccactaatgtccagcgtttggctgaaccatcacagatgctgaaacatgcagttgtaaacttgattaactatcaagatgatgcagaacttgccacacgtgcaatccctgaactgacaaaactgctaaatgacgaggaccaggtggtggttaataaggctgcagttatggtccatcagctttctaaaaaggaagcttccagacacgctatcatgcgttctcctcagatggtgtctgctattgtacgtaccatgcagaatacaaatgatgtagaaacagctcgttgtaccgctgggaccttgcataacctttcccatcatcgtgagggcttactggccatctttaagtctggaggcattcctgccctggtgaaaatgcttggttcaccagtggattctgtgttgttttatgccattacaactctccacaaccttttattacatcaagaaggagctaaaatggcagtgcgtttagctggtgggctgcagaaaatggttgccttgctcaacaaaacaaatgttaaattcttggctattacgacagactgccttcaaattttagcttatggcaaccaagaaagcaagctcatcatactggctagtggtggaccccaagctttagtaaatataatgaggacctatacttacgaaaaactactgtggaccacaagcagagtgctgaaggtgctatctgtctgctctagtaataagccggctattgtagaagctggtggaatgcaagctttaggacttcacctgacagatccaagtcaacgtcttgttcagaactgtctttggactctcaggaatctttcagatgctgcaactaaacaggaagggatggaaggtctccttgggactcttgttcagcttctgggttcagatgatataaatgtggtcacctgtgcagctggaattctttctaacctcacttgcaataattataagaacaagatgatggtctgccaagtgggtggtatagaggctcttgtgcgtactgtccttcgggctggtgacagggaagacatcactgagcctgccatctgtgctcttcgtcatctgaccagccgacaccaagaagcagagatggcccagaatgcagttcgccttcactatggactaccagttgtggttaagctcttacacccaccatcccactggcctctgataaaggctactgttggattgattcgaaatcttgccctttgtcccgcaaatcatgcacctttgcgtgagcagggtgccattccacgactagttcagttgcttgttcgtgcacatcaggatacccagcgccgtacgtccatgggtgggacacagcagcaatttgtggagggggtccgcatggaagaaatagttgaaggttgtaccggagcccttcacatcctagctcgggatgttcacaaccgaattgttatcagaggactaaataccattccattgtttgtgcagctgctttattctcccattgaaaacatccaaagagtagctgcaggggtcctctgtgaacttgctcaggacaaggaagctgcagaagctattgaagctgagggagccacagctcctctgacagagttacttcactctaggaatgaaggtgtggcgacatatgcagctgctgttttgttccgaatgtctgaggacaagccacaagattacaagaaacggctttcagttgagctgaccagctctctcttcagaacagagccaatggcttggaatgagactgctgatcttggacttgatattggtgcccagggagaaccccttggatatcgccaggatgatcctagctatcgttcttttcactctggtggatatggccaggatgccttgggtatggaccccatgatggaacatgagatgggtggccaccaccctggtgctgactatccagttgatgggctgccagatctggggcatgcccaggacctcatggatgggctgcctccaggtgacagcaatcagctggcctggtttgatactgacctgtaaatcatcctttaggtaagaagttttaaaaagccagtttgggtaaaatacttttactctgcctacagaacttcagaaagacttggttggtagggtgggagtggtttaggctatttgtaaatctgccacaaaaacaggtatatactttgaaaggagatgtcttggaacattggaatgttctcagatttctggttgttatgtgatcatgtgtggaagttattaactttaatgttttttgccacagcttttgcaacttaatactcaaatgagtaacatttgctgttttaaacattaatagcagcctttctctctttatacagctgtattgtctgaacttgcattgtgattggcctgtagagttgctgagagggctcgaggggtgggctggtatctcagaaagtgcctgacacactaaccaagctgagtttcctatgggaacaattgaagtaaactttttgttctggtcctttttggtcgaggagtaacaatacaaatggattttgggagtgactcaagaagtgaagaatgcacaagaatggatcacaagatggaatttagcaaaccctagccttgcttgttaaattttttttttttttttttaagaatatctgtaatggtactgactttgcttgctttgaagtagctcttttttttttttttttttttttgggggttcctctagagttcaccctgtgcaggctttcacgctttggcatgtgcccgctcgtttttacaccgttcgttgac

SEQ ID NO: 278405 - DNA, 2153 bp, Homo sapiens
taagtgaagtgttctaggttttatgtccataaaatttccagattgtaatgactaataacatttcagaaaattagggaccataatagggttaccaacatttaattttatgaaaattccctacattttttggtcagtaagagaaacattgagacttgagaagagggaggagatttcacatttcacttttatgggtgcctagaggggagagctgacctgggctgccagaggcagggcatagacccccaaccaattctgggttttccaaatcttagatcagttagagctgcctctgaagaaagggtttatagctaaaaaatattatggaaatccagtgctccagagcattaaacaccccaagacataaaattcagagaatattatttactacagtgtgaatgcctcttgcactctgaattgggaatgtttgcaccacagtggggggcttgccatgttttagctttagatttaattaggttttgtttgtgttttctccttagctgctttattctcccattgaaaacatccaaagagtagctgcaggggtcctctgtgaacttgctcaggacaaggaagctgcagaagctattgaagctgagggagccacagctcctctgacagagttacttcactctaggaatgaaggtgtggcgacatatgcagctgctgttttgttccgaatgtctgaggacaagccacaagattacaagaaacggctttcagttgagctgaccagctctctcttcagaacagagccaatggcttggaatgagactgctgatcttggacttgatattggtgcccagggagaaccccttggatatcgccaggatgatcctagctatcgttcttttcactctggtggatatggccaggatgccttgggtatggaccccatgatggaacatgagatgggtggccaccaccctggtgctgactatccagttgatgggctgccagatctggggcatgcccaggacctcatggatgggctgcctccaggtgacagcaatcagctggcctggtttgatactgacctgtaaatcatcctttaggtaagaagttttaaaaagccagtttgggtaaaatacttttactctgcctacagaacttcagaaagacttggttggtagggtgggagtggtttaggctatttgtaaatctgccacaaaaacaggtatatactttgaaaggagatgtcttggaacattggaatgttctcagatttctggttgttatgtgatcatgtgtggaagttattaactttaatgttttttgccacagcttttgcaacttaatactcaaatgagtaacatttgctgttttaaacattaatagcagcctttctctctttatacagctgtattgtctgaacttgcattgtgattggcctgtagagttgctgagagggctcgaggggtgggctggtatctcagaaagtgcctgacacactaaccaagctgagtttcctatgggaacaattgaagtaaactttttgttctggtcctttttggtcgaggagtaacaatacaaatggattttgggagtgactcaagaagtgaagaatgcacaagaatggatcacaagatggaatttagcaaaccctagccttgcttgttaaattttttttttttttttttaagaatatctgtaatggtactgactttgcttgctttgaagtagctcttttttttttttttttttttttttttttttttgcagtaactgttttttaagtctctcgtagtgttaagttatagtgaatactgctacagcaatttctaatttttaagaattgagtaatggtgtagaacactaattaattcataatcactctaattaattgtaatctgaataaagtgtaacaattgtgtagcctttttgtataaaatagacaaatagaaaatggtccaattagtttcctttttaatatgcttaaaataagcaggtggatctatttcatgtttttgatcaaaaactatttgggatatgtatgggtagggtaaatcagtaagaggtgttatttggaaccttgttttggacagtttaccagttgccttttatcccaaagttgttgtaacctgctgtgatacgatgcttcaagagaaaatgcggttataaaaaatggttcagaattaaacttttaattcattcga

SEQ ID NO: 278406 - DNA, 1612 bp, Homo sapiens
ttacgaggatccccggaacagggacaaggaagctgcagaagctattgaagctgagggagccacagctcctctgacagagttacttcactctaggaatgaaggtgtggcgacatatgcagctgctgttttgttccgaatgtctgaggacaagccacaagattacaagaaacggctttcagttgagctgaccagctctctcttcagaacagagccaatggcttggaatgagactgctgatcttggacttgatattggtgcccagggagaaccccttggatatcgccaggatgatcctagctatcgttcttttcactctggtggatatggccaggatgccttgggtatggaccccatgatggaacatgagatgggtggccaccaccctggtgctgactatccagttgatgggctgccagatctggggcatgcccaggacctcatggatgggctgcctccaggtgacagcaatcagctggcctggtttgatactgacctgtaaatcatcctttaggtaagaagttttaaaaagccagtttgggtaaaatacttttactctgcctacagaacttcagaaagacttggttggtagggtgggagtggtttaggctatttgtaaatctgccacaaaaacaggtatatactttgaaaggagatgtcttggaacattggaatgttctcagatttctggttgttatgtgatcatgtgtggaagttattaactttaatgttttttgccacagcttttgcaacttaatactcaaatgagtaacatttgctgttttaaacattaatagcagcctttctctctttatacagctgtattgtctgaacttgcattgtgattggcctgtagagttgctgagagggctcgaggggtgggctggtatctcagaaagtgcctgacacactaaccaagctgagtttcctatgggaacaattgaagtaaactttttgttctggtcctttttggtcgaggagtaacaatacaaatggattttgggagtgactcaagaagtgaagaatgcacaagaatggatcacaagatggaatttagcaaaccctagccttgcttgttaaattttttttttttttttttaagaatatctgtaatggtactgactttgcttgctttgaagtagctcttttttttttttttttttttttttttttttttgcagtaactgttttttaagtctctcgtagtgttaagttatagtgaatactgctacagcaatttctaatttttaagaattgagtaatggtgtagaacactaattaattcataatcactctaattaattgtaatctgaataaagtgtaacaattgtgtagcctttttgtataaaatagacaaatagaaaatggtccaattagtttcctttttaatatgcttaaaataagcaggtggatctatttcatgtttttgatcaaaaactatttgggatatgtatgggtagggtaaatcagtaagaggtgttatttggaaccttgttttggacagtttaccagttgccttttatcccaaagttgttgtaacctgctgtgatacgatgcttcaagagaaaatgcggttataaaaaatggttcagaattaaacttttaattcattcga

SEQ ID NO: 278407 - DNA, 2636 bp, Homo sapiens
atagctgattgatgagttgacatgccatggatccagacagaaaagcggctgttagtcactggcagcaacagtcttacctggactctggaatccattctggtgccactaccacagctccttctctgagtggtaaaggcaatcctgaggaagaggatgtggatacctcccaagtcctgtatgagtgggaacagggattttctcagtccttcactcaagaacaagtagctgatattgatggacagtatgcaatgactcgagctcagagggtacgagctgctatgttccctgagacattagatgagggcatgcagatcccatctacacagtttgatgctgctcatcccactaatgtccagcgtttggctgaaccatcacagatgctgaaacatgcagttgtaaacttgattaactatcaagatgatgcagaacttgccacacgtgcaatccctgaactgacaaaactgctaaatgacgaggaccaggtggtggttaataaggctgcagttatggtccatcagctttctaaaaaggaagcttccagacacgctatcatgcgttctcctcagatggtgtctgctattgtacgtaccatgcagaatacaaatgatgtagaaacagctcgttgtaccgctgggaccttgcataacctttcccatcatcgtgagggcttactggccatctttaagtctggaggcattcctgccctggtgaaaatgcttggttcaccagtggattctgtgttgttttatgccattacaactctccacaaccttttattacatcaagaaggagctaaaatggcagtgcgtttagctggtgggctgcagaaaatggttgccttgctcaacaaaacaaatgttaaattcttggctattacgacagactgccttcaaattttagcttatggcaaccaagaaagcaagctcatcatactggctagtggtggaccccaagctttagtaaatataatgaggacctatacttacgaaaaactactgtggaccacaagcagagtgctgaaggtgctatctgtctgctctagtaataagccggctattgtagaagctggtggaatgcaagctttaggacttcacctgacagatccaagtcaacgtcttgttcagaactgtctttggactctcaggaatctttcagatgctgcaactaaacaggaagggatggaaggtctccttgggactcttgttcagcttctgggttcagatgatataaatgtggtcacctgtgcagctggaattctttctaacctcacttgcaataattataagaacaagatgatggtctgccaagtgggtggtatagaggctcttgtgcgtactgtccttcgggctggtgacagggaagacatcactgagcctgccatctgtgctcttcgtcatctgaccagccgacaccaagaagcagagatggcccagaatgcagttcgccttcactatggactaccagttgtggttaagctcttacacccaccatcccactggcctctgataaaggctactgttggattgattcgaaatcttgccctttgtcccgcaaatcatgcacctttgcgtgagcagggtgccattccacgactagttcagttgcttgttcgtgcacatcaggatacccagcgccgtacgtccatgggtgggacacagcagcaatttgtggagggggtccgcatggaagaaatagttgaaggttgtaccggagcccttcacatcctagctcgggatgttcacaaccgaattgttatcagaggactaaataccattccattgtttgtgcagctgctttattctcccattgaaaacatccaaagagtagctgcaggggtcctctgtgaacttgctcaggacaaggaagctgcagaagctattgaagctgagggagccacagctcctctgacagagttacttcactctaggaatgaaggtgtggcgacatatgcagctgctgttttgttccgaatgtctgaggacaagccacaagattacaagaaacggctttcagttgagctgaccagctctctcttcagaacagagccaatggcttggaatgagactgctgatcttggacttgatattggtgcccagggagaaccccttggatatcgccaggatgatcctagctatcgttcttttcactctggtggatatggccaggatgccttgggtatggaccccatgatggaacatgagatgggtggccaccaccctggtgctgactatccagttgatgggctgccagatctggggcatgcccaggacctcatggatgggctgcctccaggtgacagcaatcagctggcctggtttgatactgacctgtaaatcatcctttaggagtaacaatacaaatggattttgggagtgactcaagaagtgaagaatgcacaagaatggatcacaagatggaatttagcaaaccctagccttgcttgttaaattttttttttttttttttaagaatatctgtaatggtactgactttgcttgctttgaagtagctcttttttttttttttttttttttaaaaatggtctcgtgtcgcccaggtgtagacgcaaaaccaaacttctttgtgttctcactcataagggggagctaagctatgaggatccgtgtacaatttga

SEQ ID NO: 278408 - DNA, 2241 bp, Homo sapiens
taagtgaagtgttctaggttttatgtccataaaatttccagattgtaatgactaataacatttcagaaaattagggaccataatagggttaccaacatttaattttatgaaaattccctacattttttggtcagtaagagaaacattgagacttgagaagagggaggagatttcacatttcacttttatgggtgcctagaggggagagctgacctgggctgccagaggcagggcatagacccccaaccaattctgggttttccaaatcttagatcagttagagctgcctctgaagaaagggtttatagctaaaaaatattatggaaatccagtgctccagagcattaaacaccccaagacataaaattcagagaatattatttactacagtgtgaatgcctcttgcactctgaattgggaatgtttgcaccacagtggggggcttgccatgttttagctttagatttaattaggttttgtttgtgttttctccttagctgctttattctcccattgaaaacatccaaagagtagctgcaggggtcctctgtgaacttgctcaggacaaggaagctgcagaagctattgaagctgagggagccacagctcctctgacagagttacttcactctaggaatgaaggtgtgggtaagtaaaaaggaaccaaagcctttagcagatgtgtacattgaagtctcagtttttcctcaagggcctttttctccttgtctcttagcgacatatgcagctgctgttttgttccgaatgtctgaggacaagccacaagattacaagaaacggctttcagttgagctgaccagctctctcttcagaacagagccaatggcttggaatgagactgctgatcttggacttgatattggtgcccagggagaaccccttggatatcgccaggatgatcctagctatcgttcttttcactctggtggatatggccaggatgccttgggtatggaccccatgatggaacatgagatgggtggccaccaccctggtgctgactatccagttgatgggctgccagatctggggcatgcccaggacctcatggatgggctgcctccaggtgacagcaatcagctggcctggtttgatactgacctgtaaatcatcctttaggtaagaagttttaaaaagccagtttgggtaaaatacttttactctgcctacagaacttcagaaagacttggttggtagggtgggagtggtttaggctatttgtaaatctgccacaaaaacaggtatatactttgaaaggagatgtcttggaacattggaatgttctcagatttctggttgttatgtgatcatgtgtggaagttattaactttaatgttttttgccacagcttttgcaacttaatactcaaatgagtaacatttgctgttttaaacattaatagcagcctttctctctttatacagctgtattgtctgaacttgcattgtgattggcctgtagagttgctgagagggctcgaggggtgggctggtatctcagaaagtgcctgacacactaaccaagctgagtttcctatgggaacaattgaagtaaactttttgttctggtcctttttggtcgaggagtaacaatacaaatggattttgggagtgactcaagaagtgaagaatgcacaagaatggatcacaagatggaatttagcaaaccctagccttgcttgttaaattttttttttttttttttaagaatatctgtaatggtactgactttgcttgctttgaagtagctcttttttttttttttttttttttttttttttttgcagtaactgttttttaagtctctcgtagtgttaagttatagtgaatactgctacagcaatttctaatttttaagaattgagtaatggtgtagaacactaattaattcataatcactctaattaattgtaatctgaataaagtgtaacaattgtgtagcctttttgtataaaatagacaaatagaaaatggtccaattagtttcctttttaatatgcttaaaataagcaggtggatctatttcatgtttttgatcaaaaactatttgggatatgtatgggtagggtaaatcagtaagaggtgttatttggaaccttgttttggacagtttaccagttgccttttatcccaaagttgttgtaacctgctgtgatacgatgcttcaagagaaaatgcggttataaaaaatggttcagaattaaacttttaattcattcga

SEQ ID NO: 278409 - DNA, 1624 bp, Homo sapiens
cccatggagtatgggaaggcaggagctgccctcctgctggagggattctctttgacttggagcagatgtgtcaggcgaggactgtcttgctgtttggtgactcaagcctagaaagctagacaggaaatcagctgagaccatttgacagggatggggatcctgagtaagattcaaagacagattaatcatttgtccttgtcaagttgatgtggggtcagtgagaaatcttggaagggacctgttctcctgccagagcagctgtgaggttatggaggaagaaccccttggatatcgccaggatgatcctagctatcgttcttttcactctggtggatatggccaggatgccttgggtatggaccccatgatggaacatgagatgggtggccaccaccctggtgctgactatccagttgatgggctgccagatctggggcatgcccaggacctcatggatgggctgcctccaggtgacagcaatcagctggcctggtttgatactgacctgtaaatcatcctttaggtaagaagttttaaaaagccagtttgggtaaaatacttttactctgcctacagaacttcagaaagacttggttggtagggtgggagtggtttaggctatttgtaaatctgccacaaaaacaggtatatactttgaaaggagatgtcttggaacattggaatgttctcagatttctggttgttatgtgatcatgtgtggaagttattaactttaatgttttttgccacagcttttgcaacttaatactcaaatgagtaacatttgctgttttaaacattaatagcagcctttctctctttatacagctgtattgtctgaacttgcattgtgattggcctgtagagttgctgagagggctcgaggggtgggctggtatctcagaaagtgcctgacacactaaccaagctgagtttcctatgggaacaattgaagtaaactttttgttctggtcctttttggtcgaggagtaacaatacaaatggattttgggagtgactcaagaagtgaagaatgcacaagaatggatcacaagatggaatttagcaaaccctagccttgcttgttaaattttttttttttttttttaagaatatctgtaatggtactgactttgcttgctttgaagtagctcttttttttttttttttttttttttttttttttgcagtaactgttttttaagtctctcgtagtgttaagttatagtgaatactgctacagcaatttctaatttttaagaattgagtaatggtgtagaacactaattaattcataatcactctaattaattgtaatctgaataaagtgtaacaattgtgtagcctttttgtataaaatagacaaatagaaaatggtccaattagtttcctttttaatatgcttaaaataagcaggtggatctatttcatgtttttgatcaaaaactatttgggatatgtatgggtagggtaaatcagtaagaggtgttatttggaaccttgttttggacagtttaccagttgccttttatcccaaagttgttgtaacctgctgtgatacgatgcttcaagagaaaatgcggttataaaaaatggttcagaattaaacttttaattcattcga

SEQ ID NO: 278410 - DNA, 1196 bp, Homo sapiens
  misc_feature (1)..(1): n is a, c, g, or t
naccctccgctcttcacccactcatggatgggctgcctccaggtgacagcaatcagctggcctggtttgatactgacctgtaaatcatcctttaggtaagaagttttaaaaagccagtttgggtaaaatacttttactctgcctacagaacttcagaaagacttggttggtagggtgggagtggtttaggctatttgtaaatctgccacaaaaacaggtatatactttgaaaggagatgtcttggaacattggaatgttctcagatttctggttgttatgtgatcatgtgtggaagttattaactttaatgttttttgccacagcttttgcaacttaatactcaaatgagtaacatttgctgttttaaacattaatagcagcctttctctctttatacagctgtattgtctgaacttgcattgtgattggcctgtagagttgctgagagggctcgaggggtgggctggtatctcagaaagtgcctgacacactaaccaagctgagtttcctatgggaacaattgaagtaaactttttgttctggtcctttttggtcgaggagtaacaatacaaatggattttgggagtgactcaagaagtgaagaatgcacaagaatggatcacaagatggaatttagcaaaccctagccttgcttgttaaattttttttttttttttttaagaatatctgtaatggtactgactttgcttgctttgaagtagctcttttttttttttttttttttttttttttttttgcagtaactgttttttaagtctctcgtagtgttaagttatagtgaatactgctacagcaatttctaatttttaagaattgagtaatggtgtagaacactaattaattcataatcactctaattaattgtaatctgaataaagtgtaacaattgtgtagcctttttgtataaaatagacaaatagaaaatggtccaattagtttcctttttaatatgcttaaaataagcaggtggatctatttcatgtttttgatcaaaaactatttgggatatgtatgggtagggtaaatcagtaagaggtgttatttggaaccttgttttggacagtttaccagttgccttttatcccaaagttgttgtaacctgctgtgatacgatgcttcaagagaaaatgcggttataaaaaatggttcagaattaaacttttaattcattcga

SEQ ID NO: 278411 - DNA, 3253 bp, Homo sapiens
atagctgattgatgagttgacatgccatggatccagacagaaaagcggctgttagtcactggcagcaacagtcttacctggactctggaatccattctggtgccactaccacagctccttctctgagtggtaaaggcaatcctgaggaagaggatgtggatacctcccaagtcctgtatgagtgggaacagggattttctcagtccttcactcaagaacaagtagctgatattgatggacagtatgcaatgactcgagctcagagggtacgagctgctatgttccctgagacattagatgagggcatgcagatcccatctacacagtttgatgctgctcatcccactaatgtccagcgtttggctgaaccatcacagatgctgaaacatgcagttgtaaacttgattaactatcaagatgatgcagaacttgccacacgtgcaatccctgaactgacaaaactgctaaatgacgaggaccaggtggtggttaataaggctgcagttatggtccatcagctttctaaaaaggaagcttccagacacgctatcatgcgttctcctcagatggtgtctgctattgtacgtaccatgcagaatacaaatgatgtagaaacagctcgttgtaccgctgggaccttgcataacctttcccatcatcgtgagggcttactggccatctttaagtctggaggcattcctgccctggtgaaaatgcttggttcaccagtggattctgtgttgttttatgccattacaactctccacaaccttttattacatcaagaaggagctaaaatggcagtgcgtttagctggtgggctgcagaaaatggttgccttgctcaacaaaacaaatgttaaattcttggctattacgacagactgccttcaaattttagcttatggcaaccaagaaagcaagctcatcatactggctagtggtggaccccaagctttagtaaatataatgaggacctatacttacgaaaaactactgtggaccacaagcagagtgctgaaggtgctatctgtctgctctagtaataagccggctattgtagaagctggtggaatgcaagctttaggacttcacctgacagatccaagtcaacgtcttgttcagaactgtctttggactctcaggaatctttcagatgctgcaactaaacaggaagggatggaaggtctccttgggactcttgttcagcttctgggttcagatgatataaatgtggtcacctgtgcagctggaattctttctaacctcacttgcaataattataagaacaagatgatggtctgccaagtgggtggtatagaggctcttgtgcgtactgtccttcgggctggtgacagggaagacatcactgagcctgccatctgtgctcttcgtcatctgaccagccgacaccaagaagcagagatggcccagaatgcagttcgccttcactatggactaccagttgtggttaagctcttacacccaccatcccactggcctctgataaaggctactgttggattgattcgaaatcttgccctttgtcccgcaaatcatgcacctttgcgtgagcagggtgccattccacgactagttcagttgcttgttcgtgcacatcaggatacccagcgccgtacgtccatgggtgggacacagcagcaatttgtggagggggtccgcatggaagaaatagttgaaggttgtaccggagcccttcacatcctagctcgggatgttcacaaccgaattgttatcagaggactaaataccattccattgtttgtgcagctgctttattctcccattgaaaacatccaaagagtagctgcaggggtcctctgtgaacttgctcaggacaaggaagctgcagaagctattgaagctgagggagccacagctcctctgacagagttacttcactctaggaatgaaggtgtggcgacatatgcagctgctgttttgttccgaatgtctgaggacaagccacaagattacaagaaacggctttcagttgagctgaccagctctctcttcagaacagagccaatggcttggaatgaggtagggaaatgtgagcagttatttatctggtagtttcctagagcaggtatggcagcttgttctttcctctcaaaacacttagtacacattcatttgcattgatgtttccctggcttgagtatttcttctttatgctgtctagcaactgctctgaggaagaactataatacaagctttaaagagtctgttcagaatcattacaaataagttgtgttatttaaaattataattcataagggagaaagatgaaaaatgttaccagattaaagaagatttttcaaaaggatgtaaggaaagaggcagtgttaaacactgttaagaggacagtttatcagtattttttactaaactttaataaaacttttctatttgaatttctgctatgaatttttcttcagcatttgtcctcagtacaggtggttccttgaaacattgtttctaataaaactagaacatcctgatattttatccattctatagagatcattgatggtacacagacatacagtggattatgtttgttgagtgaatggaaagagagattgttaggtttacaacgatgcagctcttgagaccggagtttaagatcagcctgggcaacatagtgaaaccccatctttagctgggcatggagatggatgcctatagtcctagctactggggagacgggggcaggaggattgcttgaacccaggagttaacagactgcactcagtgacagagccagactccaacacaaaaaaaaaaaaaaaaaaagcaaattaccagtgagtagtgtgttacttgggtttttaataggcatcttattaacatgttccaacttgagcccttaactttctccacctacccccttccacaaacctgttttcactgtcttctctgtcttagttaatgtcagctttgtctgtccagctgctcaggctaaaacttttctttcatataacacatcctatcagcagctcctgtttgtgggtaggcattttgcctttttttttttttttttttttaaactgctatatctctagcatgtagaacagtgcctggcagcacataataggtgcttaatataatatttgttgaaagaacaagtcagtgagtatttttaatgtgaggtgcaaagagaaaaaaaaaatgtatctttgaggtgtggagttttgaagaacttccattttctaagcatttgtgtaatg

SEQ ID NO: 278412 - DNA, 2345 bp, Homo sapiens
atagctgattgatgagttgacatgccatggatccagacagaaaagcggctgttagtcactggcagcaacagtcttacctggactctggaatccattctggtgccactaccacagctccttctctgagtggtaaaggcaatcctgaggaagaggatgtggatacctcccaagtcctgtatgagtgggaacagggattttctcagtccttcactcaagaacaagtagctgatattgatggacagtatgcaatgactcgagctcagagggtacgagctgctatgttccctgagacattagatgagggcatgcagatcccatctacacagtttgatgctgctcatcccactaatgtccagcgtttggctgaaccatcacagatgctgaaacatgcagttgtaaacttgattaactatcaagatgatgcagaacttgccacacgtgcaatccctgaactgacaaaactgctaaatgacgaggaccaggtggtggttaataaggctgcagttatggtccatcagctttctaaaaaggaagcttccagacacgctatcatgcgttctcctcagatggtgtctgctattgtacgtaccatgcagaatacaaatgatgtagaaacagctcgttgtaccgctgggaccttgcataacctttcccatcatcgtgagggcttactggccatctttaagtctggaggcattcctgccctggtgaaaatgcttggttcaccagtggattctgtgttgttttatgccattacaactctccacaaccttttattacatcaagaaggagctaaaatggcagtgcgtttagctggtgggctgcagaaaatggttgccttgctcaacaaaacaaatgttaaattcttggctattacgacagactgccttcaaattttagcttatggcaaccaagaaagcaagctcatcatactggctagtggtggaccccaagctttagtaaatataatgaggacctatacttacgaaaaactactgtggaccacaagcagagtgctgaaggtgctatctgtctgctctagtaataagccggctattgtagaagctggtggaatgcaagctttaggacttcacctgacagatccaagtcaacgtcttgttcagaactgtctttggactctcaggaatctttcagatgctgcaactaaacaggaagggatggaaggtctccttgggactcttgttcagcttctgggttcagatgatataaatgtggtcacctgtgcagctggaattctttctaacctcacttgcaataattataagaacaagatgatggtctgccaagtgggtggtatagaggctcttgtgcgtactgtccttcgggctggtgacagggaagacatcactgagcctgccatctgtgctcttcgtcatctgaccagccgacaccaagaagcagagatggcccagaatgcagttcgccttcactatggactaccagttgtggttaagctcttacacccaccatcccactggcctctgataaaggctactgttggattgattcgaaatcttgccctttgtcccgcaaatcatgcacctttgcgtgagcagggtgccattccacgactagttcagttgcttgttcgtgcacatcaggatacccagcgccgtacgtccatgggtgggacacagcagcaatttgtggagggggtccgcatggaagaaatagttgaaggttgtaccggagcccttcacatcctagctcgggatgttcacaaccgaattgttatcagaggactaaataccattccattgtttgtgcagctgctttattctcccattgaaaacatccaaagagtagctgcaggggtcctctgtgaacttgctcaggacaaggaagctgcagaagctattgaagctgagggagccacagctcctctgacagagttacttcactctaggaatgaaggtgtggcgacatatgcagctgctgttttgttccgaatgtctgaggacaagccacaagattacaagaaacggctttcagttgagctgaccagctctctcttcagaacagagccaatggcttggaatgagactgctgatcttggacttgatattggtgcccagggagaaccccttggatatcgccaggatgatcctagctatcgttcttttcactctggtggatatggccaggatgccttgggtatggaccccatgatggaacatgagatgggtggccaccaccctggtgctgactatccagttgatgggctgccagatctggggcatgcccaggacctcatggatgggctgccttcaatagaagtcgggagtgctccaagctgatccgagctgttcctacccgtgtcagtt

SEQ ID NO: 278413 - DNA, 668 bp, Homo sapiens
tacatcgagctcggtcctggggaacctatcggagtaacaatacaaatggattttgggagtgactcaagaagtgaagaatgcacaagaatggatcacaagatggaatttagcaaaccctagccttgcttgttaaattttttttttttttttttaagaatatctgtaatggtactgactttgcttgctttgaagtagctcttttttttttttttttttttttttttttttttgcagtaactgttttttaagtctctcgtagtgttaagttatagtgaatactgctacagcaatttctaatttttaagaattgagtaatggtgtagaacactaattaattcataatcactctaattaattgtaatctgaataaagtgtaacaattgtgtagcctttttgtataaaatagacaaatagaaaatggtccaattagtttcctttttaatatgcttaaaataagcaggtggatctatttcatgtttttgatcaaaaactatttgggatatgtatgggtagggtaaatcagtaagaggtgttatttggaaccttgttttggacagtttaccagttgccttttatcccaaagttgttgtaacctgctgtgatacgatgcttcaagagaaaatgcggttataaaaaatggttcagaattaaacttttaattcattcga

SEQ ID NO: 278414 - DNA, 779 bp, Homo sapiens
tggctgtatctagagtaacctggtcatcctgctacaccgagggtgggctggtatctcagaaagtgcctgacacactaaccaagctgagtttcctatgggaacaattgaagtaaactttttgttctggtcctttttggtcgaggagtaacaatacaaatggattttgggagtgactcaagaagtgaagaatgcacaagaatggatcacaagatggaatttagcaaaccctagccttgcttgttaaattttttttttttttttttaagaatatctgtaatggtactgactttgcttgctttgaagtagctcttttttttttttttttttttttttttttttttgcagtaactgttttttaagtctctcgtagtgttaagttatagtgaatactgctacagcaatttctaatttttaagaattgagtaatggtgtagaacactaattaattcataatcactctaattaattgtaatctgaataaagtgtaacaattgtgtagcctttttgtataaaatagacaaatagaaaatggtccaattagtttcctttttaatatgcttaaaataagcaggtggatctatttcatgtttttgatcaaaaactatttgggatatgtatgggtagggtaaatcagtaagaggtgttatttggaaccttgttttggacagtttaccagttgccttttatcccaaagttgttgtaacctgctgtgatacgatgcttcaagagaaaatgcggttataaaaaatggttcagaattaaacttttaattcattcga

SEQ ID NO: 278415 - DNA, 1904 bp, Homo sapiens
atagctgattgatgagttgacatgccatggatccagacagaaaagcggctgttagtcactggcagcaacagtcttacctggactctggaatccattctggtgccactaccacagctccttctctgagtggtaaaggcaatcctgaggaagaggatgtggatacctcccaagtcctgtatgagtgggaacagggattttctcagtccttcactcaagaacaagtagctgatattgatggacagtatgcaatgactcgagctcagagggtacgagctgctatgttccctgagacattagatgagggcatgcagatcccatctacacagtttgatgctgctcatcccactaatgtccagcgtttggctgaaccatcacagatgctgaaacatgcagttgtaaacttgattaactatcaagatgatgcagaacttgccacacgtgcaatccctgaactgacaaaactgctaaatgacgaggaccaggtggtggttaataaggctgcagttatggtccatcagctttctaaaaaggaagcttccagacacgctatcatgcgttctcctcagatggtgtctgctattgtacgtaccatgcagaatacaaatgatgtagaaacagctcgttgtaccgctgggaccttgcataacctttcccatcatcgtgagggcttactggccatctttaagtctggaggcattcctgccctggtgaaaatgcttggttcaccagtggattctgtgttgttttatgccattacaactctccacaaccttttattacatcaagaaggagctaaaatggcagtgcgtttagctggtgggctgcagaaaatggttgccttgctcaacaaaacaaatgttaaattcttggctattacgacagactgccttcaaattttagcttatggcaaccaagaaagcaagctcatcatactggctagtggtggaccccaagctttagtaaatataatgaggacctatacttacgaaaaactactgtggaccacaagcagagtgctgaaggtgctatctgtctgctctagtaataagccggctattgtagaagctggtggaatgcaagctttaggacttcacctgacagatccaagtcaacgtcttgttcagaactgtctttggactctcaggaatctttcagatgctgcaactaaacaggaagggatggaaggtctccttgggactcttgttcagcttctgggttcagatgatataaatgtggtcacctgtgcagctggaattctttctaacctcacttgcaataattataagaacaagatgatggtctgccaagtgggtggtatagaggctcttgtgcgtactgtccttcgggctggtgacagggaagacatcactgagcctgccatctgtgctcttcgtcatctgaccagccgacaccaagaagcagagatggcccagaatgcagttcgccttcactatggactaccagttgtggttaagctcttacacccaccatcccactggcctctgataaaggctactgttggattgattcgaaatcttgccctttgtcccgcaaatcatgcacctttgcgtgagcagggtgccattccacgactagttcagttgcttgttcgtgcacatcaggatacccagcgccgtacgtccatgggtgggacacagcagcaatttgtggagggggtccgcatggaagaaatagttgaaggttgtaccggagcccttcacatcctagctcgggatgttcacaaccgaattgttatcagaggactaaataccattccattgtttgtgcagctgctttattctcccattgaaaacatccaaagagtagctgcaggggtcctctgtgaacttgctcacggaacccccagcttacacgcagctacccgatctaccgatccccgatta

SEQ ID NO: 278416 - DNA, 2747 bp, Homo sapiens
gagacaggctgttgttctgttgcacaggctggagtgcagtggtgcaatcatggctcattgtagcctcaacctcccagacattcacaacacttgagtacaccagaatagcaacaggtggcggccacaaaaattgttacactggtaaatacgtactatatttaattttacacagctatgatttaatactgtatctttacagctgtttacatttcttatgactgcaaatggtggaaccatgtggtttgagtgtgtatatgttttgataaattttaacttgttatcatagatttgtatatattttatggtagtaaatgatgaaatagactagtacctacatatattttatacattaatgacatacctttttcttaatttttttcactatttataggttatgcgatttttctgttttttcagtgttgcaaatctccaaacattttccgatatatttattttttaaaattcatgtataatgtcgccacccagttaaaacctatgttgttcaagggtcaactgtattattatagtcatcacgtttcacaattgatctttagaacttattctatccagctgaaactgtatcctctgaccaacaacctccaccccaccacacctaccccaccccctaatctacaatctagttctacgagatcaacttttttagattccacatataagtgagatcatgtggttatgtgcctttctgtgcctgccttattcacttagcctaatgtcctccaggttcatccacgttggcacaaacaagatttccttctttttgtggcagaataatattccattgtgtgtgtatatagatatatggagagactatgtatctatctatctatatatacatacactctagttgaagcaattctaaagttaagtcattgtccaaatatttatagacgtatttacaagttactatgccttactttacagcttttctaagtcatcaaacacacatttttatgaaactggaagaaactaataataataatttttaaaatagaaaatgatttcacaaactttacagaggagaatgccctgtttgttaaccatgtttcttttggcaggagggggtccgcatggaagaaatagttgaaggttgtaccggagcccttcacatcctagctcgggatgttcacaaccgaattgttatcagaggactaaataccattccattgtttgtgcagctgctttattctcccattgaaaacatccaaagagtagctgcaggggtcctctgtgaacttgctcaggacaaggaagctgcagaagctattgaagctgagggagccacagctcctctgacagagttacttcactctaggaatgaaggtgtgggtaagtaaaaaggaaccaaagcctttagcagatgtgtacattgaagtctcagtttttcctcaagggcctttttctccttgtctcttagcgacatatgcagctgctgttttgttccgaatgtctgaggacaagccacaagattacaagaaacggctttcagttgagctgaccagctctctcttcagaacagagccaatggcttggaatgaggtagggaaatgtgagcagttatttatctggtagtttcctagagcaggtatggcagcttgttctttcctctcaaaacacttagtacacattcatttgcattgatgtttccctggcttgagtatttcttctttatgctgtctagcaactgctctgaggaagaactataatacaagctttaaagagtctgttcagaatcattacaaataagttgtgttatttaaaattataattcataagggagaaagatgaaaaatgttaccagattaaagaagatttttcaaaaggatgtaaggaaagaggcagtgttaaacactgttaagaggacagtttatcagtattttttactaaactttaataaaacttttctatttgaatttctgctatgaatttttcttcagcatttgtcctcagtacaggtggttccttgaaacattgtttctaataaaactagaacatcctgatattttatccattctatagagatcattgatggtacacagacatacagtggattatgtttgttgagtgaatggaaagagagattgttaggtttacaacgatgcagctcttgagaccggagtttaagatcagcctgggcaacatagtgaaaccccatctttagctgggcatggagatggatgcctatagtcctagctactggggagacgggggcaggaggattgcttgaacccaggagttaacagactgcactcagtgacagagccagactccaacacaaaaaaaaaaaaaaaaaaagcaaattaccagtgagtagtgtgttacttgggtttttaataggcatcttattaacatgttccaacttgagcccttaactttctccacctacccccttccacaaacctgttttcactgtcttctctgtcttagttaatgtcagctttgtctgtccagctgctcaggctaaaacttttctttcatataacacatcctatcagcagctcctgtttgtgggtaggcattttgcctttttttttttttttttttttaaactgctatatctctagcatgtagaacagtgcctggcagcacataataggtgcttaatataatatttgttgaaagaacaagtcagtgagtatttttaatgtgaggtgcaaagagaaaaaaaaaatgtatctttgaggtgtggagttttgaagaacttccattttctaagcatttgtgtaatg

SEQ ID NO: 278417 - DNA, 1197 bp, Homo sapiens
  misc_feature (1179)..(1179): n is a, c, g, or t
atagctgattgatgagttgacatgccatggatccagacagaaaagcggctgttagtcactggcagcaacagtcttacctggactctggaatccattctggtgccactaccacagctccttctctgagtggtaaaggcaatcctgaggaagaggatgtggatacctcccaagtcctgtatgagtgggaacagggattttctcagtccttcactcaagaacaagtagctgatattgatggacagtatgcaatgactcgagctcagagggtacgagctgctatgttccctgagacattagatgagggcatgcagatcccatctacacagtttgatgctgctcatcccactaatgtccagcgtttggctgaaccatcacagatgctgaaacatgcagttgtaaacttgattaactatcaagatgatgcagaacttgccacacgtgcaatccctgaactgacaaaactgctaaatgacgaggaccaggtggtggttaataaggctgcagttatggtccatcagctttctaaaaaggaagcttccagacacgctatcatgcgttctcctcagatggtgtctgctattgtacgtaccatgcagaatacaaatgatgtagaaacagctcgttgtaccgctgggaccttgcataacctttcccatcatcgtgagggcttactggccatctttaagtctggaggcattcctgccctggtgaaaatgcttggttcaccagtggattctgtgttgttttatgccattacaactctccacaaccttttattacatcaagaaggagctaaaatggcagtgcgtttagctggtgggctgcagaaaatggttgccttgctcaacaaaacaaatgttaaattcttggctattacgacagactgccttcaaattttagcttatggcaaccaagaaagcaagctcatcatactggctagtggtggaccccaagctttagtaaatataatgaggacctatacttacgaaaaactactgtggaccacaagcagagtgctgaaggtgctatctgtctgctctagtaataagccggctattgtagaagctggtggaatgcaagctttaggacttcacctgacagatccaagtcaacgtcttgttcagaactgtctttggactctcaggaatctttcagatgctgcaactaaacagcctctgnagggtcctctagacgcca

SEQ ID NO: 278418 - DNA, 656 bp, Homo sapiens
atagctgattgatgagttgacatgccatggatccagacagaaaagcggctgttagtcactggcagcaacagtcttacctggactctggaatccattctggtgccactaccacagctccttctctgagtggtaaaggcaatcctgaggaagaggatgtggatacctcccaagtcctgtatgagtgggaacagggattttctcagtccttcactcaagaacaagtagctgatattgatggacagtatgcaatgactcgagctcagagggtacgagctgctatgttccctgagacattagatgagggcatgcagatcccatctacacagtttgatgctgctcatcccactaatgtccagcgtttggctgaaccatcacagatgctgaaacatgcagttgtaaacttgattaactatcaagatgatgcagaacttgccacacgtgcaatccctgaactgacaaaactgctaaatgacgaggaccagcattggtccgagagaaattagcaccgtagcggtgatcactatctgtatttttatcctcatccaactgtatcactttgtgcagcagcggagggaggattacgcccaacagcttgaaaatatagcgcattcagtgagaaagccgctttctcaggcggtgcttgatgtcaacctgaa

SEQ ID NO: 278419 - DNA, 379 bp, Homo sapiens
cacccgtttcatcaatagcgcaagtagctgatattgatggacagtatgcaatgactcgagctcagagggtacgagctgctatgttccctgagacattagatgagggcatgcagatcccatctacacagtttgatgctgctcatcccactaatgtccagcgtttggctgaaccatcacagatgctgaaacatgcagttgtaatggcaataaaacaacacacgaatccacgtggtgaaccaagcattttcaccagggcaggaatgcctccagacttaaagatggccgtaagccctcacgatgatgggaaaggttatgcaaggtcccagcggtacacgagctgtttctacatcatttgtattctgcgtgtacgacatatgac

SEQ ID NO: 278420 - DNA, 213 bp, Homo sapiens
cagaattaaacttttaattcattcgattgtgtcactctttctttttttcttgtcattaataaatggtttgtgagggtggtaagtaagtttatccaactcaactttatcctgaactttatcctgagatagatagatacatagtgaagtaatttgttgtagcgatagagagggccctacttctctagatgcaatttgccaagtttctttagcatt

SEQ ID NO: 278421 - DNA, 112 bp, Homo sapiens
gatagtgagtgttgaattaaccttttccagatattgatggacagtatgcaatgactcgagctcagagggtacgagctgctatgttccctgagacattagatgagggcatgca

SEQ ID NO: 278422 - DNA, 498 bp, Homo sapiens
tttttttttaaactgctatatctctagcatgtagaacagtgcctggcagcacataataggtgcttaatataatatttgttgaaagaacaagtcagtgagtatttttaatgtgaggtgcaaagagaaaaaaaaaatgtatctttgaggtgtggagttttgaagaacttccattttctaagcatttgtgtaatgttggagttacttgttccttttgtaatctgaaagtatgctttaaaaaaaattagtgtacttttgagaattttcattttgctttctattcttccttgctttgtgcatgtttatctagactgctgatcttggacttgatattggtgcccagggagaaccccttggatatcgccaggatggtatgtgtctcatatttctcgattaactccagatcaagctaaagttctaaaacttttatcagaagagccggtttgctcatctgggaaaccagtgttggcagaaaagtagtggcttcaattaaaagcagtt

SEQ ID NO: 278423 - DNA, 333 bp, Homo sapiens
cttcctgcttctgcccccaccatcccactggcctctgataaaggctactgttggattgattcgaaatcttgccctttgtcccgcaaatcatgcacctttgcgtgagcagggtgccattccacgactagttcagttgcttgttcgtgcacatcaggatacccagcgccgtacgtccatgggtgggacacagcagcaatttgtggagggggtccgcatggaagaaatagttgaaggttgtaccggagcccttcacatcctagctcgggatgttcacaaccggcagttcctatcacagattgcaatgaccatcacgcatcgactgtacagatgcct

SEQ ID NO: 278424 - DNA, 3248 bp, Homo sapiens
cacccgtttcatcaatagcgcaagtagctgatattgatggacagtatgcaatgactcgagctcagagggtacgagctgctatgttccctgagacattagatgagggcatgcagatcccatctacacagtttgatgctgctcatcccactaatgtccagcgtttggctgaaccatcacagatgctgaaacatgcagttgtaaacttgattaactatcaagatgatgcagaacttgccacacgtgcaatccctgaactgacaaaactgctaaatgacgaggaccaggtggtggttaataaggctgcagttatggtccatcagctttctaaaaaggaagcttccagacacgctatcatgcgttctcctcagatggtgtctgctattgtacgtaccatgcagaatacaaatgatgtagaaacagctcgttgtaccgctgggaccttgcataacctttcccatcatcgtgagggcttactggccatctttaagtctggaggcattcctgccctggtgaaaatgcttggttcaccagtggattctgtgttgttttatgccattacaactctccacaaccttttattacatcaagaaggagctaaaatggcagtgcgtttagctggtgggctgcagaaaatggttgccttgctcaacaaaacaaatgttaaattcttggctattacgacagactgccttcaaattttagcttatggcaaccaagaaagcaagctcatcatactggctagtggtggaccccaagctttagtaaatataatgaggacctatacttacgaaaaactactgtggaccacaagcagagtgctgaaggtgctatctgtctgctctagtaataagccggctattgtagaagctggtggaatgcaagctttaggacttcacctgacagatccaagtcaacgtcttgttcagaactgtctttggactctcaggaatctttcagatgctgcaactaaacaggaagggatggaaggtctccttgggactcttgttcagcttctgggttcagatgatataaatgtggtcacctgtgcagctggaattctttctaacctcacttgcaataattataagaacaagatgatggtctgccaagtgggtggtatagaggctcttgtgcgtactgtccttcgggctggtgacagggaagacatcactgagcctgccatctgtgctcttcgtcatctgaccagccgacaccaagaagcagagatggcccagaatgcagttcgccttcactatggactaccagttgtggttaagctcttacacccaccatcccactggcctctgataaaggctactgttggattgattcgaaatcttgccctttgtcccgcaaatcatgcacctttgcgtgagcagggtgccattccacgactagttcagttgcttgttcgtgcacatcaggatacccagcgccgtacgtccatgggtgggacacagcagcaatttgtggagggggtccgcatggaagaaatagttgaaggttgtaccggagcccttcacatcctagctcgggatgttcacaaccgaattgttatcagaggactaaataccattccattgtttgtgcagctgctttattctcccattgaaaacatccaaagagtagctgcaggggtcctctgtgaacttgctcaggacaaggaagctgcagaagctattgaagctgagggagccacagctcctctgacagagttacttcactctaggaatgaaggtgtggcgacatatgcagctgctgttttgttccgaatgtctgaggacaagccacaagattacaagaaacggctttcagttgagctgaccagctctctcttcagaacagagccaatggcttggaatgagactgctgatcttggacttgatattggtgcccagggagaaccccttggatatcgccaggatgatcctagctatcgttcttttcactctggtggatatggccaggatgccttgggtatggaccccatgatggaacatgagatgggtggccaccaccctggtgctgactatccagttgatgggctgccagatctggggcatgcccaggacctcatggatgggctgcctccaggtgacagcaatcagctggcctggtttgatactgacctgtaaatcatcctttaggtaagaagttttaaaaagccagtttgggtaaaatacttttactctgcctacagaacttcagaaagacttggttggtagggtgggagtggtttaggctatttgtaaatctgccacaaaaacaggtatatactttgaaaggagatgtcttggaacattggaatgttctcagatttctggttgttatgtgatcatgtgtggaagttattaactttaatgttttttgccacagcttttgcaacttaatactcaaatgagtaacatttgctgttttaaacattaatagcagcctttctctctttatacagctgtattgtctgaacttgcattgtgattggcctgtagagttgctgagagggctcgaggggtgggctggtatctcagaaagtgcctgacacactaaccaagctgagtttcctatgggaacaattgaagtaaactttttgttctggtcctttttggtcgaggagtaacaatacaaatggattttgggagtgactcaagaagtgaagaatgcacaagaatggatcacaagatggaatttagcaaaccctagccttgcttgttaaattttttttttttttttttaagaatatctgtaatggtactgactttgcttgctttgaagtagctcttttttttttttttttttttttttttttttttgcagtaactgttttttaagtctctcgtagtgttaagttatagtgaatactgctacagcaatttctaatttttaagaattgagtaatggtgtagaacactaattaattcataatcactctaattaattgtaatctgaataaagtgtaacaattgtgtagcctttttgtataaaatagacaaatagaaaatggtccaattagtttcctttttaatatgcttaaaataagcaggtggatctatttcatgtttttgatcaaaaactatttgggatatgtatgggtagggtaaatcagtaagaggtgttatttggaaccttgttttggacagtttaccagttgccttttatcccaaagttgttgtaacctgctgtgatacgatgcttcaagagaaaatgcggttataaaaaatggttcagaattaaacttttaattcattcga

SEQ ID NO: 278425 - DNA, 2982 bp, Homo sapiens
atagctgattgatgagttgacatgccatggatccagacagaaaagcggctgttagtcactggcagcaacagtcttacctggactctggaatccattctggtgccactaccacagctccttctctgagtggtaaaggcaatcctgaggaagaggatgtggatacctcccaagtcctgtatgagtgggaacagggattttctcagtccttcactcaagaacaagtagctgatattgatggacagtatgcaatgactcgagctcagagggtacgagctgctatgttccctgagacattagatgagggcatgcagatcccatctacacagtttgatgctgctcatcccactaatgtccagcgtttggctgaaccatcacagatgctgaaacatgcagttgtaaacttgattaactatcaagatgatgcagaacttgccacacgtgcaatccctgaactgacaaaactgctaaatgacgaggaccaggtggtggttaataaggctgcagttatggtccatcagctttctaaaaaggaagcttccagacacgctatcatgcgttctcctcagatggtgtctgctattgtacgtaccatgcagaatacaaatgatgtagaaacagctcgttgtaccgctgggaccttgcataacctttcccatcatcgtgagggcttactggccatctttaagtctggaggcattcctgccctggtgaaaatgcttggttcaccagtggattctgtgttgttttatgccattacaactctccacaaccttttattacatcaagaaggagctaaaatggcagtgcgtttagctggtgggctgcagaaaatggttgccttgctcaacaaaacaaatgttaaattcttggctattacgacagactgccttcaaattttagcttatggcaaccaagaaagcaagctcatcatactggctagtggtggaccccaagctttagtaaatataatgaggacctatacttacgaaaaactactgtggaccacaagcagagtgctgaaggtgctatctgtctgctctagtaataagccggctattgtagaagctggtggaatgcaagctttaggacttcacctgacagatccaagtcaacgtcttgttcagaactgtctttggactctcaggaatctttcagatgctgcaactaaacaggaagggatggaaggtctccttgggactcttgttcagcttctgggttcagatgatataaatgtggtcacctgtgcagctggaattctttctaacctcacttgcaataattataagaacaagatgatggtctgccaagtgggtggtatagaggctcttgtgcgtactgtccttcgggctggtgacagggaagacatcactgagcctgccatctgtgctcttcgtcatctgaccagccgacaccaagaagcagagatggcccagaatgcagttcgccttcactatggactaccagttgtggttaagctcttacacccaccatcccactggcctctgataaaggctactgttggattgattcgaaatcttgccctttgtcccgcaaatcatgcacctttgcgtgagcagggtgccattccacgactagttcagttgcttgttcgtgcacatcaggatacccagcgccgtacgtccatgggtgggacacagcagcaatttgtggagggggtccgcatggaagaaatagttgaaggttgtaccggagcccttcacatcctagctcgggatgttcacaaccgaattgttatcagaggactaaataccattccattgtttgtgcagctgctttattctcccattgaaaacatccaaagagtagctgcaggggtcctctgtgaacttgctcaggacaaggaagctgcagaagctattgaagctgagggagccacagctcctctgacagagttacttcactctaggaatgaaggtgtggcgacatatgcagctgctgttttgttccgaatgtctgaggacaagccacaagattacaagaaacggctttcagttgagctgaccagctctctcttcagaacagagccaatggcttggaatgagactgctgatcttggacttgatattggtgcccagggagaaccccttggatatcgccaggatgatcctagctatcgttcttttcactctggtggatatggccaggatgccttgggtatggaccccatgatggaacatgagatgggtggccaccaccctggtgctgactatccagttgatgggctgccagatctggggcatgcccaggacctcatggatgggctgcctccaggtgacagcaatcagctggcctggtttgatactgacctgtaaatcatcctttaggagtaacaatacaaatggattttgggagtgactcaagaagtgaagaatgcacaagaatggatcacaagatggaatttagcaaaccctagccttgcttgttaaattttttttttttttttttaagaatatctgtaatggtactgactttgcttgctttgaagtagctcttttttttttttttttttttttttttttttttgcagtaactgttttttaagtctctcgtagtgttaagttatagtgaatactgctacagcaatttctaatttttaagaattgagtaatggtgtagaacactaattaattcataatcactctaattaattgtaatctgaataaagtgtaacaattgtgtagcctttttgtataaaatagacaaatagaaaatggtccaattagtttcctttttaatatgcttaaaataagcaggtggatctatttcatgtttttgatcaaaaactatttgggatatgtatgggtagggtaaatcagtaagaggtgttatttggaaccttgttttggacagtttaccagttgccttttatcccaaagttgttgtaacctgctgtgatacgatgcttcaagagaaaatgcggttataaaaaatggttcagaattaaacttttaattcattcga

SEQ ID NO: 278426 - DNA, 3141 bp, Homo sapiens
atagctgattgatgagttgacatgccatggatccagacagaaaagcggctgttagtcactggcagcaacagtcttacctggactctggaatccattctggtgccactaccacagctccttctctgagtggtaaaggcaatcctgaggaagaggatgtggatacctcccaagtcctgtatgagtgggaacagggattttctcagtccttcactcaagaacaagtagctgatattgatggacagtatgcaatgactcgagctcagagggtacgagctgctatgttccctgagacattagatgagggcatgcagatcccatctacacagtttgatgctgctcatcccactaatgtccagcgtttggctgaaccatcacagatgctgaaacatgcagttgtaaacttgattaactatcaagatgatgcagaacttgccacacgtgcaatccctgaactgacaaaactgctaaatgacgaggaccaggtggtggttaataaggctgcagttatggtccatcagctttctaaaaaggaagcttccagacacgctatcatgcgttctcctcagatggtgtctgctattgtacgtaccatgcagaatacaaatgatgtagaaacagctcgttgtaccgctgggaccttgcataacctttcccatcatcgtgagggcttactggccatctttaagtctggaggcattcctgccctggtgaaaatgcttggttcaccagtggattctgtgttgttttatgccattacaactctccacaaccttttattacatcaagaaggagctaaaatggcagtgcgtttagctggtgggctgcagaaaatggttgccttgctcaacaaaacaaatgttaaattcttggctattacgacagactgccttcaaattttagcttatggcaaccaagaaagcaagctcatcatactggctagtggtggaccccaagctttagtaaatataatgaggacctatacttacgaaaaactactgtggaccacaagcagagtgctgaaggtgctatctgtctgctctagtaataagccggctattgtagaagctggtggaatgcaagctttaggacttcacctgacagatccaagtcaacgtcttgttcagaactgtctttggactctcaggaatctttcagatgctgcaactaaacaggaagggatggaaggtctccttgggactcttgttcagcttctgggttcagatgatataaatgtggtcacctgtgcagctggaattctttctaacctcacttgcaataattataagaacaagatgatggtctgccaagtgggtggtatagaggctcttgtgcgtactgtccttcgggctggtgacagggaagacatcactgagcctgccatctgtgctcttcgtcatctgaccagccgacaccaagaagcagagatggcccagaatgcagttcgccttcactatggactaccagttgtggttaagctcttacacccaccatcccactggcctctgataaaggctactgttggattgattcgaaatcttgccctttgtcccgcaaatcatgcacctttgcgtgagcagggtgccattccacgactagttcagttgcttgttcgtgcacatcaggatacccagcgccgtacgtccatgggtgggacacagcagcaatttgtggagggggtccgcatggaagaaatagttgaaggttgtaccggagcccttcacatcctagctcgggatgttcacaaccgaattgttatcagaggactaaataccattccattgtttgtgcagctgctttattctcccattgaaaacatccaaagagtagctgcaggggtcctctgtgaacttgctcaggacaaggaagctgcagaagctattgaagctgagggagccacagctcctctgacagagttacttcactctaggaatgaaggtgtggcgacatatgcagctgctgttttgttccgaatgtctgaggacaagccacaagattacaagaaacggctttcagttgagctgaccagctctctcttcagaacagagccaatggcttggaatgagactgctgatcttggacttgatattggtgcccagggagaaccccttggatatcgccaggatgatcctagctatcgttcttttcactctggtggatatggccaggatgccttgggtatggaccccatgatggaacatgagatgggtggccaccaccctggtgctgactatccagttgatgggctgccagatctggggcatgcccaggacctcatggatgggctgcctccaggtgacagcaatcagctggcctggtttgatactgacctgtaaatcatcctttagctgtattgtctgaacttgcattgtgattggcctgtagagttgctgagagggctcgaggggtgggctggtatctcagaaagtgcctgacacactaaccaagctgagtttcctatgggaacaattgaagtaaactttttgttctggtcctttttggtcgaggagtaacaatacaaatggattttgggagtgactcaagaagtgaagaatgcacaagaatggatcacaagatggaatttagcaaaccctagccttgcttgttaaattttttttttttttttttaagaatatctgtaatggtactgactttgcttgctttgaagtagctcttttttttttttttttttttttttttttttttgcagtaactgttttttaagtctctcgtagtgttaagttatagtgaatactgctacagcaatttctaatttttaagaattgagtaatggtgtagaacactaattaattcataatcactctaattaattgtaatctgaataaagtgtaacaattgtgtagcctttttgtataaaatagacaaatagaaaatggtccaattagtttcctttttaatatgcttaaaataagcaggtggatctatttcatgtttttgatcaaaaactatttgggatatgtatgggtagggtaaatcagtaagaggtgttatttggaaccttgttttggacagtttaccagttgccttttatcccaaagttgttgtaacctgctgtgatacgatgcttcaagagaaaatgcggttataaaaaatggttcagaattaaacttttaattcattcga

SEQ ID NO: 278427 - DNA, 3534 bp, Homo sapiens
atagctgattgatgagttgacatgccatggatccagacagaaaagcggctgttagtcactggcagcaacagtcttacctggactctggaatccattctggtgccactaccacagctccttctctgagtggtaaaggcaatcctgaggaagaggatgtggatacctcccaagtcctgtatgagtgggaacagggattttctcagtccttcactcaagaacaagtagctgatattgatggacagtatgcaatgactcgagctcagagggtacgagctgctatgttccctgagacattagatgagggcatgcagatcccatctacacagtttgatgctgctcatcccactaatgtccagcgtttggctgaaccatcacagatgctgaaacatgcagttgtaaacttgattaactatcaagatgatgcagaacttgccacacgtgcaatccctgaactgacaaaactgctaaatgacgaggaccaggtggtggttaataaggctgcagttatggtccatcagctttctaaaaaggaagcttccagacacgctatcatgcgttctcctcagatggtgtctgctattgtacgtaccatgcagaatacaaatgatgtagaaacagctcgttgtaccgctgggaccttgcataacctttcccatcatcgtgagggcttactggccatctttaagtctggaggcattcctgccctggtgaaaatgcttggttcaccagtggattctgtgttgttttatgccattacaactctccacaaccttttattacatcaagaaggagctaaaatggcagtgcgtttagctggtgggctgcagaaaatggttgccttgctcaacaaaacaaatgttaaattcttggctattacgacagactgccttcaaattttagcttatggcaaccaagaaagcaagctcatcatactggctagtggtggaccccaagctttagtaaatataatgaggacctatacttacgaaaaactactgtggaccacaagcagagtgctgaaggtgctatctgtctgctctagtaataagccggctattgtagaagctggtggaatgcaagctttaggacttcacctgacagatccaagtcaacgtcttgttcagaactgtctttggactctcaggaatctttcagatgctgcaactaaacaggaagggatggaaggtctccttgggactcttgttcagcttctgggttcagatgatataaatgtggtcacctgtgcagctggaattctttctaacctcacttgcaataattataagaacaagatgatggtctgccaagtgggtggtatagaggctcttgtgcgtactgtccttcgggctggtgacagggaagacatcactgagcctgccatctgtgctcttcgtcatctgaccagccgacaccaagaagcagagatggcccagaatgcagttcgccttcactatggactaccagttgtggttaagctcttacacccaccatcccactggcctctgataaaggctactgttggattgattcgaaatcttgccctttgtcccgcaaatcatgcacctttgcgtgagcagggtgccattccacgactagttcagttgcttgttcgtgcacatcaggatacccagcgccgtacgtccatgggtgggacacagcagcaatttgtggagggggtccgcatggaagaaatagttgaaggttgtaccggagcccttcacatcctagctcgggatgttcacaaccgaattgttatcagaggactaaataccattccattgtttgtgcagctgctttattctcccattgaaaacatccaaagagtagctgcaggggtcctctgtgaacttgctcaggacaaggaagctgcagaagctattgaagctgagggagccacagctcctctgacagagttacttcactctaggaatgaaggtgtgggtaagtaaaaaggaaccaaagcctttagcagatgtgtacattgaagtctcagtttttcctcaagggcctttttctccttgtctcttagcgacatatgcagctgctgttttgttccgaatgtctgaggacaagccacaagattacaagaaacggctttcagttgagctgaccagctctctcttcagaacagagccaatggcttggaatgagactgctgatcttggacttgatattggtgcccagggagaaccccttggatatcgccaggatgatcctagctatcgttcttttcactctggtggatatggccaggatgccttgggtatggaccccatgatggaacatgagatgggtggccaccaccctggtgctgactatccagttgatgggctgccagatctggggcatgcccaggacctcatggatgggctgcctccaggtgacagcaatcagctggcctggtttgatactgacctgtaaatcatcctttaggtaagaagttttaaaaagccagtttgggtaaaatacttttactctgcctacagaacttcagaaagacttggttggtagggtgggagtggtttaggctatttgtaaatctgccacaaaaacaggtatatactttgaaaggagatgtcttggaacattggaatgttctcagatttctggttgttatgtgatcatgtgtggaagttattaactttaatgttttttgccacagcttttgcaacttaatactcaaatgagtaacatttgctgttttaaacattaatagcagcctttctctctttatacagctgtattgtctgaacttgcattgtgattggcctgtagagttgctgagagggctcgaggggtgggctggtatctcagaaagtgcctgacacactaaccaagctgagtttcctatgggaacaattgaagtaaactttttgttctggtcctttttggtcgaggagtaacaatacaaatggattttgggagtgactcaagaagtgaagaatgcacaagaatggatcacaagatggaatttagcaaaccctagccttgcttgttaaattttttttttttttttttaagaatatctgtaatggtactgactttgcttgctttgaagtagctcttttttttttttttttttttttttttttttttgcagtaactgttttttaagtctctcgtagtgttaagttatagtgaatactgctacagcaatttctaatttttaagaattgagtaatggtgtagaacactaattaattcataatcactctaattaattgtaatctgaataaagtgtaacaattgtgtagcctttttgtataaaatagacaaatagaaaatggtccaattagtttcctttttaatatgcttaaaataagcaggtggatctatttcatgtttttgatcaaaaactatttgggatatgtatgggtagggtaaatcagtaagaggtgttatttggaaccttgttttggacagtttaccagttgccttttatcccaaagttgttgtaacctgctgtgatacgatgcttcaagagaaaatgcggttataaaaaatggttcagaattaaacttttaattcattcga

SEQ ID NO: 278428 - DNA, 3368 bp, Homo sapiens
atagctgattgatgagttgacatgccatggatccagacagaaaagcggctgttagtcactggcagcaacagtcttacctggactctggaatccattctggtgccactaccacagctccttctctgagtggtaaaggcaatcctgaggaagaggatgtggatacctcccaagtcctgtatgagtgggaacagggattttctcagtccttcactcaagaacaagtagctgatattgatggacagtatgcaatgactcgagctcagagggtacgagctgctatgttccctgagacattagatgagggcatgcagatcccatctacacagtttgatgctgctcatcccactaatgtccagcgtttggctgaaccatcacagatgctgaaacatgcagttgtaaacttgattaactatcaagatgatgcagaacttgccacacgtgcaatccctgaactgacaaaactgctaaatgacgaggaccaggtggtggttaataaggctgcagttatggtccatcagctttctaaaaaggaagcttccagacacgctatcatgcgttctcctcagatggtgtctgctattgtacgtaccatgcagaatacaaatgatgtagaaacagctcgttgtaccgctgggaccttgcataacctttcccatcatcgtgagggcttactggccatctttaagtctggaggcattcctgccctggtgaaaatgcttggttcaccagtggattctgtgttgttttatgccattacaactctccacaaccttttattacatcaagaaggagctaaaatggcagtgcgtttagctggtgggctgcagaaaatggttgccttgctcaacaaaacaaatgttaaattcttggctattacgacagactgccttcaaattttagcttatggcaaccaagaaagcaagctcatcatactggctagtggtggaccccaagctttagtaaatataatgaggacctatacttacgaaaaactactgtggaccacaagcagagtgctgaaggtgctatctgtctgctctagtaataagccggctattgtagaagctggtggaatgcaagctttaggacttcacctgacagatccaagtcaacgtcttgttcagaactgtctttggactctcaggaatctttcagatgctgcaactaaacaggaagggatggaaggtctccttgggactcttgttcagcttctgggttcagatgatataaatgtggtcacctgtgcagctggaattctttctaacctcacttgcaataattataagaacaagatgatggtctgccaagtgggtggtatagaggctcttgtgcgtactgtccttcgggctggtgacagggaagacatcactgagcctgccatctgtgctcttcgtcatctgaccagccgacaccaagaagcagagatggcccagaatgcagttcgccttcactatggactaccagttgtggttaagctcttacacccaccatcccactggcctctgataaaggctactgttggattgattcgaaatcttgccctttgtcccgcaaatcatgcacctttgcgtgagcagggtgccattccacgactagttcagttgcttgttcgtgcacatcaggatacccagcgccgtacgtccatgggtgggacacagcagcaatttgtggagggggtccgcatggaagaaatagttgaaggttgtaccggagcccttcacatcctagctcgggatgttcacaaccgaattgttatcagaggactaaataccattccattgtttgtgcagctgctttattctcccattgaaaacatccaaagagtagctgcaggggtcctctgtgaacttgctcaggacaaggaagctgcagaagctattgaagctgagggagccacagctcctctgacagagttacttcactctaggaatgaaggtgtggcgacatatgcagctgctgttttgttccgaatgtctgaggacaagccacaagattacaagaaacggctttcagttgagctgaccagctctctcttcagaacagagccaatggcttggaatgagactgctgatcttggacttgatattggtgcccagggagaaccccttggatatcgccaggatgatcctagctatcgttcttttcactctggtggatatggccaggatgccttgggtatggaccccatgatggaacatgagatgggtggccaccaccctggtgctgactatccagttgatgggctgccagatctggggcatgcccaggacctcatggatgggctgcctccaggtgacagcaatcagctggcctggtttgatactgacctgtaaatcatcctttaggtaagaagttttaaaaagccagtttgggtaaaatacttttactctgcctacagaacttcagaaagacttggttggtagggtgggagtggtttaggctatttgtaaatctgccacaaaaacaggtatatactttgaaaggagatgtcttggaacattggaatgttctcagatttctggttgttatgtgatcatgtgtggaagttattaactttaatgttttttgccacagcttttgcaacttaatactcaaatgagtaacatttgctgttttaaacattaatagcagcctttctctctttatacagctgtattgtctgaacttgcattgtgattggcctgtagagttgctgagagggctcgaggggtgggctggtatctcagaaagtgcctgacacactaaccaagctgagtttcctatgggaacaattgaagtaaactttttgttctggtcctttttggtcgaggagtaacaatacaaatggattttgggagtgactcaagaagtgaagaatgcacaagaatggatcacaagatggaatttagcaaaccctagccttgcttgttaaattttttttttttttttttaagaatatctgtaatggtactgactttgcttgctttgaagtagctcttttttttttttttttttttttttttttttttgcagtaactgttttttaagtctctcgtagtgttaagttatagtgaatactgctacagcaatttctaatttttaagaattgagtaatggtgtagaacactaattaattcataatcactctaattaattgtaatctgaataaagtgtaacaattgtgtagcctttttgtataaaatagacaaatagaaaatggtccaattagtttcctttttaatatgcttaaaataagcaggtggatctatttcatgtttttgatcaaaaactatttgggatatgtatggctctatcgagctacggttgtatcacgtaagacgcagttactagcttcatgctcagctcgactccagtgatcttaaccccgg

SEQ ID NO: 278429 - DNA, 1796 bp, Homo sapiens
cgactcttgggatcccctctgagggggtccgcatggaagaaatagttgaaggttgtaccggagcccttcacatcctagctcgggatgttcacaaccgaattgttatcagaggactaaataccattccattgtttgtgcagctgctttattctcccattgaaaacatccaaagagtagctgcaggggtcctctgtgaacttgctcaggacaaggaagctgcagaagctattgaagctgagggagccacagctcctctgacagagttacttcactctaggaatgaaggtgtggcgacatatgcagctgctgttttgttccgaatgtctgaggacaagccacaagattacaagaaacggctttcagttgagctgaccagctctctcttcagaacagagccaatggcttggaatgagactgctgatcttggacttgatattggtgcccagggagaaccccttggatatcgccaggatgatcctagctatcgttcttttcactctggtggatatggccaggatgccttgggtatggaccccatgatggaacatgagatgggtggccaccaccctggtgctgactatccagttgatgggctgccagatctggggcatgcccaggacctcatggatgggctgcctccaggtgacagcaatcagctggcctggtttgatactgacctgtaaatcatcctttaggtaagaagttttaaaaagccagtttgggtaaaatacttttactctgcctacagaacttcagaaagacttggttggtagggtgggagtggtttaggctatttgtaaatctgccacaaaaacaggtatatactttgaaaggagatgtcttggaacattggaatgttctcagatttctggttgttatgtgatcatgtgtggaagttattaactttaatgttttttgccacagcttttgcaacttaatactcaaatgagtaacatttgctgttttaaacattaatagcagcctttctctctttatacagctgtattgtctgaacttgcattgtgattggcctgtagagttgctgagagggctcgaggggtgggctggtatctcagaaagtgcctgacacactaaccaagctgagtttcctatgggaacaattgaagtaaactttttgttctggtcctttttggtcgaggagtaacaatacaaatggattttgggagtgactcaagaagtgaagaatgcacaagaatggatcacaagatggaatttagcaaaccctagccttgcttgttaaattttttttttttttttttaagaatatctgtaatggtactgactttgcttgctttgaagtagctcttttttttttttttttttttttttttttttttgcagtaactgttttttaagtctctcgtagtgttaagttatagtgaatactgctacagcaatttctaatttttaagaattgagtaatggtgtagaacactaattaattcataatcactctaattaattgtaatctgaataaagtgtaacaattgtgtagcctttttgtataaaatagacaaatagaaaatggtccaattagtttcctttttaatatgcttaaaataagcaggtggatctatttcatgtttttgatcaaaaactatttgggatatgtatgggtagggtaaatcagtaagaggtgttatttggaaccttgttttggacagtttaccagttgccttttatcccaaagttgttgtaacctgctgtgatacgatgcttcaagagaaaatgcggttataaaaaatggttcagaattaaacttttaattcattcga

SEQ ID NO: 278430 - DNA, 3364 bp, Homo sapiens
  misc_feature (3118)..(3118): n is a, c, g, or t
atagctgattgatgagttgacatgccatggatccagacagaaaagcggctgttagtcactggcagcaacagtcttacctggactctggaatccattctggtgccactaccacagctccttctctgagtggtaaaggcaatcctgaggaagaggatgtggatacctcccaagtcctgtatgagtgggaacagggattttctcagtccttcactcaagaacaagtagctgatattgatggacagtatgcaatgactcgagctcagagggtacgagctgctatgttccctgagacattagatgagggcatgcagatcccatctacacagtttgatgctgctcatcccactaatgtccagcgtttggctgaaccatcacagatgctgaaacatgcagttgtaaacttgattaactatcaagatgatgcagaacttgccacacgtgcaatccctgaactgacaaaactgctaaatgacgaggaccaggtggtggttaataaggctgcagttatggtccatcagctttctaaaaaggaagcttccagacacgctatcatgcgttctcctcagatggtgtctgctattgtacgtaccatgcagaatacaaatgatgtagaaacagctcgttgtaccgctgggaccttgcataacctttcccatcatcgtgagggcttactggccatctttaagtctggaggcattcctgccctggtgaaaatgcttggttcaccagtggattctgtgttgttttatgccattacaactctccacaaccttttattacatcaagaaggagctaaaatggcagtgcgtttagctggtgggctgcagaaaatggttgccttgctcaacaaaacaaatgttaaattcttggctattacgacagactgccttcaaattttagcttatggcaaccaagaaagcaagctcatcatactggctagtggtggaccccaagctttagtaaatataatgaggacctatacttacgaaaaactactgtggaccacaagcagagtgctgaaggtgctatctgtctgctctagtaataagccggctattgtagaagctggtggaatgcaagctttaggacttcacctgacagatccaagtcaacgtcttgttcagaactgtctttggactctcaggaatctttcagatgctgcaactaaacaggaagggatggaaggtctccttgggactcttgttcagcttctgggttcagatgatataaatgtggtcacctgtgcagctggaattctttctaacctcacttgcaataattataagaacaagatgatggtctgccaagtgggtggtatagaggctcttgtgcgtactgtccttcgggctggtgacagggaagacatcactgagcctgccatctgtgctcttcgtcatctgaccagccgacaccaagaagcagagatggcccagaatgcagttcgccttcactatggactaccagttgtggttaagctcttacacccaccatcccactggcctctgataaaggctactgttggattgattcgaaatcttgccctttgtcccgcaaatcatgcacctttgcgtgagcagggtgccattccacgactagttcagttgcttgttcgtgcacatcaggatacccagcgccgtacgtccatgggtgggacacagcagcaatttgtggagggggtccgcatggaagaaatagttgaaggttgtaccggagcccttcacatcctagctcgggatgttcacaaccgaattgttatcagaggactaaataccattccattgtttgtgcagctgctttattctcccattgaaaacatccaaagagtagctgcaggggtcctctgtgaacttgctcaggacaaggaagctgcagaagctattgaagctgagggagccacagctcctctgacagagttacttcactctaggaatgaaggtgtggcgacatatgcagctgctgttttgttccgaatgtctgaggacaagccacaagattacaagaaacggctttcagttgagctgaccagctctctcttcagaacagagccaatggcttggaatgagactgctgatcttggacttgatattggtgcccagggagaaccccttggatatcgccaggatgatcctagctatcgttcttttcactctggtggatatggccaggatgccttgggtatggaccccatgatggaacatgagatgggtggccaccaccctggtgctgactatccagttgatgggctgccagatctggggcatgcccaggacctcatggatgggctgcctccaggtgacagcaatcagctggcctggtttgatactgacctgtaaatcatcctttaggagtaacaatacaaatggattttgggagtgactcaagaagtgaagaatgcacaagaatggatcacaagatggaatttagcaaaccctagccttgcttgttaaattttttttttttttttttaagaatatctgtaatggtactgactttgcttgctttgaagtagctctttttttttttttttttttttttgggagaagaaactgtgtttaaaagttctctctcacggataggtgtaacagttatatagagtagaattcgggggtacaagaaatttttataatttttcttaaaaaaaaatgttggagtatagggggggtggttaaacacacttattttcaaaaaatctccactctcttaaattatagtgtgtgataccttgtggaaataagcggtgttaaacagtgtggtgattcgccttttggtgtttttaaaaactagacaaattagaaagggcggccacatgtagttcccctttaaaattgggctaaaataagggcaggggggtctcatataccgtgtttgggacacaacaccctttgcgggcatttgttgggggggggacaccagaaaaagggtgttttttggacaccctttgttgggcacagcttccccaggtggctttttaccccaaggtgtgttgacccggctgggaaacacacttctaagaaaaagtcgggttttacaagggggcttccaaatttaacttttttatttcttttaaaaaaaaaaagatacaggtatgataagcaactagaagaaagaacaagataanaggggcagatataagactacgcacggggaggaagaaagatgaacgccagggtgtgatggaatggtacgcacaggcgtgatatcatcgagggagcgagtatacacgaggaagaaacagtcaagggtagtggagaccaatcgaggatggaattgaaagaacaagtagtggtaaagatcaacataccagagtatggtatgtggttagtcctgttgctaataaatacacggagtagggatgaataatgag

SEQ ID NO: 278431 - DNA, 1998 bp, Homo sapiens
aatgtctctccctgaactaattgcaagttacggggaacttcgggtatataatgtaaataattacagtctaataattgttcctcaaactttacagaggagaatgccctgtttgttaaccatgtttcttttggcaggagggggtccgcatggaagaaatagttgaaggttgtaccggagcccttcacatcctagctcgggatgttcacaaccgaattgttatcagaggactaaataccattccattgtttgtgcagctgctttattctcccattgaaaacatccaaagagtagctgcaggggtcctctgtgaacttgctcaggacaaggaagctgcagaagctattgaagctgagggagccacagctcctctgacagagttacttcactctaggaatgaaggtgtgggtaagtaaaaaggaaccaaagcctttagcagatgtgtacattgaagtctcagtttttcctcaagggcctttttctccttgtctcttagcgacatatgcagctgctgttttgttccgaatgtctgaggacaagccacaagattacaagaaacggctttcagttgagctgaccagctctctcttcagaacagagccaatggcttggaatgagactgctgatcttggacttgatattggtgcccagggagaaccccttggatatcgccaggatgatcctagctatcgttcttttcactctggtggatatggccaggatgccttgggtatggaccccatgatggaacatgagatgggtggccaccaccctggtgctgactatccagttgatgggctgccagatctggggcatgcccaggacctcatggatgggctgcctccaggtgacagcaatcagctggcctggtttgatactgacctgtaaatcatcctttaggtaagaagttttaaaaagccagtttgggtaaaatacttttactctgcctacagaacttcagaaagacttggttggtagggtgggagtggtttaggctatttgtaaatctgccacaaaaacaggtatatactttgaaaggagatgtcttggaacattggaatgttctcagatttctggttgttatgtgatcatgtgtggaagttattaactttaatgttttttgccacagcttttgcaacttaatactcaaatgagtaacatttgctgttttaaacattaatagcagcctttctctctttatacagctgtattgtctgaacttgcattgtgattggcctgtagagttgctgagagggctcgaggggtgggctggtatctcagaaagtgcctgacacactaaccaagctgagtttcctatgggaacaattgaagtaaactttttgttctggtcctttttggtcgaggagtaacaatacaaatggattttgggagtgactcaagaagtgaagaatgcacaagaatggatcacaagatggaatttagcaaaccctagccttgcttgttaaattttttttttttttttttaagaatatctgtaatggtactgactttgcttgctttgaagtagctcttttttttttttttttttttttttttttttttgcagtaactgttttttaagtctctcgtagtgttaagttatagtgaatactgctacagcaatttctaatttttaagaattgagtaatggtgtagaacactaattaattcataatcactctaattaattgtaatctgaataaagtgtaacaattgtgtagcctttttgtataaaatagacaaatagaaaatggtccaattagtttcctttttaatatgcttaaaataagcaggtggatctatttcatgtttttgatcaaaaactatttgggatatgtatgggtagggtaaatcagtaagaggtgttatttggaaccttgttttggacagtttaccagttgccttttatcccaaagttgttgtaacctgctgtgatacgatgcttcaagagaaaatgcggttataaaaaatggttcagaattaaacttttaattcattcga

SEQ ID NO: 278432 - DNA, 1388 bp, Homo sapiens
ttcaatttctacacattacagtactacttggttcccagagagaaccccttggatatcgccaggatgatcctagctatcgttcttttcactctggtggatatggccaggatgccttgggtatggaccccatgatggaacatgagatgggtggccaccaccctggtgctgactatccagttgatgggctgccagatctggggcatgcccaggacctcatggatgggctgcctccaggtgacagcaatcagctggcctggtttgatactgacctgtaaatcatcctttaggtaagaagttttaaaaagccagtttgggtaaaatacttttactctgcctacagaacttcagaaagacttggttggtagggtgggagtggtttaggctatttgtaaatctgccacaaaaacaggtatatactttgaaaggagatgtcttggaacattggaatgttctcagatttctggttgttatgtgatcatgtgtggaagttattaactttaatgttttttgccacagcttttgcaacttaatactcaaatgagtaacatttgctgttttaaacattaatagcagcctttctctctttatacagctgtattgtctgaacttgcattgtgattggcctgtagagttgctgagagggctcgaggggtgggctggtatctcagaaagtgcctgacacactaaccaagctgagtttcctatgggaacaattgaagtaaactttttgttctggtcctttttggtcgaggagtaacaatacaaatggattttgggagtgactcaagaagtgaagaatgcacaagaatggatcacaagatggaatttagcaaaccctagccttgcttgttaaattttttttttttttttttaagaatatctgtaatggtactgactttgcttgctttgaagtagctcttttttttttttttttttttttttttttttttgcagtaactgttttttaagtctctcgtagtgttaagttatagtgaatactgctacagcaatttctaatttttaagaattgagtaatggtgtagaacactaattaattcataatcactctaattaattgtaatctgaataaagtgtaacaattgtgtagcctttttgtataaaatagacaaatagaaaatggtccaattagtttcctttttaatatgcttaaaataagcaggtggatctatttcatgtttttgatcaaaaactatttgggatatgtatgggtagggtaaatcagtaagaggtgttatttggaaccttgttttggacagtttaccagttgccttttatcccaaagttgttgtaacctgctgtgatacgatgcttcaagagaaaatgcggttataaaaaatggttcagaattaaacttttaattcattcga

SEQ ID NO: 278433 - DNA, 3341 bp, Homo sapiens
atagctgattgatgagttgacatgccatggatccagacagaaaagcggctgttagtcactggcagcaacagtcttacctggactctggaatccattctggtgccactaccacagctccttctctgagtggtaaaggcaatcctgaggaagaggatgtggatacctcccaagtcctgtatgagtgggaacagggattttctcagtccttcactcaagaacaagtagctgatattgatggacagtatgcaatgactcgagctcagagggtacgagctgctatgttccctgagacattagatgagggcatgcagatcccatctacacagtttgatgctgctcatcccactaatgtccagcgtttggctgaaccatcacagatgctgaaacatgcagttgtaaacttgattaactatcaagatgatgcagaacttgccacacgtgcaatccctgaactgacaaaactgctaaatgacgaggaccaggtggtggttaataaggctgcagttatggtccatcagctttctaaaaaggaagcttccagacacgctatcatgcgttctcctcagatggtgtctgctattgtacgtaccatgcagaatacaaatgatgtagaaacagctcgttgtaccgctgggaccttgcataacctttcccatcatcgtgagggcttactggccatctttaagtctggaggcattcctgccctggtgaaaatgcttggttcaccagtggattctgtgttgttttatgccattacaactctccacaaccttttattacatcaagaaggagctaaaatggcagtgcgtttagctggtgggctgcagaaaatggttgccttgctcaacaaaacaaatgttaaattcttggctattacgacagactgccttcaaattttagcttatggcaaccaagaaagcaagctcatcatactggctagtggtggaccccaagctttagtaaatataatgaggacctatacttacgaaaaactactgtggaccacaagcagagtgctgaaggtgctatctgtctgctctagtaataagccggctattgtagaagctggtggaatgcaagctttaggacttcacctgacagatccaagtcaacgtcttgttcagaactgtctttggactctcaggaatctttcagatgctgcaactaaacaggaagggatggaaggtctccttgggactcttgttcagcttctgggttcagatgatataaatgtggtcacctgtgcagctggaattctttctaacctcacttgcaataattataagaacaagatgatggtctgccaagtgggtggtatagaggctcttgtgcgtactgtccttcgggctggtgacagggaagacatcactgagcctgccatctgtgctcttcgtcatctgaccagccgacaccaagaagcagagatggcccagaatgcagttcgccttcactatggactaccagttgtggttaagctcttacacccaccatcccactggcctctgataaaggctactgttggattgattcgaaatcttgccctttgtcccgcaaatcatgcacctttgcgtgagcagggtgccattccacgactagttcagttgcttgttcgtgcacatcaggatacccagcgccgtacgtccatgggtgggacacagcagcaatttgtggagggggtccgcatggaagaaatagttgaaggttgtaccggagcccttcacatcctagctcgggatgttcacaaccgaattgttatcagaggactaaataccattccattgtttgtgcagctgctttattctcccattgaaaacatccaaagagtagctgcaggggtcctctgtgaacttgctcaggacaaggaagctgcagaagctattgaagctgagggagccacagctcctctgacagagttacttcactctaggaatgaaggtgtgggtaagtaaaaaggaaccaaagcctttagcagatgtgtacattgaagtctcagtttttcctcaagggcctttttctccttgtctcttagcgacatatgcagctgctgttttgttccgaatgtctgaggacaagccacaagattacaagaaacggctttcagttgagctgaccagctctctcttcagaacagagccaatggcttggaatgaggtagggaaatgtgagcagttatttatctggtagtttcctagagcaggtatggcagcttgttctttcctctcaaaacacttagtacacattcatttgcattgatgtttccctggcttgagtatttcttctttatgctgtctagcaactgctctgaggaagaactataatacaagctttaaagagtctgttcagaatcattacaaataagttgtgttatttaaaattataattcataagggagaaagatgaaaaatgttaccagattaaagaagatttttcaaaaggatgtaaggaaagaggcagtgttaaacactgttaagaggacagtttatcagtattttttactaaactttaataaaacttttctatttgaatttctgctatgaatttttcttcagcatttgtcctcagtacaggtggttccttgaaacattgtttctaataaaactagaacatcctgatattttatccattctatagagatcattgatggtacacagacatacagtggattatgtttgttgagtgaatggaaagagagattgttaggtttacaacgatgcagctcttgagaccggagtttaagatcagcctgggcaacatagtgaaaccccatctttagctgggcatggagatggatgcctatagtcctagctactggggagacgggggcaggaggattgcttgaacccaggagttaacagactgcactcagtgacagagccagactccaacacaaaaaaaaaaaaaaaaaaagcaaattaccagtgagtagtgtgttacttgggtttttaataggcatcttattaacatgttccaacttgagcccttaactttctccacctacccccttccacaaacctgttttcactgtcttctctgtcttagttaatgtcagctttgtctgtccagctgctcaggctaaaacttttctttcatataacacatcctatcagcagctcctgtttgtgggtaggcattttgcctttttttttttttttttttttaaactgctatatctctagcatgtagaacagtgcctggcagcacataataggtgcttaatataatatttgttgaaagaacaagtcagtgagtatttttaatgtgaggtgcaaagagaaaaaaaaaatgtatctttgaggtgtggagttttgaagaacttccattttctaagcatttgtgtaatg

SEQ ID NO: 278434 - DNA, 5777 bp, Homo sapiens
ttcctaggcggcggccgcggcggcggaggcagcagcggcggcggcagtggcggcggcgaaggtggcggcggctcggccagtactcccggcccccgccatttcggactgggagcgagcgcggcgcaggcactgaaggcggcggcggggccagaggctcagcggctcccaggtgcgggagagaggcctgctgaaaatgactgaatataaacttgtggtagttggagctggtggcgtaggcaagagtgccttgacgatacagctaattcagaatcattttgtggacgaatatgatccaacaatagaggattcctacaggaagcaagtagtaattgatggagaaacctgtctcttggatattctcgacacagcaggtcaagaggagtacagtgcaatgagggaccagtacatgaggactggggagggctttctttgtgtatttgccataaataatactaaatcatttgaagatattcaccattatagagaacaaattaaaagagttaaggactctgaagatgtacctatggtcctagtaggaaataaatgtgatttgccttctagaacagtagacacaaaacaggctcaggacttagcaagaagttatggaattccttttattgaaacatcagcaaagacaagacagggtgttgatgatgccttctatacattagttcgagaaattcgaaaacataaagaaaagatgagcaaagatggtaaaaagaagaaaaagaagtcaaagacaaagtgtgtaattatgtaaatacaatttgtacttttttcttaaggcatactagtacaagtggtaatttttgtacattacactaaattattagcatttgttttagcattacctaatttttttcctgctccatgcagactgttagcttttaccttaaatgcttattttaaaatgacagtggaagtttttttttcctcgaagtgccagtattcccagagttttggtttttgaactagcaatgcctgtgaaaaagaaactgaatacctaagatttctgtcttggggtttttggtgcatgcagttgattacttcttatttttcttaccaattgtgaatgttggtgtgaaacaaattaatgaagcttttgaatcatccctattctgtgttttatctagtcacataaatggattaattactaatttcagttgagaccttctaattggtttttactgaaacattgagggaacacaaatttatgggcttcctgatgatgattcttctaggcatcatgtcctatagtttgtcatccctgatgaatgtaaagttacactgttcacaaaggttttgtctcctttccactgctattagtcatggtcactctccccaaaatattatattttttctataaaaagaaaaaaatggaaaaaaattacaaggcaatggaaactattataaggccatttccttttcacattagataaattactataaagactcctaatagctttttcctgttaaggcagacccagtatgaatgggattattatagcaaccattttggggctatatttacatgctactaaatttttataataattgaaaagattttaacaagtataaaaaaattctcataggaattaaatgtagtctccctgtgtcagactgctctttcatagtataactttaaatcttttcttcaacttgagtctttgaagatagttttaattctgcttgtgacattaaaagattatttgggccagttatagcttattaggtgttgaagagaccaaggttgcaagccaggccctgtgtgaaccttgagctttcatagagagtttcacagcatggactgtgtgccccacggtcatccgagtggttgtacgatgcattggttagtcaaaaatggggagggactagggcagtttggatagctcaacaagatacaatctcactctgtggtggtcctgctgacaaatcaagagcattgcttttgtttcttaagaaaacaaactcttttttaaaaattacttttaaatattaactcaaaagttgagattttggggtggtggtgtgccaagacattaattttttttttaaacaatgaagtgaaaaagttttacaatctctaggtttggctagttctcttaacactggttaaattaacattgcataaacacttttcaagtctgatccatatttaataatgctttaaaataaaaataaaaacaatccttttgataaatttaaaatgttacttattttaaaataaatgaagtgagatggcatggtgaggtgaaagtatcactggactaggttgttggtgacttaggttctagataggtgtcttttaggactctgattttgaggacatcacttactatccatttcttcatgttaaaagaagtcatctcaaactcttagttttttttttttacactatgtgatttatattccatttacataaggatacacttatttgtcaagctcagcacaatctgtaaatttttaacctatgttacaccatcttcagtgccagtcttgggcaaaattgtgcaagaggtgaagtttatatttgaatatccattctcgttttaggactcttcttccatattagtgtcatcttgcctccctaccttccacatgccccatgacttgatgcagttttaatacttgtaattcccctaaccataagatttactgctgctgtggatatctccatgaagttttcccactgagtcacatcagaaatgccctacatcttattttcctcagggctcaagagaatctgacagataccataaagggatttgacctaatcactaattttcaggtggtggctgatgctttgaacatctctttgctgcccaatccattagcgacagtaggatttttcaaccctggtatgaatagacagaaccctatccagtggaaggagaatttaataaagatagtgcagaaagaattccttaggtaatctataactaggactactcctggtaacagtaatacattccattgttttagtaaccagaaatcttcatgcaatgaaaaatactttaattcatgaagcttacttttttttttttggtgtcagagtctcgctcttgtcacccaggctggaatgcagtggcgccatctcagctcactgcaaccttccatcttcccaggttcaagcgattctcgtgcctcggcctcctgagtagctgggattacaggcgtgtgcactacactcaactaatttttgtatttttaggagagacggggtttcacctgttggccaggctggtctcgaactcctgacctcaagtgattcacccaccttggcctcataaacctgttttgcagaactcatttattcagcaaatatttattgagtgcctaccagatgccagtcaccgcacaaggcactgggtatatggtatccccaaacaagagacataatcccggtccttaggtagtgctagtgtggtctgtaatatcttactaaggcctttggtatacgacccagagataacacgatgcgtattttagttttgcaaagaaggggtttggtctctgtgccagctctataattgttttgctacgattccactgaaactcttcgatcaagctactttatgtaaatcacttcattgttttaaaggaataaacttgattatattgtttttttatttggcataactgtgattcttttgggacaattactgtacacattaaggtgtatgtcagatattcatattgacccaaatgtgtaatattccagttttctctgcataagtaattaaaatatacttaaaaattaatagttttatctgggtacaaataaacaggtgcctgaactagttcacagacaaggaaacttctatgtaaaaatcactatgatttctgaattgctatgtgaaactacagatctttggaacactgtttaggtagggtgttaagacttacacagtacctcgtttctacacagagaaagaaatggccatacttcaggaactgcagtgcttatgaggggatatttaggcctcttgaatttttgatgtagatgggcatttttttaaggtagtggttaattacctttatgtgaactttgaatggtttaacaaaagatttgtttttgtagagattttaaagggggagaattctagaaataaatgttacctaattattacagccttaaagataaaaatccttgttgaagttttttaaaaaaaagctaaattacatagacttaggcattaacatgtttgtggaagaatatagcagacgtatattgtatcatttgagtgaatgttcccaagtaggcattctaggctctatttaactgagtcacactgcataggaatttagaacctaacttttataggttatcaaaactgttgtcaccattgcacaattttgtcctaatatatacatagaaactttgtggggcatgttaagttacagtttgcacaagttcatctcatttgtattccattgattttttttttcttctaaacattttttcttcaaacagtatataactttttttaggggatttttttttagacagcaaaaactatctgacgatttccatttgtcaaaaagtaatggtttcttgataattgtgtagtaatgttttttagaacccagcagttaccttaaagctgaatttatatttagtaacttctgtgttaatactggatagcatgaattctgcattgagaacctgaatagctgtcataaaatgaaactttctttctaaagaaagatactcacatgagttcttgaagaatagtcataactagattaagatctgtgttttagtttaatagtttgaagtgcctgtttgggataatgataggtaatttagatgaatttaggggaaaaaaagttatctgcagaaatgttgagggcccatctctccccccacacccccacagagctaactgggttacagtgttttatccgaaagtttccaattccactgtcttgtgttttcatgttgaaaatacttttgcatttttcctttgagtgccaatttcttactagtactatttcttaatgtaacatgtttacctggaatgtattttaactatttttgtatagtgtaaactgaaacatgcacattttgtacattgtgctttcttttgtgggacatatgcagtgtgatccagttgttttccatcatttggttgcgctgacctaggaatgttggtcatatcaaacattaaaaatgaccactcttttaattgaaattaacttttaaatgtttataggagtatgtgctgtgaagtgatctaaaatttgtaatatttttgtcatgaactgtactactcctaattattgtaatgtaataaaaatagttacagtgactaaaaaaaaagtgtgtatttattcatgcaaatttgaactgtttgccccgaaatggatatggaatactttataagccatagacactatagtataccagtgaatcttttatgcagcttgttagaagtatccttttattttctaaaaggtgctgtggatattatgtaaaggcgtgtttgcttaaacaattttccatatttagaagtagatgcaaaacaaatctgcctttatgacaaaaaaataggataacattatttatttatttccttttatcaataaggtaattgatacacaacaggtgacttggttttaggcccaaaggtagcagcagcaacattaataatggaaataattgaatagttagttatgtatgttaatgccagtcaccagcaggctatttcaaggtcagaagtaatgactccatacatattatttatttctataactacatttaaatcattaccagg

SEQ ID NO: 278435 - DNA, 679 bp, Homo sapiens
ttcctaggcggcggccgcggcggcggaggcagcagcggcggcggcagtggcggcggcgaaggtggcggcggctcggccagtactcccggcccccgccatttcggactgggagcgagcgcggcgcaggcactgaaggcggcggcggggccagaggctcagcggctcccaggtgcgggagagaggcctgctgaaaatgactgaatataaacttgtggtagttggagctggtggcgtaggcaagagtgccttgacgatacagctaattcagaatcattttgtggacgaatatgatccaacaatagaggtgttattaagcagtatgtaaaaagtccttacaatacttaatacattaagaaaacatacaatttcaagaggaaatccccgagtaatacattattgacattttcagcagttctagttatattgagaagagcatctcatggaattggcagaatgaagatggagattaaatgagatgatgtttgtaatatgcttatgacagtatctggcatataagtaagggctcagtaaatgttgactgctgtaattactattaatagtaatatgattacctttagtaaaagttattagtttctttaggttttttgtttactacaatatagtaaacaaaatctatacttggaatgtatatattgttttgttttgatacatggaatat

SEQ ID NO: 278436 - DNA, 5081 bp, Homo sapiens
  misc_feature (5072)..(5072): n is a, c, g, or t
ttcctaggcggcggccgcggcggcggaggcagcagcggcggcggcagtggcggcggcgaaggtggcggcggctcggccagtactcccggcccccgccatttcggactgggagcgagcgcggcgcaggcactgaaggcggcggcggggccagaggctcagcggctcccaggtgcgggagagaggcctgctgaaaatgactgaatataaacttgtggtagttggagctggtggcgtaggcaagagtgccttgacgatacagctaattcagaatcattttgtggacgaatatgatccaacaatagaggattcctacaggaagcaagtagtaattgatggagaaacctgtctcttggatattctcgacacagcaggtcaagaggagtacagtgcaatgagggaccagtacatgaggactggggagggctttctttgtgtatttgccataaataatactaaatcatttgaagatattcaccattatagagaacaaattaaaagagttaaggactctgaagatgtacctatggtcctagtaggaaataaatgtgatttgccttctagaacagtagacacaaaacaggctcaggacttagcaagaagttatggaattccttttattgaaacatcagcaaagacaagacagggtgttgatgatgccttctatacattagttcgagaaattcgaaaacataaagaaaagatgagcaaagatggtaaaaagaagaaaaagaagtcaaagacaaagtgtgtaattatgtaaatacaatttgtacttttttcttaaggcatactagtacaagtggtaatttttgtacattacactaaattattagcatttgttttagcattacctaatttttttcctgctccatgcagactgttagcttttaccttaaatgcttattttaaaatgacagtggaagtttttttttcctcgaagtgccagtattcccagagttttggtttttgaactagcaatgcctgtgaaaaagaaactgaatacctaagatttctgtcttggggtttttggtgcatgcagttgattacttcttatttttcttaccaattgtgaatgttggtgtgaaacaaattaatgaagcttttgaatcatccctattctgtgttttatctagtcacataaatggattaattactaatttcagttgagaccttctaattggtttttactgaaacattgagggaacacaaatttatgggcttcctgatgatgattcttctaggcatcatgtcctatagtttgtcatccctgatgaatgtaaagttacactgttcacaaaggttttgtctcctttccactgctattagtcatggtcactctccccaaaatattatattttttctataaaaagaaaaaaatggaaaaaaattacaaggcaatggaaactattataaggccatttccttttcacattagataaattactataaagactcctaatagctttttcctgttaaggcagacccagtatgaatgggattattatagcaaccattttggggctatatttacatgctactaaatttttataataattgaaaagattttaacaagtataaaaaaattctcataggaattaaatgtagtctccctgtgtcagactgctctttcatagtataactttaaatcttttcttcaacttgagtctttgaagatagttttaattctgcttgtgacattaaaagattatttgggccagttatagcttattaggtgttgaagagaccaaggttgcaagccaggccctgtgtgaaccttgagctttcatagagagtttcacagcatggactgtgtgccccacggtcatccgagtggttgtacgatgcattggttagtcaaaaatggggagggactagggcagtttggatagctcaacaagatacaatctcactctgtggtggtcctgctgacaaatcaagagcattgcttttgtttcttaagaaaacaaactcttttttaaaaattacttttaaatattaactcaaaagttgagattttggggtggtggtgtgccaagacattaattttttttttaaacaatgaagtgaaaaagttttacaatctctaggtttggctagttctcttaacactggttaaattaacattgcataaacacttttcaagtctgatccatatttaataatgctttaaaataaaaataaaaacaatccttttgataaatttaaaatgttacttattttaaaataaatgaagtgagatggcatggtgaggtgaaagtatcactggactaggttgttggtgacttaggttctagataggtgtcttttaggactctgattttgaggacatcacttactatccatttcttcatgttaaaagaagtcatctcaaactcttagttttttttttttacactatgtgatttatattccatttacataaggatacacttatttgtcaagctcagcacaatctgtaaatttttaacctatgttacaccatcttcagtgccagtcttgggcaaaattgtgcaagaggtgaagtttatatttgaatatccattctcgttttaggactcttcttccatattagtgtcatcttgcctccctaccttccacatgccccatgacttgatgcagttttaatacttgtaattcccctaaccataagatttactgctgctgtggatatctccatgaagttttcccactgagtcacatcagaaatgccctacatcttattttcctcagggctcaagagaatctgacagataccataaagggatttgacctaatcactaattttcaggtggtggctgatgctttgaacatctctttgctgcccaatccattagcgacagtaggatttttcaaccctggtatgaatagacagaaccctatccagtggaaggagaatttaataaagatagtgcagaaagaattccttaggtaatctataactaggactactcctggtaacagtaatacattccattgttttagtaaccagaaatcttcatgcaatgaaaaatactttaattcatgaagcttacttttttttttttggtgtcagagtctcgctcttgtcacccaggctggaatgcagtggcgccatctcagctcactgcaaccttccatcttcccaggttcaagcgattctcgtgcctcggcctcctgagtagctgggattacaggcgtgtgcactacactcaactaatttttgtatttttaggagagacggggtttcacctgttggccaggctggtctcgaactcctgacctcaagtgattcacccaccttggcctcataaacctgttttgcagaactcatttattcagcaaatatttattgagtgcctaccagatgccagtcaccgcacaaggcactgggtatatggtatccccaaacaagagacataatcccggtccttaggtagtgctagtgtggtctgtaatatcttactaaggcctttggtatacgacccagagataacacgatgcgtattttagttttgcaaagaaggggtttggtctctgtgccagctctataattgttttgctacgattccactgaaactcttcgatcaagctactttatgtaaatcacttcattgttttaaaggaataaacttgattatattgtttttttatttggcataactgtgattcttttgggacaattactgtacacattaaggtgtatgtcagatattcatattgacccaaatgtgtaatattccagttttctctgcataagtaattaaaatatacttaaaaattaatagttttatctgggtacaaataaacaggtgcctgaactagttcacagacaaggaaacttctatgtaaaaatcactatgatttctgaattgctatgtgaaactacagatctttggaacactgtttaggtagggtgttaagacttacacagtacctcgtttctacacagagaaagaaatggccatacttcaggaactgcagtgcttatgaggggatatttaggcctcttgaatttttgatgtagatgggcatttttttaaggtagtggttaattacctttatgtgaactttgaatggtttaacaaaagatttgtttttgtagagattttaaagggggagaattctagaaataaatgttacctaattattacagccttaaagataaaaatccttgttgaagttttttaaaaaaaagctaaattacatagacttaggcattaacatgtttgtggaagaatatagcagacgtatattgtatcatttgagtgaatgttcccaagtaggcattctaggctctatttaactgagtcacactgcataggaatttagaacctaacttttataggttatcaaaactgttgtcaccattgcacaattttgtcctaatatatacatagaaactttgtggggcatgttaagttacagtttgcacaagttcatctcatttgtattccattgattttttttttcttctaaacattttttcttcaaacagtatataactttttttaggggatttttttttagacagcaaaaactatctgacgatttccatttgtcaaaaagtaatggtttcttgataattgtgtagtaatgttttttagaacccagcagttaccttaaagctgaatttatatttagtaacttctgtgttaatactggatagcatgaattctgcattgagaacctgaatagctgtcataaaatgaaactttctttctaaagaaagatactcacatgagttcttgaagaatagtcataactagattaagatctgtgttttagtttaatagtttgaagtgcctgtttgggataatgataggtaatttagatgaatttaggggaaaaaaagttatctgcagaaatgttgagggcccatctctccccccacacccccacagagctaactgggttacagtgttttatccgaaagtttccaattccactgtcttgtgttttcatgttgaaaatacttttgcatttttcctttgagtgccaatttcttactagtactatttcttaatgtaacatgtttacctggaatgtattttaactatttttgtatagtgtaaactgattgggatcctctagancacctccat

SEQ ID NO: 278437 - DNA, 5260 bp, Homo sapiens
ttcctaggcggcggccgcggcggcggaggcagcagcggcggcggcagtggcggcggcgaaggtggcggcggctcggccagtactcccggcccccgccatttcggactgggagcgagcgcggcgcaggcactgaaggcggcggcggggccagaggctcagcggctcccaggtgcgggagagaggcctgctgaaaatgactgaatataaacttgtggtagttggagctggtggcgtaggcaagagtgccttgacgatacagctaattcagaatcattttgtggacgaatatgatccaacaatagaggattcctacaggaagcaagtagtaattgatggagaaacctgtctcttggatattctcgacacagcaggtcaagaggagtacagtgcaatgagggaccagtacatgaggactggggagggctttctttgtgtatttgccataaataatactaaatcatttgaagatattcaccattatagagaacaaattaaaagagttaaggactctgaagatgtacctatggtcctagtaggaaataaatgtgatttgccttctagaacagtagacacaaaacaggctcaggacttagcaagaagttatggaattccttttattgaaacatcagcaaagacaagacagggtgttgatgatgccttctatacattagttcgagaaattcgaaaacataaagaaaagatgagcaaagatggtaaaaagaagaaaaagaagtcaaagacaaagtgtgtaattatgtaaatacaatttgtacttttttcttaaggcatactagtacaagtggtaatttttgtacattacactaaattattagcatttgttttagcattacctaatttttttcctgctccatgcagactgttagcttttaccttaaatgcttattttaaaatgacagtggaagtttttttttcctcgaagtgccagtattcccagagttttggtttttgaactagcaatgcctgtgaaaaagaaactgaatacctaagatttctgtcttggggtttttggtgcatgcagttgattacttcttatttttcttaccaattgtgaatgttggtgtgaaacaaattaatgaagcttttgaatcatccctattctgtgttttatctagtcacataaatggattaattactaatttcagttgagaccttctaattggtttttactgaaacattgagggaacacaaatttatgggcttcctgatgatgattcttctaggcatcatgtcctatagtttgtcatccctgatgaatgtaaagttacactgttcacaaaggttttgtctcctttccactgctattagtcatggtcactctccccaaaatattatattttttctataaaaagaaaaaaatggaaaaaaattacaaggcaatggaaactattataaggccatttccttttcacattagataaattactataaagactcctaatagctttttcctgttaaggcagacccagtatgaatgggattattatagcaaccattttggggctatatttacatgctactaaatttttataataattgaaaagattttaacaagtataaaaaaattctcataggaattaaatgtagtctccctgtgtcagactgctctttcatagtataactttaaatcttttcttcaacttgagtctttgaagatagttttaattctgcttgtgacattaaaagattatttgggccagttatagcttattaggtgttgaagagaccaaggttgcaagccaggccctgtgtgaaccttgagctttcatagagagtttcacagcatggactgtgtgccccacggtcatccgagtggttgtacgatgcattggttagtcaaaaatggggagggactagggcagtttggatagctcaacaagatacaatctcactctgtggtggtcctgctgacaaatcaagagcattgcttttgtttcttaagaaaacaaactcttttttaaaaattacttttaaatattaactcaaaagttgagattttggggtggtggtgtgccaagacattaattttttttttaaacaatgaagtgaaaaagttttacaatctctaggtttggctagttctcttaacactggttaaattaacattgcataaacacttttcaagtctgatccatatttaataatgctttaaaataaaaataaaaacaatccttttgataaatttaaaatgttacttattttaaaataaatgaagtgagatggcatggtgaggtgaaagtatcactggactaggttgttggtgacttaggttctagataggtgtcttttaggactctgattttgaggacatcacttactatccatttcttcatgttaaaagaagtcatctcaaactcttagttttttttttttacactatgtgatttatattccatttacataaggatacacttatttgtcaagctcagcacaatctgtaaatttttaacctatgttacaccatcttcagtgccagtcttgggcaaaattgtgcaagaggtgaagtttatatttgaatatccattctcgttttaggactcttcttccatattagtgtcatcttgcctccctaccttccacatgccccatgacttgatgcagttttaatacttgtaattcccctaaccataagatttactgctgctgtggatatctccatgaagttttcccactgagtcacatcagaaatgccctacatcttattttcctcagggctcaagagaatctgacagataccataaagggatttgacctaatcactaattttcaggtggtggctgatgctttgaacatctctttgctgcccaatccattagcgacagtaggatttttcaaccctggtatgaatagacagaaccctatccagtggaaggagaatttaataaagatagtgcagaaagaattccttaggtaatctataactaggactactcctggtaacagtaatacattccattgttttagtaaccagaaatcttcatgcaatgaaaaatactttaattcatgaagcttacttttttttttttggtgtcagagtctcgctcttgtcacccaggctggaatgcagtggcgccatctcagctcactgcaaccttccatcttcccaggttcaagcgattctcgtgcctcggcctcctgagtagctgggattacaggcgtgtgcactacactcaactaatttttgtatttttaggagagacggggtttcacctgttggccaggctggtctcgaactcctgacctcaagtgattcacccaccttggcctcataaacctgttttgcagaactcatttattcagcaaatatttattgagtgcctaccagatgccagtcaccgcacaaggcactgggtatatggtatccccaaacaagagacataatcccggtccttaggtagtgctagtgtggtctgtaatatcttactaaggcctttggtatacgacccagagataacacgatgcgtattttagttttgcaaagaaggggtttggtctctgtgccagctctataattgttttgctacgattccactgaaactcttcgatcaagctactttatgtaaatcacttcattgttttaaaggaataaacttgattatattgtttttttatttggcataactgtgattcttttgggacaattactgtacacattaaggtgtatgtcagatattcatattgacccaaatgtgtaatattccagttttctctgcataagtaattaaaatatacttaaaaattaatagttttatctgggtacaaataaacaggtgcctgaactagttcacagacaaggaaacttctatgtaaaaatcactatgatttctgaattgctatgtgaaactacagatctttggaacactgtttaggtagggtgttaagacttacacagtacctcgtttctacacagagaaagaaatggccatacttcaggaactgcagtgcttatgaggggatatttaggcctcttgaatttttgatgtagatgggcatttttttaaggtagtggttaattacctttatgtgaactttgaatggtttaacaaaagatttgtttttgtagagattttaaagggggagaattctagaaataaatgttacctaattattacagccttaaagataaaaatccttgttgaagttttttaaaaaaaagctaaattacatagacttaggcattaacatgtttgtggaagaatatagcagacgtatattgtatcatttgagtgaatgttcccaagtaggcattctaggctctatttaactgagtcacactgcataggaatttagaacctaacttttataggttatcaaaactgttgtcaccattgcacaattttgtcctaatatatacatagaaactttgtggggcatgttaagttacagtttgcacaagttcatctcatttgtattccattgattttttttttcttctaaacattttttcttcaaacagtatataactttttttaggggatttttttttagacagcaaaaactatctgacgatttccatttgtcattaccttaaagctgaatttatatttagtaacttctgtgttaatactggatagcatgaattctgcattgagaacctgaatagctgtcataaaatgaaactttctttctaaagaaagatactcacatgagttcttgaagaatagtcataactagattaagatctgtgttttagtttaatagtttgaagtgcctgtttgggataatgataggtaatttagatgaatttaggggaaaaaaagttatctgcagaaatgttgagggcccatctctccccccacacccccacagagctaactgggttacagtgttttatccgaaagtttccaattccactgtcttgtgttttcatgttgaaaatacttttgcatttttcctttgagtgccaatttcttactagtactatttcttaatgtaacatgtttacctggaatgtattttaactatttttgtatagtgtaaactgaaacatgcacattttgtacattgtgctttcttttgtgggacatatgcagtgtgatccagttgttttccatcatttggttgcgctgacctaggaatgttggtcatatcaaacattaaaaatgaccactcttttaattgaaattaacttttaaatgtttataggagtatgtgctgtgaagtgatctaaaatttgtaatatttttgtcatgaactgtactactcctaattattgtaatgtaataaaaatagttacagtgac

SEQ ID NO: 278438 - DNA, 4718 bp, Homo sapiens
  misc_feature (4700)..(4700): n is a, c, g, or t
  misc_feature (4714)..(4714): n is a, c, g, or t
ttcctaggcggcggccgcggcggcggaggcagcagcggcggcggcagtggcggcggcgaaggtggcggcggctcggccagtactcccggcccccgccatttcggactgggagcgagcgcggcgcaggcactgaaggcggcggcggggccagaggctcagcggctcccaggtgcgggagagaggcctgctgaaaatgactgaatataaacttgtggtagttggagctggtggcgtaggcaagagtgccttgacgatacagctaattcagaatcattttgtggacgaatatgatccaacaatagaggattcctacaggaagcaagtagtaattgatggagaaacctgtctcttggatattctcgacacagcaggtcaagaggagtacagtgcaatgagggaccagtacatgaggactggggagggctttctttgtgtatttgccataaataatactaaatcatttgaagatattcaccattatagagaacaaattaaaagagttaaggactctgaagatgtacctatggtcctagtaggaaataaatgtgatttgccttctagaacagtagacacaaaacaggctcaggacttagcaagaagttatggaattccttttattgaaacatcagcaaagacaagacagggtgttgatgatgccttctatacattagttcgagaaattcgaaaacataaagaaaagatgagcaaagatggtaaaaagaagaaaaagaagtcaaagacaaagtgtgtaattatgtaaatacaatttgtacttttttcttaaggcatactagtacaagtggtaatttttgtacattacactaaattattagcatttgttttagcattacctaatttttttcctgctccatgcagactgttagcttttaccttaaatgcttattttaaaatgacagtggaagtttttttttcctcgaagtgccagtattcccagagttttggtttttgaactagcaatgcctgtgaaaaagaaactgaatacctaagatttctgtcttggggtttttggtgcatgcagttgattacttcttatttttcttaccaattgtgaatgttggtgtgaaacaaattaatgaagcttttgaatcatccctattctgtgttttatctagtcacataaatggattaattactaatttcagttgagaccttctaattggtttttactgaaacattgagggaacacaaatttatgggcttcctgatgatgattcttctaggcatcatgtcctatagtttgtcatccctgatgaatgtaaagttacactgttcacaaaggttttgtctcctttccactgctattagtcatggtcactctccccaaaatattatattttttctataaaaagaaaaaaatggaaaaaaattacaaggcaatggaaactattataaggccatttccttttcacattagataaattactataaagactcctaatagctttttcctgttaaggcagacccagtatgaatgggattattatagcaaccattttggggctatatttacatgctactaaatttttataataattgaaaagattttaacaagtataaaaaaattctcataggaattaaatgtagtctccctgtgtcagactgctctttcatagtataactttaaatcttttcttcaacttgagtctttgaagatagttttaattctgcttgtgacattaaaagattatttgggccagttatagcttattaggtgttgaagagaccaaggttgcaagccaggccctgtgtgaaccttgagctttcatagagagtttcacagcatggactgtgtgccccacggtcatccgagtggttgtacgatgcattggttagtcaaaaatggggagggactagggcagtttggatagctcaacaagatacaatctcactctgtggtggtcctgctgacaaatcaagagcattgcttttgtttcttaagaaaacaaactcttttttaaaaattacttttaaatattaactcaaaagttgagattttggggtggtggtgtgccaagacattaattttttttttaaacaatgaagtgaaaaagttttacaatctctaggtttggctagttctcttaacactggttaaattaacattgcataaacacttttcaagtctgatccatatttaataatgctttaaaataaaaataaaaacaatccttttgataaatttaaaatgttacttattttaaaataaatgaagtgagatggcatggtgaggtgaaagtatcactggactaggttgttggtgacttaggttctagataggtgtcttttaggactctgattttgaggacatcacttactatccatttcttcatgttaaaagaagtcatctcaaactcttagttttttttttttacactatgtgatttatattccatttacataaggatacacttatttgtcaagctcagcacaatctgtaaatttttaacctatgttacaccatcttcagtgccagtcttgggcaaaattgtgcaagaggtgaagtttatatttgaatatccattctcgttttaggactcttcttccatattagtgtcatcttgcctccctaccttccacatgccccatgacttgatgcagttttaatacttgtaattcccctaaccataagatttactgctgctgtggatatctccatgaagttttcccactgagtcacatcagaaatgccctacatcttattttcctcagggctcaagagaatctgacagataccataaagggatttgacctaatcactaattttcaggtggtggctgatgctttgaacatctctttgctgcccaatccattagcgacagtaggatttttcaaccctggtatgaatagacagaaccctatccagtggaaggagaatttaataaagatagtgcagaaagaattccttaggtaatctataactaggactactcctggtaacagtaatacattccattgttttagtaaccagaaatcttcatgcaatgaaaaatactttaattcatgaagcttacttttttttttttggtgtcagagtctcgctcttgtcacccaggctggaatgcagtggcgccatctcagctcactgcaaccttccatcttcccaggttcaagcgattctcgtgcctcggcctcctgagtagctgggattacaggcgtgtgcactacactcaactaatttttgtatttttaggagagacggggtttcacctgttggccaggctggtctcgaactcctgacctcaagtgattcacccaccttggcctcataaacctgttttgcagaactcatttattcagcaaatatttattgagtgcctaccagatgccagtcaccgcacaaggcactgggtatatggtatccccaaacaagagacataatcccggtccttaggtagtgctagtgtggtctgtaatatcttactaaggcctttggtatacgacccagagataacacgatgcgtattttagttttgcaaagaaggggtttggtctctgtgccagctctataattgttttgctacgattccactgaaactcttcgatcaagctactttatgtaaatcacttcattgttttaaaggaataaacttgattatattgtttttttatttggcataactgtgattcttttgggacaattactgtacacattaaggtgtatgtcagatattcatattgacccaaatgtgtaatattccagttttctctgcataagtaattaaaatatacttaaaaattaatagttttatctgggtacaaataaacaggtgcctgaactagttcacagacaaggaaacttctatgtaaaaatcactatgatttctgaattgctatgtgaaactacagatctttggaacactgtttaggtagggtgttaagacttacacagtacctcgtttctacacagagaaagaaatggccatacttcaggaactgcagtgcttatgaggggatatttaggcctcttgaatttttgatgtagatgggcatttttttaaggtagtggttaattacctttatgtgaactttgaatggtttaacaaaagatttgtttttgtagagattttaaagggggagaattctagaaataaatgttacctaattattacagccttaaagataaaaatccttgttgaagttttttaaaaaaaagctaaattacatagacttaggcattaacatgtttgtggaagaatatagcagacgtatattgtatcatttgagtgaatgttcccaagtaggcattctaggctctatttaactgagtcacactgcataggaatttagaacctaacttttataggttatcaaaactgttgtcaccattgcacaattttgtcctaatatatacatagaaactttgtggggcatgttaagttacagtttgcacaagttcatctcatttgtattccattgattttttttttcttctaaacattttttcttcaaacagtatataactttttttaggggatttttttttagacagcaaaaactatctgacgatttccatttgtcaaaaagtaatggtttcttgataattgtgtagtaatgttttttagaacccagcagttaccttaaagctgaatttatatttagtaacttctgtgttaatactggatagcatgaattctgcattgagaacctgaatagctgtcatcatactagataagatctgngtttagtttaaagnttga

SEQ ID NO: 278439 - DNA, 894 bp, Homo sapiens
aatcagtttacacaagggatcgacatttcttccattccacactttcacatgacaatatataactttttttaggggatttttttttagacagcaaaaactatctgacgatttccatttgtcaaaaagtaatggtttcttgataattgtgtagtaatgttttttagaacccagcagttaccttaaagctgaatttatatttagtaacttctgtgttaatactggatagcatgaattctgcattgagaacctgaatagctgtcataaaatgaaactttctttctaaagaaagatactcacatgagttcttgaagaatagtcataactagattaagatctgtgttttagtttaatagtttgaagtgcctgtttgggataatgataggtaatttagatgaatttaggggaaaaaaagttatctgcagaaatgttgagggcccatctctccccccacacccccacagagctaactgggttacagtgttttatccgaaagtttccaattccactgtcttgtgttttcatgttgaaaatacttttgcatttttcctttgagtgccaatttcttactagtactatttcttaatgtaacatgtttacctggaatgtattttaactatttttgtatagtgtaaactgaaacatgcacattttgtacattgtgctttcttttgtgggacatatgcagtgtgatccagttgttttccatcatttggttgcgctgacctaggaatgttggtcatatcaaacattaaaaatgaccactcttttaattgaaattaacttttaaatgtttataggagtatgtgctgtgaagtgatctaaaatttgtaatatttttgtcatgaactgtactactcctaattattgtaatgtaataaaaatagttacagtgac

SEQ ID NO: 278440 - DNA, 1140 bp, Homo sapiens
ttcctaggcggcggccgcggcggcggaggcagcagcggcggcggcagtggcggcggcgaaggtggcggcggctcggccagtactcccggcccccgccatttcggactgggagcgagcgcggcgcaggcactgaaggcggcggcggggccagaggctcagcggctcccaggtgcgggagagaggcctgctgaaaatgactgaatataaacttgtggtagttggagctggtggcgtaggcaagagtgccttgacgatacagctaattcagaatcattttgtggacgaatatgatccaacaatagaggattcctacaggaagcaagtagtaattgatggagaaacctgtctcttggatattctcgacacagcaggtcaagaggagtacagtgcaatgagggaccagtacatgaggactggggagggctttctttgtgtatttgccataaataatactaaatcatttgaagatattcaccattatagagaacaaattaaaagagttaaggactctgaagatgtacctatggtcctagtaggaaataaatgtgatttgccttctagaacagtagacacaaaacaggctcaggacttagcaagaagttatggaattccttttattgaaacatcagcaaagacaagacagggtaagtaacactgaaataaatacagatctgttttctgcaaaatcataactgttatgtcatttaatatatcagtttttctctcaattatgctatactaggaaataaaacaatatttagtaaatgtttttgtctcttgagagggcattgcttcttaatccagtgtccatggtactgcttttggctttggtttctttctacattgaaaatttctcttcaattctgagcacatgttaacatttagaattcaagaggtggggatttttttttcccatggttacatatatatatatatatatatatatatataatataaagaacagggcaacaaatttttgcgttttctatttcggtagtacttttaaaccattatgtcatgtttctaggttaaacgttgttgtatttgaagaattttactttggcagaatttttttgaggatgtgtttatttctggagaaaggtctcattaaagaaagacaatacccagaaagccaacaga

SEQ ID NO: 278441 - DNA, 5313 bp, Homo sapiens
ttcctaggcggcggccgcggcggcggaggcagcagcggcggcggcagtggcggcggcgaaggtggcggcggctcggccagtactcccggcccccgccatttcggactgggagcgagcgcggcgcaggcactgaaggcggcggcggggccagaggctcagcggctcccaggtgcgggagagaggcctgctgaaaatgactgaatataaacttgtggtagttggagctggtggcgtaggcaagagtgccttgacgatacagctaattcagaatcattttgtggacgaatatgatccaacaatagaggattcctacaggaagcaagtagtaattgatggagaaacctgtctcttggatattctcgacacagcaggtcaagaggagtacagtgcaatgagggaccagtacatgaggactggggagggctttctttgtgtatttgccataaataatactaaatcatttgaagatattcaccattatagagaacaaattaaaagagttaaggactctgaagatgtacctatggtcctagtaggaaataaatgtgatttgccttctagaacagtagacacaaaacaggctcaggacttagcaagaagttatggaattccttttattgaaacatcagcaaagacaagacagggtgttgatgatgccttctatacattagttcgagaaattcgaaaacataaagaaaagatgagcaaagatggtaaaaagaagaaaaagaagtcaaagacaaagtgtgtaattatgtaaatacaatttgtacttttttcttaaggcatactagtacaagtggtaatttttgtacattacactaaattattagcatttgttttagcattacctaatttttttcctgctccatgcagactgttagcttttaccttaaatgcttattttaaaatgacagtggaagtttttttttcctcgaagtgccagtattcccagagttttggtttttgaactagcaatgcctgtgaaaaagaaactgaatacctaagatttctgtcttggggtttttggtgcatgcagttgattacttcttatttttcttaccaattgtgaatgttggtgtgaaacaaattaatgaagcttttgaatcatccctattctgtgttttatctagtcacataaatggattaattactaatttcagttgagaccttctaattggtttttactgaaacattgagggaacacaaatttatgggcttcctgatgatgattcttctaggcatcatgtcctatagtttgtcatccctgatgaatgtaaagttacactgttcacaaaggttttgtctcctttccactgctattagtcatggtcactctccccaaaatattatattttttctataaaaagaaaaaaatggaaaaaaattacaaggcaatggaaactattataaggccatttccttttcacattagataaattactataaagactcctaatagctttttcctgttaaggcagacccagtatgaatgggattattatagcaaccattttggggctatatttacatgctactaaatttttataataattgaaaagattttaacaagtataaaaaaattctcataggaattaaatgtagtctccctgtgtcagactgctctttcatagtataactttaaatcttttcttcaacttgagtctttgaagatagttttaattctgcttgtgacattaaaagattatttgggccagttatagcttattaggtgttgaagagaccaaggttgcaagccaggccctgtgtgaaccttgagctttcatagagagtttcacagcatggactgtgtgccccacggtcatccgagtggttgtacgatgcattggttagtcaaaaatggggagggactagggcagtttggatagctcaacaagatacaatctcactctgtggtggtcctgctgacaaatcaagagcattgcttttgtttcttaagaaaacaaactcttttttaaaaattacttttaaatattaactcaaaagttgagattttggggtggtggtgtgccaagacattaattttttttttaaacaatgaagtgaaaaagttttacaatctctaggtttggctagttctcttaacactggttaaattaacattgcataaacacttttcaagtctgatccatatttaataatgctttaaaataaaaataaaaacaatccttttgataaatttaaaatgttacttattttaaaataaatgaagtgagatggcatggtgaggtgaaagtatcactggactaggttgttggtgacttaggttctagataggtgtcttttaggactctgattttgaggacatcacttactatccatttcttcatgttaaaagaagtcatctcaaactcttagttttttttttttacactatgtgatttatattccatttacataaggatacacttatttgtcaagctcagcacaatctgtaaatttttaacctatgttacaccatcttcagtgccagtcttgggcaaaattgtgcaagaggtgaagtttatatttgaatatccattctcgttttaggactcttcttccatattagtgtcatcttgcctccctaccttccacatgccccatgacttgatgcagttttaatacttgtaattcccctaaccataagatttactgctgctgtggatatctccatgaagttttcccactgagtcacatcagaaatgccctacatcttattttcctcagggctcaagagaatctgacagataccataaagggatttgacctaatcactaattttcaggtggtggctgatgctttgaacatctctttgctgcccaatccattagcgacagtaggatttttcaaccctggtatgaatagacagaaccctatccagtggaaggagaatttaataaagatagtgcagaaagaattccttaggtaatctataactaggactactcctggtaacagtaatacattccattgttttagtaaccagaaatcttcatgcaatgaaaaatactttaattcatgaagcttacttttttttttttggtgtcagagtctcgctcttgtcacccaggctggaatgcagtggcgccatctcagctcactgcaaccttccatcttcccaggttcaagcgattctcgtgcctcggcctcctgagtagctgggattacaggcgtgtgcactacactcaactaatttttgtatttttaggagagacggggtttcacctgttggccaggctggtctcgaactcctgacctcaagtgattcacccaccttggcctcataaacctgttttgcagaactcatttattcagcaaatatttattgagtgcctaccagatgccagtcaccgcacaaggcactgggtatatggtatccccaaacaagagacataatcccggtccttaggtagtgctagtgtggtctgtaatatcttactaaggcctttggtatacgacccagagataacacgatgcgtattttagttttgcaaagaaggggtttggtctctgtgccagctctataattgttttgctacgattccactgaaactcttcgatcaagctactttatgtaaatcacttcattgttttaaaggaataaacttgattatattgtttttttatttggcataactgtgattcttttgggacaattactgtacacattaaggtgtatgtcagatattcatattgacccaaatgtgtaatattccagttttctctgcataagtaattaaaatatacttaaaaattaatagttttatctgggtacaaataaacaggtgcctgaactagttcacagacaaggaaacttctatgtaaaaatcactatgatttctgaattgctatgtgaaactacagatctttggaacactgtttaggtagggtgttaagacttacacagtacctcgtttctacacagagaaagaaatggccatacttcaggaactgcagtgcttatgaggggatatttaggcctcttgaatttttgatgtagatgggcatttttttaaggtagtggttaattacctttatgtgaactttgaatggtttaacaaaagatttgtttttgtagagattttaaagggggagaattctagaaataaatgttacctaattattacagccttaaagataaaaatccttgttgaagttttttaaaaaaaagctaaattacatagacttaggcattaacatgtttgtggaagaatatagcagacgtatattgtatcatttgagtgaatgttcccaagtaggcattctaggctctatttaactgagtcacactgcataggaatttagaacctaacttttataggttatcaaaactgttgtcaccattgcacaattttgtcctaatatatacatagaaactttgtggggcatgttaagttacagtttgcacaagttcatctcatttgtattccattgattttttttttcttctaaacattttttcttcaaacagtatataactttttttaggggatttttttttagacagcaaaaactatctgacgatttccatttgtcaaaaagtaatggtttcttgataattgtgtagtaatgttttttagaacccagcagttaccttaaagctgaatttatatttagtaacttctgtgttaatactggatagcatgaattctgcattgagaacctgaatagctgtcataaaatgaaactttctttctaaagaaagatactcacatgagttcttgaagaatagtcataactagattaagatctgtgttttagtttaatagtttgaagtgcctgtttgggataatgataggtaatttagatgaatttaggggaaaaaaagttatctgcagaaatgttgagggcccatctctccccccacacccccacagagctaactgggttacagtgttttatccgaaagtttccaattccactgtcttgtgttttcatgttgaaaatacttttgcatttttcctttgagtgccaatttcttactagtactatttcttaatgtaacatgtttacctggaatgtattttaactatttttgtatagtgtaaactgaaacatgcacattttgtacattgtgctttcttttgtgggacatatgcagtgtgatccagttgttttccatcatttggttgcgctgacctaggaatgttggtcatatcaaacattaaaaatgaccactcttttaattgaaattaacttttaaatgtttataggagtatgtgctgtgaagtgatctaaaatttgtaatatttttgtcatgaactgtactactcctaattattgtaatgtaataaaaatagttacagtgac

SEQ ID NO: 278442 - DNA, 841 bp, Homo sapiens
ttcctaggcggcggccgcggcggcggaggcagcagcggcggcggcagtggcggcggcgaaggtggcggcggctcggccagtactcccggcccccgccatttcggactgggagcgagcgcggcgcaggcactgaaggcggcggcggggccagaggctcagcggctcccaggtgcgggagagaggcctgctgaaaatgactgaatataaacttgtggtagttggagctggtggcgtaggcaagagtgccttgacgatacagctaattcagaatcattttgtggacgaatatgatccaacaatagaggattcctacaggaagcaagtagtaattgatggagaaacctgtctcttggatattctcgacacagcaggtcaagaggagtacagtgcaatgagggaccagtacatgaggactggggagggctttctttgtgtatttgccataaataatactaaatcatttgaagatattcaccattatagagaacaaattaaaagagttaaggactctgaagatgtacctatggtcctagtaggaaataaatgtgatttgccttctagaacagtagacacaaaacaggctcaggacttagcaagaagttatggaattccttttattgaaacatcagcaaagacaagacaggagagtggaggatgctttttatacattggtgagggagatccgacaatacagattgaaaaaaatcagcaaagaagaaaagactcctggctgtgtgaaaattaaaaaatgcattataatgtaatctgggtgttgatgatgccttctatacattagttcgagaaattcgaaaacataaagaaaagatgagcaaagatggta

SEQ ID NO: 278443 - DNA, 2051 bp, Homo sapiens
cgcggatagaggagcgggcgccgggaccgggaatccccgagctgcgccttctggggacgcggcccgggctacgtcggggccgtccgtggggagcggggtcctggaggctgcgcggggctgaggcggcctcgatttgggaactgcctgaagatgccggcctaagcctggagtccaggcatggacttccccacaatttcccgatccccttcggggcctccagccatggacttggaggggcccagggacattcttgtgccttcggaggacctcacccctgacagccagtgggaccctatgccaggaggccccggcagcctcagtcggatggaacttgatgagtcaagccttcaggagctggtgcagcagtttgaagctctgccaggcgatctggtgggcccatccccaggtggagccccctgtcccctacacattgccacaggccatggcctggcctcccaggagattgctgatgcccacgggctcctgtctgccgaagctggccgggatgacctgctgggcctcttgcactgcgaggaatgcccgccttcccagactggtcctgaagagcctctagagcctgccccccgactgttgcagccccctgaggacccagatgaggattctgactccccagaatgggtggagggggcctctgctgagcaggagggcagcaggagctcaagcagttccccggaaccctggctggagacggtgcctctagtcacacctgaagagccacccgctggtgcccagagccccgagaccctggcttcctaccctgccccccaggaggtgcctggtccctgtgaccatgaagacctcctggacggtgtcatatttggggccaggtacctggggtccacccagctggtgtcggaacggaacccgcccaccagcacgcgcatggcccaggcccgggaggccatggaccgcgtcaaggcccccgatggggagacccagcccatgacggaggtggacctgttcgtctccaccaagaggatcaaggtcttgacagcggactcccaggaggccatgatggaccacgccctgcataccatctcctacacagccgacatcggctgcgtgctggtgctgatggcgcggcggcggctggcacggaggccggcaccccaggaccacggccgccgcctctacaagatgctctgccacgtattctacgcggaggacgcccagctcatcgcccaggccattggccaggccttcgccgccgcctacagccagttcctacgggaaagcggtattgaccccagccaggtgggcgtgcacccgagcccaggcgcctgccacctccataatggggacctggaccacttctccaacagtgacaactgccgggaggtgcacctcgagaagcggcgaggggagggcctgggcgtggccctggtggagtcgggctggggctccctgctgcccacagccgtcatcgccaacctgctgcacggggggcctgctgagcgctcgggggccctcagcatcggggaccgcctgaccgccatcaacgggaccagcctggtggggctgcccctggctgcgtgccaggccgctgtccgcgagacgaagtcgcagacgtcggtgacactcagcatcgtccactgccctcccgtcaccaccgccatcatccaccggccccacgcccgcgagcagctgggcttctgcgtggaggacggcatcatctgcagcctcctccgtggtggcatcgccgagcgtgggggcatccgcgtcggccaccgcatcattgagatcaatgggcagagtgtggtggccacgccacacgcccgcatcatcgagctgctcaccgaggcctatggcgaggtgcatatcaagacgatgccagctgccacatatcgcctccttacaggccaggagcagcccgtgtacctgtgaccacctcatcccttgcctgccactgtgccttcgcctccatggccccggagccccatcctgggcctgccctggctggccaggaccccagcggttcttggtcctgtatgatttcctaatataaaaacagtaaaagcttatgcatttgg

SEQ ID NO: 278444 - DNA, 934 bp, Homo sapiens
ttgctcagatggggaaactgaggcccagagatagggagggacctgcccccgtcagaggaatgaggccacagtccgtgcagcctcttacagatgtttgcagcctgcctggagagcccggctgtcggcttggcttttggccataaggaagcgatatggctcgggtcagacagcttcgaccccatgcccaccgggcccgagtctgttctctatcacatctgagggggtcttccagaattgagcccctggactccaggtctctggtttatgagagggtaaactgaggcccagagggggctacaacctgccaggctgtccggcagctgagtgaggccaacggcccccgccccacaggagacgaagtcgcagacgtcggtgacactcagcatcgtccactgccctcccgtcaccaccgccatcatccaccggccccacgcccgcgagcagctgggcttctgcgtggaggacggcatcgtgaggccccggcccctggccccggggtgggggggtagggcggccctgagcacggcccctgagcagcccccacctctttcccgtccccctcttttctcccccagatctgcagcctcctccgtggtggcatcgccgagcgtgggggcatccgcgtcggccaccgcatcattgagatcaatgggcagagtgtggtggccacgccacacgcccgcatcatcgagctgctcaccgaggcctatggcgaggtgcatatcaagacgatgccagctgccacatatcgcctccttacaggccaggagcagcccgtgtacctgtgaccacctcatcccttgcctgccactgtgccttcgcctccatggccccggagccccatcctgggcctgccctggctggccaggaccccagcggttcttggtcctgtatgatttcctaatataaaaacagtaaaagcttatgcatttgg

SEQ ID NO: 278445 - DNA, 390 bp, Homo sapiens
tgcctttgcgtcgaccttctgctctgcgtcgaccttctgctctgcgtcgactgcacggggggcctgctgagcgctcgggggccctcagcatcggggaccgcctgaccgccatcaacgggaccagcctggtggggctgcccctggctgcgtgccaggccgctgtccgcgtgagtttcctggtgtggcagggcccccacactcccaggaaggggagctgagtcccagagaggtctcctccctggccaggtctctccagcccagccaggagggacaaagtcgaacttttaagtcctgcccactggtgtgcccttggggaaactgaggcctggagaagggaggccacttgtccagggcacctccctagtaccagagccaggatggaaatgcggg

SEQ ID NO: 278446 - DNA, 2410 bp, Homo sapiens
cgcggatagaggagcgggcgccgggaccgggaatccccgagctgcgccttctggggacgcggcccgggctacgtcggggccgtccgtggggagcggggtcctggaggctgcgcggggctgaggcggcctcgatttgggaactgcctgaagatgccggcctaagcctggagtccaggcatggacttccccacaatttcccgatccccttcggggcctccagccatggacttggaggggcccagggacattcttgtgccttcggaggacctcacccctgacagccagtgggaccctatgccaggaggccccggcagcctcagtcggatggaacttgatgagtcaagccttcaggagctggtgcagcagtttgaagctctgccaggcgatctggtgggcccatccccaggtggagccccctgtcccctacacattgccacaggccatggcctggcctcccaggagattgctgatgcccacgggctcctgtctgccgaagctggccgggatgacctgctgggcctcttgcactgcgaggaatgcccgccttcccagactggtcctgaagagcctctagagcctgccccccgactgttgcagccccctgaggacccagatgaggattctgactccccagaatgggtggagggggcctctgctgagcaggagggcagcaggagctcaagcagttccccggaaccctggctggagacggtgcctctagtcacacctgaagagccacccgctggtgcccagagccccgagaccctggcttcctaccctgccccccaggaggtgcctggtccctgtgaccatgaagacctcctggacggtgtcatatttggggccaggtacctggggtccacccagctggtgtcggaacggaacccgcccaccagcacgcgcatggcccaggcccgggaggccatggaccgcgtcaaggcccccgatggggagacccagcccatgacggaggtggacctgttcgtctccaccaagaggatcaaggtcttgacagcggactcccaggaggccatgatggaccacgccctgcataccatctcctacacagccgacatcggctgcgtgctggtgctgatggcgcggcggcggctggcacggaggccggcaccccaggaccacggccgccgcctctacaagatgctctgccacgtattctacgcggaggacgcccagctcatcgcccaggccattggccaggccttcgccgccgcctacagccagttcctacgggaaagcggtattgaccccagccaggtgggcgtgcacccgagcccaggcgcctgccacctccataatggggacctggaccacttctccaacagtgacaactgccgggaggtgcacctcgagaagcggcgaggggagggcctgggcgtggccctggtggagtcgggctggggctccctgctgcccacagccgtcatcgccaacctgctgcacggggggcctgctgagcgctcgggggccctcagcatcggggaccgcctgaccgccatcaacgggaccagcctggtggggctgcccctggctgcgtgccaggccgctgtccgcgagacgaagtcgcagacgtcggtgacactcagcatcgtccactgccctcccgtcaccaccgccatcatccaccggccccacgcccgcgagcagctgggcttctgcgtggaggacggcatcgtgaggccccggcccctggccccggggtgggggggtagggcggccctgagcacggcccctgagcagcccccacctctttcccgtccccctcttttctcccccagatctgcagcctcctccgtggtggcatcgccgagcgtgggggcatccgcgtcggccaccgcatcattgagatcaatgggcagagtgtggtggccacgccacacgcccgcatcatcgagctgctcaccgaggcctatggcgaggtgcatatcaagacgatgccagctgccacatatcgcctccttacaggccaggagcagcccgtgtacctgtgaccacctcatcccttgcctgccactgtgccttcgcctccatggccccggagccccatcctgggcctgccctggctggccaggaccccagcggttcttggtcctgtatgatttcctaatataaaaacagtaaaagcttatgcatttggcaaagtctcggatcagggtctacgggaccgaggaccttgtccttcctggaagccactagaagccggtgctgtgaaaatactctgtttattaaagaccaggcggagggaggtaaggttgtgggttctgtatgggaaactgagtcccagccccagggagggagaaggaggacggaccagctggcagctctgcttgaagtttcaaggtaatgggtctgaccccagttattaagcttttttatttggagggactactca

SEQ ID NO: 278447 - DNA, 1964 bp, Homo sapiens
aaggcctgggtaaaatcggccgagggcggggctgaggcggctcgatttgggaactgcctgaagatgccggcctaagcctggagtccaggcatggacttccccacaatttcccgatccccttcggggcctccagccatggacttggaggggcccagggacattcttgtgccttcggaggacctcacccctgacagccagtgggaccctatgccaggaggccccggcagcctcagtcggatggaacttgatgagtcaagccttcaggagctggtgcagcagtttgaagctctgccaggcgatctggtgggcccatccccaggtggagccccctgtcccctacacattgccacaggccatggcctggcctcccaggagattgctgatgcccacgggctcctgtctgccgaagctggccgggatgacctgctgggcctcttgcactgcgaggaatgcccgccttcccagactggtcctgaagagcctctagagcctgccccccgactgttgcagccccctgaggacccagatgaggattctgactccccagaatgggtggagggggcctctgctgagcaggagggcagcaggagctcaagcagttccccggaaccctggctggagacggtgcctctagtcacacctgaagagccacccgctggtgcccagagccccgagaccctggcttcctaccctgccccccaggaggtgcctggtccctgtgaccatgaagacctcctggacggtgtcatatttggggccaggtacctggggtccacccagctggtgtcggaacggaacccgcccaccagcacgcgcatggcccaggcccgggaggccatggaccgcgtcaaggcccccgatggggagacccagcccatgacggaggtggacctgttcgtctccaccaagaggatcaaggtcttgacagcggactcccaggaggccatgatggaccacgccctgcataccatctcctacacagccgacatcggctgcgtgctggtgctgatggcgcggcggcggctggcacggaggccggcaccccaggaccacggccgccgcctctacaagatgctctgccacgtattctacgcggaggacgcccagctcatcgcccaggccattggccaggccttcgccgccgcctacagccagttcctacgggaaagcggtattgaccccagccaggtgggcgtgcacccgagcccaggcgcctgccacctccataatggggacctggaccacttctccaacagtgacaactgccgggaggtgcacctcgagaagcggcgaggggagggcctgggcgtggccctggtggagtcgggctggggctccctgctgcccacagccgtcatcgccaacctgctgcacggggggcctgctgagcgctcgggggccctcagcatcggggaccgcctgaccgccatcaacgggaccagcctggtggggctgcccctggctgcgtgccaggccgctgtccgcgagacgaagtcgcagacgtcggtgacactcagcatcgtccactgccctcccgtcaccaccgccatcatccaccggccccacgcccgcgagcagctgggcttctgcgtggaggacggcatcatctgcagcctcctccgtggtggcatcgccgagcgtgggggcatccgcgtcggccaccgcatcattgagatcaatgggcagagtgtggtggccacgccacacgcccgcatcatcgagctgctcaccgaggcctatggcgaggtgcatatcaagacgatgccagctgccacatatcgcctccttacaggccaggagcagcccgtgtacctgtgaccacctcatcccttgcctgccactgtgccttcgcctccatggccccggagccccatcctgggcctgccctggctggccaggaccccagcggttcttggtcctgtatgatttcctaatataaaaacagtaaaagcttatgcatttgg

SEQ ID NO: 278448 - DNA, 1874 bp, Homo sapiens
cctccgcctcccagcttcaagcgattctctcgcctcagcctcctgagtaactggaactataggcatacgccaccatacctggctaagaaattaactttaataacattttaattaagctaacatatttaaaatattatttcaacatacaatcaatatttttaatttacttttttatttttttgagacacagtctcaccttgttgcccaggttgcagtgagctgagatcacaccgccgagctccagcctgggcgacagagcgagaccgtgtctcaaaaaagcaggagtgggactgtctggttccggcctgatcatggaattctggggacacggggtgaaggtatctgtgggtgctagatctggctttgaatccagccatggcctggactcactggtttcccacctgcgagtccttgagggatggacagaaggttctagacctgtgagggccaggctgcttggatggttctagaacagtgggctgtgcttcctggctggagagtgctaagccaccagctagaacactgtgtctcccggccatctcggagagcgtagccctggggcagagcctgtgggagtgggcccctgggggccgaccctcttcgctgtcgccctcagtgcctggtccctgtgaccatgaagacctcctggacggtgtcatatttggggccaggtacctggggtccacccagctggtgtcggaacggaacccgcccaccagcacgcgcatggcccaggcccgggaggccatggaccgcgtcaaggcccccgatggggagacccagcccatgacggaggtggacctgttcgtctccaccaagaggatcaaggtcttgacagcggactcccaggaggccatgatggaccacgccctgcataccatctcctacacagccgacatcggctgcgtgctggtgctgatggcgcggcggcggctggcacggaggccggcaccccaggaccacggccgccgcctctacaagatgctctgccacgtattctacgcggaggacgcccagctcatcgcccaggccattggccaggccttcgccgccgcctacagccagttcctacgggaaagcggtattgaccccagccaggtgggcgtgcacccgagcccaggcgcctgccacctccataatggggacctggaccacttctccaacagtgacaactgccgggaggtgcacctcgagaagcggcgaggggagggcctgggcgtggccctggtggagtcgggctggggctccctgctgcccacagccgtcatcgccaacctgctgcacggggggcctgctgagcgctcgggggccctcagcatcggggaccgcctgaccgccatcaacgggaccagcctggtggggctgcccctggctgcgtgccaggccgctgtccgcgagacgaagtcgcagacgtcggtgacactcagcatcgtccactgccctcccgtcaccaccgccatcatccaccggccccacgcccgcgagcagctgggcttctgcgtggaggacggcatcatctgcagcctcctccgtggtggcatcgccgagcgtgggggcatccgcgtcggccaccgcatcattgagatcaatgggcagagtgtggtggccacgccacacgcccgcatcatcgagctgctcaccgaggcctatggcgaggtgcatatcaagacgatgccagctgccacatatcgcctccttacaggccaggagcagcccgtgtacctgtgaccacctcatcccttgcctgccactgtgccttcgcctccatggccccggagccccatcctgggcctgccctggctggccaggaccccagcggttcttggtcctgtatgatttcctaatataaaaacagtaaaagcttatgcatttgg

SEQ ID NO: 278449 - DNA, 679 bp, Homo sapiens
tgcggccgctgcctccccgggacggccgtaccacgcggacggggaggacggggccaggggactgcagggcggctgcaccgcgaatgcacggggggcctgctgagcgctcgggggccctcagcatcggggaccgcctgaccgccatcaacgggaccagcctggtggggctgcccctggctgcgtgccaggccgctgtccgcgagacgaagtcgcagacgtcggtgacactcagcatcgtccactgccctcccgtcaccaccgccatcatccaccggccccacgcccgcgagcagctgggcttctgcgtggaggacggcatcatctgcagcctcctccgtggtggcatcgccgagcgtgggggcatccgcgtcggccaccgcatcattgagatcaatgggcagagtgtggtggccacgccacacgcccgcatcatcgagctgctcaccgaggcctatggcgaggtgcatatcaagacgatgccagctgccacatatcgcctccttacaggccaggagcagcccgtgtacctgtgaccacctcatcccttgcctgccactgtgccttcgcctccatggccccggagccccatcctgggcctgccctggctggccaggaccccagcggttcttggtcctgtatgatttcctaatataaaaacagtaaaagcttatgcatttgg

SEQ ID NO: 278450 - DNA, 2154 bp, Homo sapiens
gtaaaattggaacgatacagagaagattagcatggcccctgcgcaaggatgacacgcaaattcgtgaagcgttccatattttttggaatcttgctccgtcacccaggctggtgtgcagtggtgcgatctctctcggctcgctgcaacctccgcctcctgggttcaggtgattctcccgcctcagctactcatgagactgaggcgggagaatcgtttgagcccgggaagcggaggttgcagtgagctgagatcacaccgccgagctccagcctgggcgacagagcgagaccgtgtctcaaaaaagcaggagtgggactgtctggttccggcctgatcatggaattctggggacacggggtgaaggtatctgtgggtgctagatctggctttgaatccagccatggcctggactcactggtttcccacctgcgagtccttgagggatggacagaaggttctagacctgtgagggccaggctgcttggatggttctagaacagtgggctgtgcttcctggctggagagtgctaagccaccagctagaacactgtgtctcccggccatctcggagagcgtagccctggggcagagcctgtgggagtgggcccctgggggccgaccctcttcgctgtcgccctcagtgcctggtccctgtgaccatgaagacctcctggacggtgtcatatttggggccaggtacctggggtccacccagctggtgtcggaacggaacccgcccaccagcacgcgcatggcccaggcccgggaggccatggaccgcgtcaaggcccccgatggggagacccagcccatgacggaggtggacctgttcgtctccaccaagaggatcaaggtcttgacagcggactcccaggaggccatgatggaccacgccctgcataccatctcctacacagccgacatcggctgcgtgctggtgctgatggcgcggcggcggctggcacggaggccggcaccccaggaccacggccgccgcctctacaagatgctctgccacgtattctacgcggaggacgcccagctcatcgcccaggccattggccaggccttcgccgccgcctacagccagttcctacgggaaagcggtattgaccccagccaggtgggcgtgcacccgagcccaggcgcctgccacctccataatggggacctggaccacttctccaacagtgacaactgccgggaggtgcacctcgagaagcggcgaggggagggcctgggcgtggccctggtggagtcgggctggggctccctgctgcccacagccgtcatcgccaacctgctgcacggggggcctgctgagcgctcgggggccctcagcatcggggaccgcctgaccgccatcaacgggaccagcctggtggggctgcccctggctgcgtgccaggccgctgtccgcgagacgaagtcgcagacgtcggtgacactcagcatcgtccactgccctcccgtcaccaccgccatcatccaccggccccacgcccgcgagcagctgggcttctgcgtggaggacggcatcatctgcagcctcctccgtggtggcatcgccgagcgtgggggcatccgcgtcggccaccgcatcattgagatcaatgggcagagtgtggtggccacgccacacgcccgcatcatcgagctgctcaccgaggcctatggcgaggtgcatatcaagacgatgccagctgccacatatcgcctccttacaggccaggagcagcccgtgtacctgtgaccacctcatcccttgcctgccactgtgccttcgcctccatggccccggagccccatcctgggcctgccctggctggccaggaccccagcggttcttggtcctgtatgatttcctaatataaaaacagtaaaagcttatgcatttggcaaagtctcggatcagggtctacgggaccgaggaccttgtccttcctggaagccactagaagccggtgctgtgaaaatactctgtttattaaagaccaggcggagggaggtaaggttgtgggttctgtatgggaaactgagtcccagccccagggagggagaaggaggacggaccagctggcagctctgcttgaagtttcaaggtaatgggtctgaccccagttattaagcttttttatttggagggactactca

SEQ ID NO: 278451 - DNA, 2139 bp, Homo sapiens
cgcggatagaggagcgggcgccgggaccgggaatccccgagctgcgccttctggggacgcggcccgggctacgtcggggccgtccgtggggagcggggtcctggaggctgcgcggggctgaggcggcctcgatttgggaactgcctgaagatgccggcctaagcctggagtccaggcatggacttccccacaatttcccgatccccttcggggcctccagccatggacttggaggggcccagggacattcttgtgccttcggaggacctcacccctgacagccagtgggaccctatgccaggaggccccggcagcctcagtcggatggaacttgatgagtcaagccttcaggagctggtgcagcagtttgaagctctgccaggcgatctggtgggcccatccccaggtggagccccctgtcccctacacattgccacaggccatggcctggcctcccaggagattgctgatgcccacgggctcctgtctgccgaagctggccgggatgacctgctgggcctcttgcactgcgaggaatgcccgccttcccagactggtcctgaagagcctctagagcctgccccccgactgttgcagccccctgaggacccagatgaggattctgactccccagaatgggtggagggggcctctgctgagcaggagggcagcaggagctcaagcagttccccggaaccctggctggagacggtgcctctagtcacacctgaagagccacccgctggtgcccaggtagtgcccgccccgccctccaggcatcctggactgcctggaaccaagcagggagactcagtcctgcccctcctctatcttcttccagagccccgagaccctggcttcctaccctgccccccaggaggtgcctggtccctgtgaccatgaagacctcctggacggtgtcatatttggggccaggtacctggggtccacccagctggtgtcggaacggaacccgcccaccagcacgcgcatggcccaggcccgggaggccatggaccgcgtcaaggcccccgatggggagacccagcccatgacggaggtggacctgttcgtctccaccaagaggatcaaggtcttgacagcggactcccaggaggccatgatggaccacgccctgcataccatctcctacacagccgacatcggctgcgtgctggtgctgatggcgcggcggcggctggcacggaggccggcaccccaggaccacggccgccgcctctacaagatgctctgccacgtattctacgcggaggacgcccagctcatcgcccaggccattggccaggccttcgccgccgcctacagccagttcctacgggaaagcggtattgaccccagccaggtgggcgtgcacccgagcccaggcgcctgccacctccataatggggacctggaccacttctccaacagtgacaactgccgggaggtgcacctcgagaagcggcgaggggagggcctgggcgtggccctggtggagtcgggctggggctccctgctgcccacagccgtcatcgccaacctgctgcacggggggcctgctgagcgctcgggggccctcagcatcggggaccgcctgaccgccatcaacgggaccagcctggtggggctgcccctggctgcgtgccaggccgctgtccgcgagacgaagtcgcagacgtcggtgacactcagcatcgtccactgccctcccgtcaccaccgccatcatccaccggccccacgcccgcgagcagctgggcttctgcgtggaggacggcatcatctgcagcctcctccgtggtggcatcgccgagcgtgggggcatccgcgtcggccaccgcatcattgagatcaatgggcagagtgtggtggccacgccacacgcccgcatcatcgagctgctcaccgaggcctatggcgaggtgcatatcaagacgatgccagctgccacatatcgcctccttacaggccaggagcagcccgtgtacctgtgaccacctcatcccttgcctgccactgtgccttcgcctccatggccccggagccccatcctgggcctgccctggctggccaggaccccagcggttcttggtcctgtatgatttcctaatataaaaacagtaaaagcttatgcatttgg

SEQ ID NO: 278452 - DNA, 2142 bp, Homo sapiens
cgcggatagaggagcgggcgccgggaccgggaatccccgagctgcgccttctggggacgcggcccgggctacgtcggggccgtccgtggggagcggggtcctggaggctgcgcggggctgaggcggcctcgatttgggaactgcctgaagatgccggcctaagcctggagtccaggcatggacttccccacaatttcccgatccccttcggggcctccagccatggacttggaggggcccagggacattcttgtgccttcggaggacctcacccctgacagccagtgggaccctatgccaggaggccccggcagcctcagtcggatggaacttgatgagtcaagccttcaggagctggtgcagcagtttgaagctctgccaggcgatctggtgggcccatccccaggtggagccccctgtcccctacacattgccacaggccatggcctggcctcccaggagattgctgatgcccacgggctcctgtctgccgaagctggccgggatgacctgctgggcctcttgcactgcgaggaatgcccgccttcccagactggtcctgaagagcctctagagcctgccccccgactgttgcagccccctgaggacccagatgaggattctgactccccagaatgggtggagggggcctctgctgagcaggagggcagcaggagctcaagcagttccccggaaccctggctggagacggtgcctctagtcacacctgaagagccacccgctggtgcccagagccccgagaccctggcttcctaccctgccccccaggaggtgcctggtccctgtgaccatgaagacctcctggacggtgtcatatttggggccaggtacctggggtccacccagctggtgtcggaacggaacccgcccaccagcacgcgcatggcccaggcccgggaggccatggaccgcgtcaaggcccccgatggggagacccagcccatgacggaggtggacctgttcgtctccaccaagaggatcaaggtcttgacagcggactcccaggaggccatgatggaccacgccctgcataccatctcctacacagccgacatcggctgcgtgctggtgctgatggcgcggcggcggctggcacggaggccggcaccccaggaccacggccgccgcctctacaagatgctctgccacgtattctacgcggaggacgcccagctcatcgcccaggccattggccaggccttcgccgccgcctacagccagttcctacgggaaagcggtattgaccccagccaggtgggcgtgcacccgagcccaggcgcctgccacctccataatggggacctggaccacttctccaacagtgacaactgccgggaggtgcacctcgagaagcggcgaggggagggcctgggcgtggccctggtggagtcgggctggggctccctgctgcccacagccgtcatcgccaacctgctgcacggggggcctgctgagcgctcgggggccctcagcatcggggaccgcctgaccgccatcaacgggaccagcctggtggggctgcccctggctgcgtgccaggccgctgtccgcgagacgaagtcgcagacgtcggtgacactcagcatcgtccactgccctcccgtcaccaccgccatcatccaccggccccacgcccgcgagcagctgggcttctgcgtggaggacggcatcatctgcagcctcctccgtggtggcatcgccgagcgtgggggcatccgcgtcggccaccgcatcattgagatcaatgggcagagtgtggtggccacgccacacgcccgcatcatcgagctgctcaccgaggcctatggcgaggtgtgcgggtggtgggtggtggccaggggcgcccccacgtcccccacgagcccaggcctgccctgagccccgttccgcctccactccccaggtgcatatcaagacgatgccagctgccacatatcgcctccttacaggccaggagcagcccgtgtacctgtgaccacctcatcccttgcctgccactgtgccttcgcctccatggccccggagccccatcctgggcctgccctggctggccaggaccccagcggttcttggtcctgtatgatttcctaatataaaaacagtaaaagcttatgcatttgg

SEQ ID NO: 278453 - DNA, 561 bp, Homo sapiens
gctactctatagttgaagagacgggctcagaaacaggcttctgatgagtctgatgccaaccaggtcctgcccagtctctctgtcttctgtcttgaccctgagtgggcctgtctgctggcactgtgtgggggtcactctacagggctcgggtcatggtccccctgtgtttgtttcagaagcacgagttctctgtggacatgacctgtggaggctgtgctgaagctgtctctcgggtcctcaataagcttggaggagttaagtatgacattgacctgcccaacaagaaggtctgcattgaatctgagcacagcatggacactctgcttgcaaccctgaagaaaacaggaaagactgtttcctaccttggccttgagtagcaggggcctggtccccacagcccacaggatggaccaaagggggcaggatgctgatcctcccgctggcttccagacagacctgggacttggcagtcatgccgggtgatggtgttcctgcggagaccctcagttgtcctattccttcctagcttccctgcaataaaatcaagctgcttttgttgga

SEQ ID NO: 278454 - DNA, 941 bp, Homo sapiens
cttctggagctatctgtatccatgtgggggagccctaatgcacacatcttggattagaaactccactgtcctcattgtttcatctgggtgatgaaacacccagattattttgaagcaaattctagacatcatgcccactccctcctgcccagattattttgaagcaaattctagacatcatgcaatcttacctgtacatatttcagtaaccatgtattgtttggaaaggctcctggaaattcagatgcacagtactcagtaagaatcacccaataagccagctttagtccacatgctcaggcagcatgtctttgaagtctgttttaagaggctcctcagtgactgatttgaagccaggcttgggaacctcaaagatagagtgtttattggttttgaagtcaccttgatcatctgactcttggcagatttatttgccatgattttgttcattgcctttccaacctgtaacaggatagagagtgctgttgactgggtatcctggcagccctggaaattccccagaagagggctttggcagtgattggcttagcaaggttaatgcgttccagccaacctaagtataacagacttcatgggagcagtgtgcagggctggacactggggctctagtcctgctcctgcatctgcaccctgcgttttccacctcacccctgccttttagtgcaagactcttagtgcacccctgcgtcacccctgtctcttagtgcatttattgcctttgcaatgtcgctatgtccacaccagatggcacctttgttccatctaactttccatctttcctagatgctgatcctcccgctggcttccagacagacctgggacttggcagtcatgccgggtgatggtgttcctgcggagaccctcagttgtcctattccttcctagcttccctgcaataaaatcaagctgcttttgttgga

SEQ ID NO: 278455 - DNA, 783 bp, Homo sapiens
agtgaaactgtccttttagggatggatggatgatgtcctgttcaaggcggtgcccttctctggcattccctaacacaagcttgacccgaagtaggcgttctgaaaaaggccgacagtcgatggaggccaacgcagcgcccctctcacctcctctctccgtccaggccgggtgaccacgggcccggcccgcagaaaggaggcggcgcggccggcagggatcaggactggagggggcggagcctccctcgcggccgggcccggagtgggaggggcctccgggaccaggcctctagcgcgcactctcggaagcgcagccgaacccgccctccgaatccagagaggcgctgctgacaccgccgccacaccgccgccacaccgccgctgcctcagtcatgccgaagcacgagttctctgtggacatgacctgtggaggctgtgctgaagctgtctctcgggtcctcaataagcttggaggagttaagtatgacattgacctgcccaacaagaaggtctgcattgaatctgagcacagcatggacactctgcttgcaaccctgaagaaaacaggaaagactgtttcctaccttggccttgagtagcaggggcctggtccccacagcccacaggatggaccaaagggggcaggatgctgatcctcccgctggcttccagacagacctgggacttggcagtcatgccgggtgatggtgttcctgcggagaccctcagttgtcctattccttcctagcttccctgcaataaaatcaagctgcttttgttgga

SEQ ID NO: 278456 - DNA, 442 bp, Homo sapiens
ggacccagatgctgcctctgagaatgcggcccttggatgaaagcagaatcacctgggaagcacgagttctctgtggacatgacctgtggaggctgtgctgaagctgtctctcgggtcctcaataagcttggaggagttaagtatgacattgacctgcccaacaagaaggtctgcattgaatctgagcacagcatggacactctgcttgcaaccctgaagaaaacaggaaagactgtttcctaccttggccttgagtagcaggggcctggtccccacagcccacaggatggaccaaagggggcaggatgctgatcctcccgctggcttccagacagacctgggacttggcagtcatgccgggtgatggtgttcctgcggagaccctcagttgtcctattccttcctagcttccctgcaataaaatcaagctgcttttgttgga

SEQ ID NO: 278457 - DNA, 423 bp, Homo sapiens
tagaggaaagggcaagggtggttgtgagtagtaatttagagcctgaactctttcttgctgtaactgggagggtctgtgcttcctctccccataccccatttcctcttcctgcaggagttaagtatgacattgacctgcccaacaagaaggtctgcattgaatctgagcacagcatggacactctgcttgcaaccctgaagaaaacaggaaagactgtttcctaccttggccttgagtagcaggggcctggtccccacagcccacaggatggaccaaagggggcaggatgctgatcctcccgctggcttccagacagacctgggacttggcagtcatgccgggtgatggtgttcctgcggagaccctcagttgtcctattccttcctagcttccctgcaataaaatcaagctgcttttgttgga

SEQ ID NO: 278458 - DNA, 863 bp, Homo sapiens
agtgaaactgtccttttagggatggatggatgatgtcctgttcaaggcggtgcccttctctggcattccctaacacaagcttgacccgaagtaggcgttctgaaaaaggccgacagtcgatggaggccaacgcagcgcccctctcacctcctctctccgtccaggccgggtgaccacgggcccggcccgcagaaaggaggcggcgcggccggcagggatcaggactggagggggcggagcctccctcgcggccgggcccggagtgggaggggcctccgggaccaggcctctagcgcgcactctcggaagcgcagccgaacccgccctccgaatccagagaggcgctgctgacaccgccgccacaccgccgccacaccgccgctgcctcagtcatgccgagcacagtgacaatccagactcagcggtgtttagagacttggaaagagtttgagaagccacttagccactttattttcagaagcacgagttctctgtggacatgacctgtggaggctgtgctgaagctgtctctcgggtcctcaataagcttggaggagttaagtatgacattgacctgcccaacaagaaggtctgcattgaatctgagcacagcatggacactctgcttgcaaccctgaagaaaacaggaaagactgtttcctaccttggccttgagtagcaggggcctggtccccacagcccacaggatggaccaaagggggcaggatgctgatcctcccgctggcttccagacagacctgggacttggcagtcatgccgggtgatggtgttcctgcggagaccctcagttgtcctattccttcctagcttccctgcaataaaatcaagctgcttttgttgga

SEQ ID NO: 278459 - DNA, 684 bp, Homo sapiens
atccttaattaaattaatcccctccccccgcagccgaacccgccctccgaatccagagaggcgctgctgacaccgccgccacaccgccgccacaccgccgctgcctcagtcatgccgaagcacgagttctctgtggacatgacctgtggaggctgtgctgaagctgtctctcgggtcctcaataagcttggaggagttaagtatgacattgacctgcccaacaagaaggtctgcattgaatctgagcacagcatggacactctgcttgcaaccctgaagaaaacaggaaagactgtttcctaccttggccttgagtagcaggggcctggtccccacagcccacaggatggaccaaagggggcaggatgctgatcctcccgctggcttccagacagacctgggacttggcagtcatgccgggtgatggtgttcctgcggagaccctcagttgtcctattccttcctagcttccctgcaataaaatcaagctgcttttgttggaaaaaaaaaaaataaaaagtttttgcttggggccgaaattagagtcactggcccaatcccccctataggggggcgttaaaaatacctggccgggtttacacgggggggactggaaaacctgggggtaccccattaaaggcctggagaccccttttgccaggtggggttgagcccccccctccc

SEQ ID NO: 278460 - DNA, 707 bp, Homo sapiens
agtgaaactgtccttttagggatggatggatgatgtcctgttcaaggcggtgcccttctctggcattccctaacacaagcttgacccgaagtaggcgttctgaaaaaggccgacagtcgatggaggccaacgcagcgcccctctcacctcctctctccgtccaggccgggtgaccacgggcccggcccgcagaaaggaggcggcgcggccggcagggatcaggactggagggggcggagcctccctcgcggccgggcccggagtgggaggggcctccgggaccaggcctctagcgcgcactctcggaagcgcagccgaacccgccctccgaatccagagaggcgctgctgacaccgccgccacaccgccgccacaccgccgctgcctcagtcatgccggagttaagtatgacattgacctgcccaacaagaaggtctgcattgaatctgagcacagcatggacactctgcttgcaaccctgaagaaaacaggaaagactgtttcctaccttggccttgagtagcaggggcctggtccccacagcccacaggatggaccaaagggggcaggatgctgatcctcccgctggcttccagacagacctgggacttggcagtcatgccgggtgatggtgttcctgcggagaccctcagttgtcctattccttcctagcttccctgcaataaaatcaagctgcttttgttgga

SEQ ID NO: 278461 - DNA, 754 bp, Homo sapiens
atccttaattaaattaatcccctccccccgcagccgaacccgccctccgaatccagagaggcgctgctgacaccgccgccacaccgccgccacaccgccgctgcctcagtcatgccgaagcacgagttctctgtggacatgacctgtggaggctgtgctgaagctgtctctcgggtcctcaataagcttggaggagttaagtatgacattgacctgcccaacaagaaggtctgcattgaatctgagcacagcatggacactctgcttgcaaccctgaagaaaacaggaaagactgtttcctaccttggccttgagtagcaggggcctggtccccacagcccacaggatggaccaaagggggcaggatgctgatcctcccgctggcttccagacagacctgggacttggcagtcatgccgggtgatggtgttcctgcggagaccctcagttgtcctattccttcctagcttccctgcaataaaatcaagctgcttttgttggacaataaacatttcagtgagcctgttacaaaacactggccgggctaacactggcgaacctggtcttgcggtacctaactaatgggctgatgtgatccccttataagattctcaggtccttggcaaatgccctattggggggcttccaataaatgggcgcgattaacacattcatagggaaacccggggtgcgcaatttcttctgtggaagaaatcccctttccggtggagattctcgccgcccggccctcttc

SEQ ID NO: 278462 - DNA, 695 bp, Homo sapiens
  misc_feature (528)..(529): n is a, c, g, or t
atccttaattaaattaatcccctccccccgcagccgaacccgccctccgaatccagagaggcgctgctgacaccgccgccacaccgccgccacaccgccgctgcctcagtcatgccgaagcacgagttctctgtggacatgacctgtggaggctgtgctgaagctgtctctcgggtcctcaataagcttggaggagttaagtatgacattgacctgcccaacaagaaggtctgcattgaatctgagcacagcatggacactctgcttgcaaccctgaagaaaacaggaaagactgtttcctaccttggccttgagtagcaggggcctggtccccacagcccacaggatggaccaaagggggcaggatgctgatcctcccgctggcttccagacagacctgggacttggcagtcatgccgggtgatggtgttcctgcggagaccctcagttgtcctattccttcctagcttccctgcaataaaatcaagctgcttttgttggaaaaaaaaaaaaaaaaaaaaaaaaaannaaaaaaaaaaaaaaaaacctcaagggggggccccgtcccaaattccccctatagggaggccgataaaaatttaattggccggcgttttaacaacttcggaactggaaaaaccctggggttacccaactaaatcgctttggaagtccccctttgcccttggcgttcc

SEQ ID NO: 278463 - DNA, 903 bp, Homo sapiens
ggacccagatgctgcctctgagaatgcggcccttggatgaaagcagaatcacctgggaagcacgagttctctgtggacatgacctgtggaggctgtgctgaagctgtctctcgggtcctcaataagcttggaggagttaagtatgacattgacctgcccaacaagaaggtctgcattgaatctgagcacagcatggacactctgcttgcaaccctgaagaaaacaggaaagactgtttcctaccttggccttgagtagcaggggcctggtccccacagcccacaggatggaccaaagggggcaggatgctgatcctcccgctggcttccagacagacctgggacttggcagtcatgccgggtgatggtgttcctgcggagaccctcagttgtcctattccttcctagcttccctgcaataaaatcaagctgcttttgttggaaaaaaaaaaaaaaaaaaaaaaaaaaaagggggggccgtttaaaattttcccggcgagaggggccccaagtttaacgccgttacccgagttttcttgtgttacaaggggtggccccttattagtggagagcggatattaaaagcataggcacatgggacgcgcggtttttaacacggtgcgtgagaacgtggggaaaaacgtgtgtaaccttgggaaaacttttgggagaggagaacctttacttgtctgggggggggaacatatagggggggagaaacttacattaacgaggagaatttaaaggagctctaaggggaacatttattaaagatttttgaaaggggggtaatacggggcgttaaacacattagcgttgaaaattatgcttagacgggcattgaagaaggtttggggataacggggagatatgtaattgtgggaccattttttataccgggatt

SEQ ID NO: 278464 - DNA, 1204 bp, Homo sapiens
agtgaaactgtccttttagggatggatggatgatgtcctgttcaaggcggtgcccttctctggcattccctaacacaagcttgacccgaagtaggcgttctgaaaaaggccgacagtcgatggaggccaacgcagcgcccctctcacctcctctctccgtccaggccgggtgaccacgggcccggcccgcagaaaggaggcggcgcggccggcagggatcaggactggagggggcggagcctccctcgcggccgggcccggagtgggaggggcctccgggaccaggcctctagcgcgcactctcggaagcgcagccgaacccgccctccgaatccagagaggcgctgctgacaccgccgccacaccgccgccacaccgccgctgcctcagtcatgccgaagcacgagttctctgtggacatgacctgtggaggctgtgctgaagctgtctctcgggtcctcaataagcttggaggagttaagtatgacattgacctgcccaacaagaaggtctgcattgaatctgagcacagcatggacactctgcttgcaaccctgaagaaaacaggaaagactgtttcctaccttggccttgagtagcaggggcctggtccccacagcccacaggatggaccaaagggggcagctgagttggagaatggcaacgaagaccatttggcccacatagcctagactgtttactattttgcccttttcagaagaaaattgtctgtccattgttgcgggaagtcacagaccctgaatggagagaccggctgaagccgcggcagaagaacataaattgtgaagatttaatggacatttatcagttcccaaaattaatacttttataatttcttacgcctgtttttactgcagtctcggaacataaagtgtgaagatttcatggacatttatcacttccccaatcaatacccttgtgatttcctatgcttgtctttactttaatctcttaatcctgtcatcttcataagctgaggatgcatgtcacttcaggaccctgtgatgactgcgttaactgtacaaattgtttgtaaagcatatgtgtttgaacaatatgaaatcagtgcaccctgaaaaaagaacagaataacagcaattttcagggaacaagggagataaccataaggtctgactgcctgcggggttgggcagaatagagccatatttttcttctcacagaa

SEQ ID NO: 278465 - DNA, 751 bp, Homo sapiens
agtgaaactgtccttttagggatggatggatgatgtcctgttcaaggcggtgcccttctctggcattccctaacacaagcttgacccgaagtaggcgttctgaaaaaggccgacagtcgatggaggccaacgcagcgcccctctcacctcctctctccgtccaggccgggtgaccacgggcccggcccgcagaaaggaggcggcgcggccggcagggatcaggactggagggggcggagcctccctcgcggccgggcccggagtgggaggggcctccgggaccaggcctctagcgcgcactctcggaagcgcagccgaacccgccctccgaatccagagaggcgctgctgacaccgccgccacaccgccgccacaccgccgctgcctcagtcatgccgaagcacgagttctctgtggacatgacctgtggaggctgtgctgaagctgtctctcgggtcctcaataagcttggaggagttaagtatgacattgacctgcccaacaagaaggtctgcattgaatctgagcacagcatggacactctgcttgcaaccctgaagaaaacaggaaagactgtttcctaccttggccttgagtagcaggggcctggtccccacagcccacaggatggaccaaagggggcagatgctgatcctccccgcttggggcctttttttttttcccccccccccaaggggggggacaacccccccccaggggggggggacccttaagttgtccttattccttg

SEQ ID NO: 278466 - DNA, 1131 bp, Homo sapiens
agtgaaactgtccttttagggatggatggatgatgtcctgttcaaggcggtgcccttctctggcattccctaacacaagcttgacccgaagtaggcgttctgaaaaaggccgacagtcgatggaggccaacgcagcgcccctctcacctcctctctccgtccaggccgggtgaccacgggcccggcccgcagaaaggaggcggcgcggccggcagggatcaggactggagggggcggagcctccctcgcggccgggcccggagtgggaggggcctccgggaccaggcctctagcgcgcactctcggaagcgcagccgaacccgccctccgaatccagagaggcgctgctgacaccgccgccacaccgccgccacaccgccgctgcctcagtcatgccgaagcacgagttctctgtggacatgacctgtggaggctgtgctgaagctgtctctcgggtcctcaataagcttggaggagttaagtatgacattgacctgcccaacaagaaggtctgcattgaatctgagcacagcatggacactctgcttgcaaccctgaagaaaacaggaaagactgtttcctaccttggccttgagtagcaggggcctggtccccacagcccacaggatggaccaaagggggcagaagaaaattgtctgtccattgttgcgggaagtcacagaccctgaatggagagaccggctgaagccgcggcagaagaacataaattgtgaagatttaatggacatttatcagttcccaaaattaatacttttataatttcttacgcctgtttttactgcagtctcggaacataaagtgtgaagatttcatggacatttatcacttccccaatcaatacccttgtgatttcctatgcttgtctttactttaatctcttaatcctgtcatcttcataagctgaggatgcatgtcacttcaggaccctgtgatgactgcgttaactgtacaaattgtttgtaaagcatatgtgtttgaacaatatgaaatcagtgcaccctgaaaaaagaacagaataacagcaattttcagggaacaagggagataaccataaggtctgactgcctgcggggttgggcagaatagagccatatttttcttctcacagaa

SEQ ID NO: 278467 - DNA, 900 bp, Homo sapiens
agtgaaactgtccttttagggatggatggatgatgtcctgttcaaggcggtgcccttctctggcattccctaacacaagcttgacccgaagtaggcgttctgaaaaaggccgacagtcgatggaggccaacgcagcgcccctctcacctcctctctccgtccaggccgggtgaccacgggcccggcccgcagaaaggaggcggcgcggccggcagggatcaggactggagggggcggagcctccctcgcggccgggcccggagtgggaggggcctccgggaccaggcctctagcgcgcactctcggaagcgcagccgaacccgccctccgaatccagagaggcgctgctgacaccgccgccacaccgccgccacaccgccgctgcctcagtcatgccgaagcacgagttctctgtggacatgacctgtggaggctgtgctgaagctgtctctcgggtcctcaataagcttggaggagttaagtatgacattgacctgcccaacaagaaggtctgcattgaatctgagcacagcatggacactctgcttgcaaccctgaagaaaacaggaaagactgtttcgatgctgatcctcccgctggcttccagacagacctgggacttggcagtcatgccgggtgatggtgttcctgcggagaccctcagttgtcctattccttcctagcttccctgcaataaaatcaagctgcttttgttggaaaaaaaaaaaataaaaagtttttgcttggggccgaaattagagtcactggcccaatcccccctataggggggcgttaaaaatacctggccgggtttacacgggggggactggaaaacctgggggtaccccattaaaggcctggagaccccttttgccaggtggggttgagcccccccctccc

SEQ ID NO: 278468 - DNA, 504 bp, Homo sapiens
ctgtcgccctgcacggtgacccgcgtgtgcgaggccttcatggccaggatccgggtggagaggcgctgctgacaccgccgccacaccgccgccacaccgccgctgcctcagtcatgccgaagcacgagttctctgtggacatgacctgtggaggctgtgctgaagctgtctctcgggtcctcaataagcttggaggagttaagtatgacattgacctgcccaacaagaaggtctgcattgaatctgagcacagcatggacactctgcttgcaaccctgaagaaaacaggaaagactgtttcctaccttggccttgagtagcaggggcctggtccccacagcccacaggatggaccaaagggggcaggatgctgatcctcccgctggcttccagacagacctgggacttggcagtcatgccgggtgatggtgttcctgcggagaccctcagttgtcctattccttcctagcttccctgcaataaaatcaagctgcttttgttgga

SEQ ID NO: 278469 - DNA, 502 bp, Homo sapiens
atccttaattaaattaatcccctccccccgcagccgaacccgccctccgaatccagagaggcgctgctgacaccgccgccacaccgccgccacaccgccgctgcctcagtcatgccgaagcacgagttctctgtggacatgacctgtggaggctgtgctgaagctgtctctcgggtcctcaataagcttggaggagttaagtatgacattgacctgcccaacaagaaggtctgcattgaatctgagcacagcatggacactctgcttgcaaccctgaagaaaacaggaaagactgtttcctaccttggccttgagtagcaggggcctggtccccacagcccacaggatggaccaaagggggcaggatgctgatcctcccgctggcttccagacagacctgggacttggcagtcatgccgggtgatggtgttcctgcggagaccctcagttgtcctattccttcctagcttccctgcaataaaatcaagctgcttttgttgga

SEQ ID NO: 278470 - DNA, 963 bp, Homo sapiens
atccttaattaaattaatcccctccccccgcagccgaacccgccctccgaatccagagaggcgctgctgacaccgccgccacaccgccgccacaccgccgctgcctcagtcatgccgaagcacgagttctctgtggacatgacctgtggaggctgtgctgaagctgtctctcgggtcctcaataagcttggaggagttaagtatgacattgacctgcccaacaagaaggtctgcattgaatctgagcacagcatggacactctgcttgcaaccctgaagaaaacaggaaagactgtttcctaccttggccttgagtagcaggggcctggtccccacagcccacaggatggaccaaagggggcaggatgctgatcctcccgctggcttccagacagacctgggacttggcagtcatgccgggtgatggtgttcctgcggagaccctcagttgtcctattccttcctagcttccctgcaataaaatcaagctgcttttgttggaaaaaaaaaaaaaaaaaaaaaaaaaaaagggggggccgtttaaaattttcccggcgagaggggccccaagtttaacgccgttacccgagttttcttgtgttacaaggggtggccccttattagtggagagcggatattaaaagcataggcacatgggacgcgcggtttttaacacggtgcgtgagaacgtggggaaaaacgtgtgtaaccttgggaaaacttttgggagaggagaacctttacttgtctgggggggggaacatatagggggggagaaacttacattaacgaggagaatttaaaggagctctaaggggaacatttattaaagatttttgaaaggggggtaatacggggcgttaaacacattagcgttgaaaattatgcttagacgggcattgaagaaggtttggggataacggggagatatgtaattgtgggaccattttttataccgggatt

SEQ ID NO: 278471 - DNA, 617 bp, Homo sapiens
atccttaattaaattaatcccctccccccgcagccgaacccgccctccgaatccagagaggcgctgctgacaccgccgccacaccgccgccacaccgccgctgcctcagtcatgccgaagcacgagttctctgtggacatgacctgtggaggctgtgctgaagctgtctctcgggtcctcaataagcttggaggagttaagtatgacattgacctgcccaacaagaaggtctgcattgaatctgagcacagcatggacactctgcttgcaaccctgaagaaaacaggaaagactgtttcctaccttggccttgagtagcaggggcctggtccccacagcccacaggatggaccaaagggggcaggatgctgatcctcccgctggcttccagacagacctgggacttggcagtcatgccgggtgatggtgttcctgcggagaccctcagttgtcctattccttcctagcttccctgcaataaaatcaagctgcttttgttggaggagccttaaggctccccaaacaagaaattaaggctgaataataatattactgaaaaaatgtgactttctttagataaacatgcatcatgcaaactctttaagattttaggaaat

SEQ ID NO: 278472 - DNA, 987 bp, Homo sapiens
tttttttttctgttttggttttttaaccttcatttatttcattggttagttaaactactgcagaaatttttggaaagatcgtcctggtgcttctgcaagcgccaaaagcaaaccatggacctggtagttcaggcagaataccattttttaaaataaaccaaagtctgtattttatccttccccattccacagaccgcagcagactgtggaagctggcgaggcccagtagaatcccgcgaccccacagcctcagcgctcagggttccacggtccagtacaggctaaactgacctcgccgacggccgcgcccacttgggcactttctcccgggtcttgttctacggggcgtttgaggatttcttagtctctttcttccctggcactcttcctccgagggccagaagtctgaattactaggcagctaccagccgcttggagcgggaacctgctgtaagagcgaaacgttgccccacttggcggtgtccagggtcagaagtcagtggtggctatactcggaataaggctgacagttcgcagtgagggaaaaacgtgtaaacctttgggcccacgtagctgccccttttcaccctgcccagcagaaacaaagtgaacgctcttcttttctctgtaagctggaaattaccaagggcatacttgagcctaccaggccccgaggaccccatttcaggcccaaatgtgccagttttacccttgctgagagtgctcactgcagtcttcatcaaccaacttctaagtgggtgtcaatgaggagcagcctcacgctttttctgcagagagaaggtagagagagatgagggctttcggtgtggccctgtgaccccaggctactatcccaggctatggcacgtcttcgccagaaaagcagcgaccgagttatttccctgttgacaatgcccagcagccgggccctgttattataggggttattagaggggtcgccttcttctctaatggttcctgttcagg

SEQ ID NO: 278473 - DNA, 1114 bp, Homo sapiens
tttttttttctgttttggttttttaaccttcatttatttcattggttagttaaactactgcagaaatttttggaaagatcgtcctggtgcttctgcaagcgccaaaagcaaaccatggacctggtagttcaggcagaataccattttttaaaataaaccaaagtctgtattttatccttccccattccacagaccgcagcagactgtggaagctggcgaggcccagtagaatcccgcgaccccacagcctcagcgctcagggttccacggtccagtacaggctaaactgacctcgccgacggccgcgcccacttgggcactttctcccgggtcttgttctacggggcgtttgaggatttcttagtctctttcttccctggcactcttcctccgagggccagaagtctgaattactaggcagctaccagccgcttggagcgggaacctgctgtaagagcgaaacgttgccccacttggcggtgtccaggtctcgcagtaggctcgggtcacaggagggagggggtaggggttcagctccgccgaaagagttagctaccgtcccctcctttctcggccggagacgttaagagttcccggtgaatgacaccgtccagggtcagaagtcagtggtggctatactcggaataaggctgacagttcgcagtgagggaaaaacgtgtaaacctttgggcccacgtagctgccccttttcaccctgcccagcagaaacaaagtgaacgctcttcttttctctgtaagctggaaattaccaagggcatacttgagcctaccaggccccgaggaccccatttcaggcccaaatgtgccagttttacccttgctgagagtgctcactgcagtcttcatcaaccaacttctaagtgggtgtcaatgaggagcagcctcacgctttttctgcagagagaaggtagagagagatgagggctttcggtgtggccctgtgaccccaggctactatcccaggctatggcacgtcttcgccagaaaagcagcgaccgagttatttccctgttgacaatgcccagcagccgggccctgttattataggggttattagaggggtcgccttcttctctaatggttcctgttcagg

SEQ ID NO: 278474 - DNA, 735 bp, Homo sapiens
tctgagagctgtacagtagtggctgaggtggggtttgcagtgaaggatgtgacacaccccagatggagctgaatgggcgtgggacctcaggtcttggccacagtggcctgctgtgcattgatcctgctacagagtgtccattatcagccaggcgcggtggctcacgcctgtaatccctgcactttgggaggccgaggtagggcggatacctgaggtcgggagttcaagaccagcatgaccaacgcagagaaaccccgtctctactaaaaatacaaaattagccgggcgtggtggcgcatgcttgtagtcccagctactcgggaggctgaggcaggagaatcgcttgaacccgggaggcagaggttgagagctgcacacgactgacgtaaccatggagggggccatgtagggctccagccgcctgcagatctccagggaggcacagtcgatgacaaggaggcccggcccattgctgtaccagacctcagagccgctgttgaccacctccatggccttcactgggtaggggttctgccgtgcgtcttcatccgcgatgctgaacttggacctgttggctgtgtgtgagcacaggtaggagcagctgtcctttggggtgccccgcaccacgggaaacacagccacaagcccatcggcgaggcccgctaagaccaggtcacccttcctgccaacagtgtgaaggaccccaaccctgacagagaccagaccctgggatct

SEQ ID NO: 278475 - DNA, 829 bp, Homo sapiens
gggtcaggtcatgctcagacctgtcggaggcagcaccgggcgtatgtagcatgtctgagtcctcgcagtcggtggagaaaggcacactggaagaacttgctggggagctggggaggcttgagggggacctggcagcctggcggggtggggatgaggagtaggaggacatggagcagtagtcagtgagtgattcctggtggatcaggatctgcgtgcccagctcctcactgtacatgatgctcacgtccgcgatggagtccccctcaggcacctttgggttggccgtgtggctggctgccgggggttccgtgtccaagggccgcacgggaaacatgtccctgagggggctggggaccccgcagaagtaccgggcacacagctggtaggtggtggagtggtacatcaccaaggagttggccttgtcatccaggcaccagacgacctcctcccctctgccctcagagctgcacacgactgacgtaaccatggagggggccatgtagggctccagccgcctgcagatctccagggaggcacagtcgatgacaaggaggcccggcccattgctgtaccagacctcagagccgctgttgaccacctccatggccttcactgggtaggggttctgccgtgcgtcttcatccgcgatgctgaacttggacctgttggctgtgtgtgagcacaggtaggagcagctgtcctttggggtgccccgcaccacgggaaacacagccacaagcccatcggcgaggcccgctaagaccaggtcacccttcctgccaacagtgtgaaggaccccaaccctgacagagaccagaccctgggatct

SEQ ID NO: 278476 - DNA, 619 bp, Homo sapiens
ggcatattgctgctgagccagaatgagctgtaccgccagatcctgctgctgatgcacctgctgccgcaagacctgctgctgctaaagccctgccagtcttcctactgctactgtcaggaggtgctggaccggctcatccaatgcgggctcctggttgctgaggagagttgggctacacagagcagctgttccagttcctgcaggccaccgcccaggaagaagggatcttcgagtgtgcggacccaaagctcgccatcagtgctgtctggaccttcagagacctaggggttctgcagcagacgccgagccctgcaggccccaggctccacctgtcccctacttttgccagcctggacaatcaggaaaaactagaacagttcatccggcagttcatttgtagctagaactgtgaggaggagcctgtgctgagacttctcagccccagaacacagctgtgtcctagagccagaagatggagaggaggctgcaaacccttagctgctctataaatataatcattgaggcttgattgtcccttgccatctcttgctttttcccttctttgatgtgataaacaaggggacgagacgagttgtcttttccccagcccagcagcatc

SEQ ID NO: 278477 - DNA, 872 bp, Homo sapiens
ggcatattgctgctgagccagaatgagctgtaccgccagatcctgctgctgatgcacctgctgccgcaagacctgctgctgctaaagccctgccagtcttcctactgctactgtcaggaggtgctggaccggctcatccaatgcgggctcctggttgctgaggagaccccaggctcccggccagcctgtgacacagggcgacagcgattgagcagaaagctgctgtggaaaccgagtggggactttactgatagtgacagtgatgacttcggagaggctgacggccggtacttcaggctcagccagcagtcacactgcccagatttctttcttttcctctgccgcctgctcagcccgctgctcaaggcctttgcacaggctgccgccttcctccgccagggccagctgcccgatactgagttgggctacacagagcagctgttccagttcctgcaggccaccgcccaggaagaagggatcttcgagtgtgcggacccaaagctcgccatcagtgctgtctggaccttcagagacctaggggttctgcagcagacgccgagccctgcaggccccaggctccacctgtcccctacttttgccagcctggacaatcaggaaaaactagaacagttcatccggcagttcatttgtagctagaactgtgaggaggagcctgtgctgagacttctcagccccagaacacagctgtgtcctagagccagaagatggagaggaggctgcaaacccttagctgctctataaatataatcattgaggcttgattgtcccttgccatctcttgctttttcccttctttgatgtgataaacaaggggacgagacgagttgtcttttccccagcccagcagcatc

SEQ ID NO: 278478 - DNA, 2017 bp, Homo sapiens
atggcgcaaccaaagcaagagagggtggcgcgtgccagacaccaacggtcggaaaccgccagacaccaacggtcggaaaccgccaagacaccaacgctcggaaaccgccagacaccaacggtcggaaaccgccagacaccaacgctcggaatccacgccaggccacgacggagggcgactacctcccttctgaccctgctgctggcgttcggaaaaaacgcagtccggtgtgctctgattggtccaggctctttgacgtcacggactcgacctttgacagagccactaggcgaaaaggagagacgggaagtattttttccgccccgcccggaaagggtggagcacaacgtcgaaagcagccgttgggagcccaggaggcggggcgcctgtgggagccgtggagggaactttcccagtccccgaggcggatccggtgttgcatccttggagcgagctgagagctcgagtacagaacctgctaaggccatcaaacctattgatcggaagtcagtccatcagatttgctctgggccggtggtaccgagtctaagcactgcggtgaaggagttagtagaaaacagtctggatgctggtgccactaatattgatctaaagcttaaggactatggagtggatctcattgaagtttcaggcaatggatgtggggtagaagaagaaaacttcgaaggcttaactctgaaacatcacacatctaagattcaagagtttgccgacctacctcaggttgaaacttttggctttcggggggaagctctgagctcactttgtgcactgagtgatgtcaccatttctacctgccatgtatcggcgaaggttgggactcgactggtgtttgatcactatgggaaaatcatccagaaaaccccctacccccaccccagagggatgacagtcagtgtgaagcagttattttctacgctacctgtgcaccataaagaatttcaaaggaatattaagaagaaacgtgcctgcttccccttcgccttctgccgtgattgtcagtttcctgaggcctccccagccatgcttcctgtacagcctgcagaactgactcctagaagtaccccaccccacccctgctccttggaggacaacgtgatcactgtattcagctctgtcaagaatggtccaggttcttctagatgatctgcacaaatggctcctctcctccttcctgatgtctgccattagcactggaataaagttcctgctgaaaatccacatctcccctgggtccggtgttctggaagtgagagagacaatgtcacacctcaaggagacagctctctagacaggaaggttattcacgtcccatgtcaagtctagctagagttcagagcaattgagaagtgcgattttatctcctgcctttcattctataccctgcttctgaaccatcgtgttcaactgtgaaactcacgctttggtgaccctgactccaaaacttaatacacccaaggtcagccccagtgatctgcttcatagcgaggactttgggtgggtcttcccagggagtagggcaccctcagagaatgtggctttggacttcatcacagctagggtcttttgtgtcacttcagatctaaacttgtaactgtgctagatctgtttctaatgtgacaacatcacaaaccacgagtccagaagcctaatccataatcctacctcctcatgacgaagtctcatgctctgtgctcaacatggttagctgcacaagatgtaaaccaaagcttcactgaaccctcgacccaaatcggtaactcaagtgcatcaatcataaagaacctccccgaactcagtatttatgattatttttgaggcagggtctcactctgtcgccccggctggagtgcagtggcaggatcaggtctccctgcagcccgactcccaggctccagcgatcctcctgcctcagctcttgagtagttgggagtaagagatgcctcccacatcgcctggtaatttgtatttgggagaggggatatttcgccacgtt

SEQ ID NO: 278479 - DNA, 444 bp, Homo sapiens
tgggaggctgaagcaggaggattgcttgagcctgggaggtcaaggctgcagtgagctatgattgcgcccctgcactccagcctgggcagcggagggagaccctgtctgaaaataaaaaaagaggtgggggcctatgaccccccctttaattttggcccaaccttagtaacaggatagtcattgagtagggcaaaagtgatgttatgatgtttttcagcctccaatttacagtctaaaacatgtacgcggtggccctgagctgttgtgtaaatggactcactgccctgaggccaccatgctgcaaggaagcccaagctaaccctaggatgtgccctgagacgacatgaagacgcatccccagccagccttccactaccccatccttcactgccccattctcacccccgcccacctccttactccctccaccccgtcgggtaagag

SEQ ID NO: 278480 - DNA, 953 bp, Homo sapiens
cttgaagccagatcaagcaattgggttccttggatttccgaaatagaccccaatattctgcctttaccccggaggatgcagatgtaccttctctcaggccgatgacctcaggcctccacggtccctggagctctaggaaaggtgggcgcgatctcgcgcccacacccagtgctctgggtcataagcctggatctggaaaaacaaatgcgctttgagaagacggggactccccaggatacccctctctcccctcgtccagcctccagcccacccgattcctccccacatcctccacctccccaggccccacccacctcctccaactcctccggggaaacccaagccctgcagcgcatggaacagaagaactggaaccgacgcttctggaacaaggctatctgagagcagttcttcctggccctcgggttcatgggacggcataactggaaccaatgcttagggcgcaagggtatgtgagagtgggtcttcccgtacaggaagtagaagatcttttgtttgggggcctcgtcgtcctcctccatgtcattggccagatagctgaggacagaaatcaggttgctgctcaggggcaccaccaggagagacctccggctgaggtcagcttcccagagaggaaggtaagggaccgtccctagctcaggactggcacccaccctgcagagagccacgccttcctcaggagggctctgctggacagagacctgatcaagggcatctcccactccttcaggatggagacaaaaacccaactggtgaccaagagtggtggcttaggcctggaatcccagcacactgggaggccgaagcaggaggatcacttgaggccaggagtttgagacaggcctgggcaacatagcaagacccttgtctctattaaaaatataaaaaatacgccagacgtggtggctcatgcctgtaatcccagcactttg

SEQ ID NO: 278481 - DNA, 2240 bp, Homo sapiens
atggcgcaaccaaagcaagagagggtggcgcgtgccagacaccaacggtcggaaaccgccagacaccaacggtcggaaaccgccaagacaccaacgctcggaaaccgccagacaccaacggtcggaaaccgccagacaccaacgctcggaatccacgccaggccacgacggagggcgactacctcccttctgaccctgctgctggcgttcggaaaaaacgcagtccggtgtgctctgattggtccaggctctttgacgtcacggactcgacctttgacagagccactaggcgaaaaggagagacgggaagtattttttccgccccgcccggaaagggtggagcacaacgtcgaaagcagccgttgggagcccaggaggcggggcgcctgtgggagccgtggagggaactttcccagtccccgaggcggatccggtgttgcatccttggagcgagctgagagctcgagagacggggatttagctatgttgcccaagctggtctggaactccggagctcaagcagtccgcccgccttggccccccaaagcgctggaattacaggcgtaatgcactgtgcctggcctttaaaaaaaaattgaggttattttggggacagtagagcgtccagacacatcctaatttgcatagctgcgcagttttaaaaaatgcaatgcatttttacctgttaggtacagaacctgctaaggccatcaaacctattgatcggaagtcagtccatcagatttgctctgggccggtggtaccgagtctaagcactgcggtgaaggagttagtagaaaacagtctggatgctggtgccactaatattgatctaaagcttaaggactatggagtggatctcattgaagtttcaggcaatggatgtggggtagaagaagaaaacttcgaaggcttaactctgaaacatcacacatctaagattcaagagtttgccgacctacctcaggttgaaacttttggctttcggggggaagctctgagctcactttgtgcactgagtgatgtcaccatttctacctgccatgtatcggcgaaggttgggactcgactggtgtttgatcactatgggaaaatcatccagaaaaccccctacccccaccccagagggatgacagtcagtgtgaagcagttattttctacgctacctgtgcaccataaagaatttcaaaggaatattaagaagaaacgtgcctgcttccccttcgccttctgccgtgattgtcagtttcctgaggcctccccagccatgcttcctgtacagcctgcagaactgactcctagaagtaccccaccccacccctgctccttggaggacaacgtgatcactgtattcagctctgtcaagaatggtccaggttcttctagatgatctgcacaaatggctcctctcctccttcctgatgtctgccattagcactggaataaagttcctgctgaaaatccacatctcccctgggtccggtgttctggaagtgagagagacaatgtcacacctcaaggagacagctctctagacaggaaggttattcacgtcccatgtcaagtctagctagagttcagagcaattgagaagtgcgattttatctcctgcctttcattctataccctgcttctgaaccatcgtgttcaactgtgaaactcacgctttggtgaccctgactccaaaacttaatacacccaaggtcagccccagtgatctgcttcatagcgaggactttgggtgggtcttcccagggagtagggcaccctcagagaatgtggctttggacttcatcacagctagggtcttttgtgtcacttcagatctaaacttgtaactgtgctagatctgtttctaatgtgacaacatcacaaaccacgagtccagaagcctaatccataatcctacctcctcatgacgaagtctcatgctctgtgctcaacatggttagctgcacaagatgtaaaccaaagcttcactgaaccctcgacccaaatcggtaactcaagtgcatcaatcataaagaacctccccgaactcagtatttatgattatttttgaggcagggtctcactctgtcgccccggctggagtgcagtggcaggatcaggtctccctgcagcccgactcccaggctccagcgatcctcctgcctcagctcttgagtagttgggagtaagagatgcctcccacatcgcctggtaatttgtatttgggagaggggatatttcgccacgtt

SEQ ID NO: 278482 - DNA, 2095 bp, Homo sapiens
atggcgcaaccaaagcaagagagggtggcgcgtgccagacaccaacggtcggaaaccgccagacaccaacggtcggaaaccgccaagacaccaacgctcggaaaccgccagacaccaacggtcggaaaccgccagacaccaacgctcggaatccacgccaggccacgacggagggcgactacctcccttctgaccctgctgctggcgttcggaaaaaacgcagtccggtgtgctctgattggtccaggctctttgacgtcacggactcgacctttgacagagccactaggcgaaaaggagagacgggaagtattttttccgccccgcccggaaagggtggagcacaacgtcgaaagcagccgttgggagcccaggaggcggggcgcctgtgggagccgtggagggaactttcccagtccccgaggcggatccggtgttgcatccttggagcgagctgagagctcgaggtgagctgggctcgcggtcgcccctctcgcgcgccctctttaagaaccacggcgtccaacctccctggaaatggggggaacatggccgaggcgcgtggcgaggccgcctcgtggaggccccggagcggcatcctcagcgccccagcgatccggtgcccattaggtgcgccttgaagccgagtacagaacctgctaaggccatcaaacctattgatcggaagtcagtccatcagatttgctctgggccggtggtaccgagtctaagcactgcggtgaaggagttagtagaaaacagtctggatgctggtgccactaatattgatctaaagcttaaggactatggagtggatctcattgaagtttcaggcaatggatgtggggtagaagaagaaaacttcgaaggcttaatgatgtcaccatttctacctgccatgtatcggcgaaggttgggactcgactggtgtttgatcactatgggaaaatcatccagaaaaccccctacccccaccccagagggatgacagtcagtgtgaagcagttattttctacgctacctgtgcaccataaagaatttcaaaggaatattaagaagaaacgtgcctgcttccccttcgccttctgccgtgattgtcagtttcctgaggcctccccagccatgcttcctgtacagcctgcagaactgactcctagaagtaccccaccccacccctgctccttggaggacaacgtgatcactgtattcagctctgtcaagaatggtccaggttcttctagatgatctgcacaaatggctcctctcctccttcctgatgtctgccattagcactggaataaagttcctgctgaaaatccacatctcccctgggtccggtgttctggaagtgagagagacaatgtcacacctcaaggagacagctctctagacaggaaggttattcacgtcccatgtcaagtctagctagagttcagagcaattgagaagtgcgattttatctcctgcctttcattctataccctgcttctgaaccatcgtgttcaactgtgaaactcacgctttggtgaccctgactccaaaacttaatacacccaaggtcagccccagtgatctgcttcatagcgaggactttgggtgggtcttcccagggagtagggcaccctcagagaatgtggctttggacttcatcacagctagggtcttttgtgtcacttcagatctaaacttgtaactgtgctagatctgtttctaatgtgacaacatcacaaaccacgagtccagaagcctaatccataatcctacctcctcatgacgaagtctcatgctctgtgctcaacatggttagctgcacaagatgtaaaccaaagcttcactgaaccctcgacccaaatcggtaactcaagtgcatcaatcataaagaacctccccgaactcagtatttatgattatttttgaggcagggtctcactctgtcgccccggctggagtgcagtggcaggatcaggtctccctgcagcccgactcccaggctccagcgatcctcctgcctcagctcttgagtagttgggagtaagagatgcctcccacatcgcctggtaatttgtatttgggagaggggatatttcgccacgtt

SEQ ID NO: 278483 - DNA, 2106 bp, Homo sapiens
atggcgcaaccaaagcaagagagggtggcgcgtgccagacaccaacggtcggaaaccgccagacaccaacggtcggaaaccgccaagacaccaacgctcggaaaccgccagacaccaacggtcggaaaccgccagacaccaacgctcggaatccacgccaggccacgacggagggcgactacctcccttctgaccctgctgctggcgttcggaaaaaacgcagtccggtgtgctctgattggtccaggctctttgacgtcacggactcgacctttgacagagccactaggcgaaaaggagagacgggaagtattttttccgccccgcccggaaagggtggagcacaacgtcgaaagcagccgttgggagcccaggaggcggggcgcctgtgggagccgtggagggaactttcccagtccccgaggcggatccggtgttgcatccttggagcgagctgagagctcgagtacagaacctgctaaggccatcaaacctattgatcggaagtcagtccatcagatttgctctgggccggtggtaccgagtctaagcactgcggtgaaggagttagtagaaaacagtctggatgctggtgccactaatattgatctaaagcttaaggactatggagtggatctcattgaagtttcaggcaatggatgtggggtagaagaagaaaacttcgaaggcttaactctgaaacatcacacatctaagattcaagagtttgccgacctacctcaggttgaaacttttggctttcggggggaagctctgagctcactttgtgcactgagtgatgtcaccatttctacctgccatgtatcggcgaaggttgggactcgactggtgtttgatcactatgggaaaatcatccagaaaaccccctacccccaccccagagggatgacagtcagtgtgaagcagttattttctacgctacctgtgcaccataaagaatttcaaaggaatattaagaagtgagtgagcgctcatgggatctggttgtttagaagcatgcaccacctcccgcttcactctctctgtctctcctgctccaccatggccagaaacgtgcctgcttccccttcgccttctgccgtgattgtcagtttcctgaggcctccccagccatgcttcctgtacagcctgcagaactgactcctagaagtaccccaccccacccctgctccttggaggacaacgtgatcactgtattcagctctgtcaagaatggtccaggttcttctagatgatctgcacaaatggctcctctcctccttcctgatgtctgccattagcactggaataaagttcctgctgaaaatccacatctcccctgggtccggtgttctggaagtgagagagacaatgtcacacctcaaggagacagctctctagacaggaaggttattcacgtcccatgtcaagtctagctagagttcagagcaattgagaagtgcgattttatctcctgcctttcattctataccctgcttctgaaccatcgtgttcaactgtgaaactcacgctttggtgaccctgactccaaaacttaatacacccaaggtcagccccagtgatctgcttcatagcgaggactttgggtgggtcttcccagggagtagggcaccctcagagaatgtggctttggacttcatcacagctagggtcttttgtgtcacttcagatctaaacttgtaactgtgctagatctgtttctaatgtgacaacatcacaaaccacgagtccagaagcctaatccataatcctacctcctcatgacgaagtctcatgctctgtgctcaacatggttagctgcacaagatgtaaaccaaagcttcactgaaccctcgacccaaatcggtaactcaagtgcatcaatcataaagaacctccccgaactcagtatttatgattatttttgaggcagggtctcactctgtcgccccggctggagtgcagtggcaggatcaggtctccctgcagcccgactcccaggctccagcgatcctcctgcctcagctcttgagtagttgggagtaagagatgcctcccacatcgcctggtaatttgtatttgggagaggggatatttcgccacgtt

SEQ ID NO: 278484 - DNA, 1208 bp, Homo sapiens
atggcgcaaccaaagcaagagagggtggcgcgtgccagacaccaacggtcggaaaccgccagacaccaacggtcggaaaccgccaagacaccaacgctcggaaaccgccagacaccaacggtcggaaaccgccagacaccaacgctcggaatccacgccaggccacgacggagggcgactacctcccttctgaccctgctgctggcgttcggaaaaaacgcagtccggtgtgctctgattggtccaggctctttgacgtcacggactcgacctttgacagagccactaggcgaaaaggagagacgggaagtattttttccgccccgcccggaaagggtggagcacaacgtcgaaagcagccgttgggagcccaggaggcggggcgcctgtgggagccgtggagggaactttcccagtccccgaggcggatccggtgttgcatccttggagcgagctgagagctcgagtacagaacctgctaaggccatcaaacctattgatcggaagtcagtccatcagatttgctctgggccggtggtaccgagtctaagcactgcggtgaaggagttagtagaaaacagtctggatgctggtgccactaatattgatctaaagcttaaggactatggagtggatctcattgaagtttcaggcaatggatgtggggtagaagaagaaaacttcgaaggcttaactctgaaacatcacacatctaagattcaagagtttgccgacctacctcaggttgaaacttttggctttcggggggaagctctgagctcactttgtgcactgagtgatgtcaccatttctacctgccatgtatcggcgaaggttgggactcgactggtgtttgatcactatgggaaaatcatccagaaaaccccctacccccaccccagagggatgacagtcagtgtgaagcagttattttctacgctacctgtgcaccataaagaatttcaaaggaatattaagaagcctccaatttacagtctaaaacatgtacgcggtggccctgagctgttgtgtaaatggactcactgccctgaggccaccatgctgcaaggaagcccaagctaaccctaggatgtgccctgagacgacatgaagacgcatccccagccagccttccactaccccatccttcactgccccattctcacccccgcccacctccttactccctccaccccgtcgggtaagag

SEQ ID NO: 278485 - DNA, 1169 bp, Homo sapiens
atggcgcaaccaaagcaagagagggtggcgcgtgccagacaccaacggtcggaaaccgccagacaccaacggtcggaaaccgccaagacaccaacgctcggaaaccgccagacaccaacggtcggaaaccgccagacaccaacgctcggaatccacgccaggccacgacggagggcgactacctcccttctgaccctgctgctggcgttcggaaaaaacgcagtccggtgtgctctgattggtccaggctctttgacgtcacggactcgacctttgacagagccactaggcgaaaaggagagacgggaagtattttttccgccccgcccggaaagggtggagcacaacgtcgaaagcagccgttgggagcccaggaggcggggcgcctgtgggagccgtggagggaactttcccagtccccgaggcggatccggtgttgcatccttggagcgagctgagagctcgaggtgagctgggctcgcggtcgcccctctcgcgcgccctctttaagaaccacggcgtccaacctccctggaaatggggggaacatggccgaggcgcgtggcgaggccgcctcgtggaggccccggagcggcatcctcagcgccccagcgatccggtgcccattaggtgcgccttgaagccgagtacagaacctgctaaggccatcaaacctattgatcggaagtcagtccatcagatttgctctgggccggtggtaccgagtctaagcactgcggtgaaggagttagtagaaaacagtctggatgctggtgccactaatattgatctaaagcttaaggactatggagtggatctcattgaagtttcaggcaatggatgtggggtagaagaagaaaacttcgaaggcttaactctgaaacatcacacatctaagattcaagagtttgccgacctacctcaggttgaaacttttggctttcggggggaagctctgagctcactttgtgcactgaggtgataaaatatttttatccattcacttgaccccttagaaaaacctctctgaaaattaattggaatcattattatttacagttttctgtctcaatatctcagcttccagcttctgaattctgttttgtctcactgccaatctaagtcctagtacttctgaaatgtgagcaataaatgaatgaaatgaaaaa

SEQ ID NO: 278486 - DNA, 1327 bp, Homo sapiens
atggcgcaaccaaagcaagagagggtggcgcgtgccagacaccaacggtcggaaaccgccagacaccaacggtcggaaaccgccaagacaccaacgctcggaaaccgccagacaccaacggtcggaaaccgccagacaccaacgctcggaatccacgccaggccacgacggagggcgactacctcccttctgaccctgctgctggcgttcggaaaaaacgcagtccggtgtgctctgattggtccaggctctttgacgtcacggactcgacctttgacagagccactaggcgaaaaggagagacgggaagtattttttccgccccgcccggaaagggtggagcacaacgtcgaaagcagccgttgggagcccaggaggcggggcgcctgtgggagccgtggagggaactttcccagtccccgaggcggatccggtgttgcatccttggagcgagctgagagctcgagagacggggatttagctatgttgcccaagctggtctggaactccggagctcaagcagtccgcccgccttggccccccaaagcgctggaattacaggcgtaatgcactgtgcctggcctttaaaaaaaaattgaggttattttggggacagtagagcgtccagacacatcctaatttgcatagctgcgcagttttaaaaaatgcaatgcatttttacctgttaggtacagaacctgctaaggccatcaaacctattgatcggaagtcagtccatcagatttgctctgggccggtggtaccgagtctaagcactgcggtgaaggagttagtagaaaacagtctggatgctggtgccactaatattgatctaaagcttaaggactatggagtggatctcattgaagtttcaggcaatggatgtggggtagaagaagaaaacttcgaaggcttaactctgaaacatcacacatctaagattcaagagtttgccgacctacctcaggttgaaacttttggctttcggggggaagctctgagctcactttgtgcactgagtgatgtcaccatttctacctgccatgtatcggcgaaggttgggactcgactggtgtttgatcactatgggaaaatcatccagaaaaccccctacccccaccccagagggatgacagtcagtgtgaagcagttattttctacgctacctgtgcaccataaagaatttcaaaggaatattaagaagaaacgtgcctgcttccccttcgccttctgccgtgattgtcagtttcctgaggcctccccagccatgcttcctgtacagcctgcagaactgtgagtcaattaaacctgttttcttcataaaaac

SEQ ID NO: 278487 - DNA, 205 bp, Homo sapiens
cccctctcgcgcgccctctttaagaaccacggcgtccaacctccctggaaatggggggaacatggccgaggcgcgtggcgaggccgcctcgtggaggccccggagcggcatcctcagcgccccagcgatccggtgcccattaggtgcgccttgaagccgaggcaagctccttcggggtgctgggctgcgggcaaagaattcggcc

SEQ ID NO: 278488 - DNA, 2020 bp, Homo sapiens
gccgctcctgccgtgcatgttggggagccagtacatgcaggtgggctccacacggagaggggcgccgaccccgtgatagggctttacctggtacatcggggtggcgcgtgccagacaccaacggtcggaaaccgccagacaccaacgctcggaatccacgccaggccacgacggagggcgactacctcccttctgaccctgctgctggcgttcggaaaaaacgcagtccggtgtgctctgattggtccaggctctttgacgtcacggactcgacctttgacagagccactaggcgaaaaggagagacgggaagtattttttccgccccgcccggaaagggtggagcacaacgtcgaaagcagccgttgggagcccaggaggcggggcgcctgtgggagccgtggagggaactttcccagtccccgaggcggatccggtgttgcatccttggagcgagctgagagctcgagtacagaacctgctaaggccatcaaacctattgatcggaagtcagtccatcagatttgctctgggccggtggtaccgagtctaagcactgcggtgaaggagttagtagaaaacagtctggatgctggtgccactaatattgatctaaagcttaaggactatggagtggatctcattgaagtttcaggcaatggatgtggggtagaagaagaaaacttcgaaggcttaactctgaaacatcacacatctaagattcaagagtttgccgacctacctcaggttgaaacttttggctttcggggggaagctctgagctcactttgtgcactgagtgatgtcaccatttctacctgccatgtatcggcgaaggttgggactcgactggtgtttgatcactatgggaaaatcatccagaaaaccccctacccccaccccagagggatgacagtcagtgtgaagcagttattttctacgctacctgtgcaccataaagaatttcaaaggaatattaagaagaaacgtgcctgcttccccttcgccttctgccgtgattgtcagtttcctgaggcctccccagccatgcttcctgtacagcctgcagaactgactcctagaagtaccccaccccacccctgctccttggaggacaacgtgatcactgtattcagctctgtcaagaatggtccaggttcttctagatgatctgcacaaatggctcctctcctccttcctgatgtctgccattagcactggaataaagttcctgctgaaaatccacatctcccctgggtccggtgttctggaagtgagagagacaatgtcacacctcaaggagacagctctctagacaggaaggttattcacgtcccatgtcaagtctagctagagttcagagcaattgagaagtgcgattttatctcctgcctttcattctataccctgcttctgaaccatcgtgttcaactgtgaaactcacgctttggtgaccctgactccaaaacttaatacacccaaggtcagccccagtgatctgcttcatagcgaggactttgggtgggtcttcccagggagtagggcaccctcagagaatgtggctttggacttcatcacagctagggtcttttgtgtcacttcagatctaaacttgtaactgtgctagatctgtttctaatgtgacaacatcacaaaccacgagtccagaagcctaatccataatcctacctcctcatgacgaagtctcatgctctgtgctcaacatggttagctgcacaagatgtaaaccaaagcttcactgaaccctcgacccaaatcggtaactcaagtgcatcaatcataaagaacctccccgaactcagtatttatgattatttttgaggcagggtctcactctgtcgccccggctggagtgcagtggcaggatcaggtctccctgcagcccgactcccaggctccagcgatcctcctgcctcagctcttgagtagttgggagtaagagatgcctcccacatcgcctggtaatttgtatttgggagaggggatatttcgccacgtt

SEQ ID NO: 278489 - DNA, 2198 bp, Homo sapiens
atggcgcaaccaaagcaagagagggtggcgcgtgccagacaccaacggtcggaaaccgccagacaccaacggtcggaaaccgccaagacaccaacgctcggaaaccgccagacaccaacggtcggaaaccgccagacaccaacgctcggaatccacgccaggccacgacggagggcgactacctcccttctgaccctgctgctggcgttcggaaaaaacgcagtccggtgtgctctgattggtccaggctctttgacgtcacggactcgacctttgacagagccactaggcgaaaaggagagacgggaagtattttttccgccccgcccggaaagggtggagcacaacgtcgaaagcagccgttgggagcccaggaggcggggcgcctgtgggagccgtggagggaactttcccagtccccgaggcggatccggtgttgcatccttggagcgagctgagagctcgaggtgagctgggctcgcggtcgcccctctcgcgcgccctctttaagaaccacggcgtccaacctccctggaaatggggggaacatggccgaggcgcgtggcgaggccgcctcgtggaggccccggagcggcatcctcagcgccccagcgatccggtgcccattaggtgcgccttgaagccgagtacagaacctgctaaggccatcaaacctattgatcggaagtcagtccatcagatttgctctgggccggtggtaccgagtctaagcactgcggtgaaggagttagtagaaaacagtctggatgctggtgccactaatattgatctaaagcttaaggactatggagtggatctcattgaagtttcaggcaatggatgtggggtagaagaagaaaacttcgaaggcttaactctgaaacatcacacatctaagattcaagagtttgccgacctacctcaggttgaaacttttggctttcggggggaagctctgagctcactttgtgcactgagtgatgtcaccatttctacctgccatgtatcggcgaaggttgggactcgactggtgtttgatcactatgggaaaatcatccagaaaaccccctacccccaccccagagggatgacagtcagtgtgaagcagttattttctacgctacctgtgcaccataaagaatttcaaaggaatattaagaagaaacgtgcctgcttccccttcgccttctgccgtgattgtcagtttcctgaggcctccccagccatgcttcctgtacagcctgcagaactgactcctagaagtaccccaccccacccctgctccttggaggacaacgtgatcactgtattcagctctgtcaagaatggtccaggttcttctagatgatctgcacaaatggctcctctcctccttcctgatgtctgccattagcactggaataaagttcctgctgaaaatccacatctcccctgggtccggtgttctggaagtgagagagacaatgtcacacctcaaggagacagctctctagacaggaaggttattcacgtcccatgtcaagtctagctagagttcagagcaattgagaagtgcgattttatctcctgcctttcattctataccctgcttctgaaccatcgtgttcaactgtgaaactcacgctttggtgaccctgactccaaaacttaatacacccaaggtcagccccagtgatctgcttcatagcgaggactttgggtgggtcttcccagggagtagggcaccctcagagaatgtggctttggacttcatcacagctagggtcttttgtgtcacttcagatctaaacttgtaactgtgctagatctgtttctaatgtgacaacatcacaaaccacgagtccagaagcctaatccataatcctacctcctcatgacgaagtctcatgctctgtgctcaacatggttagctgcacaagatgtaaaccaaagcttcactgaaccctcgacccaaatcggtaactcaagtgcatcaatcataaagaacctccccgaactcagtatttatgattatttttgaggcagggtctcactctgtcgccccggctggagtgcagtggcaggatcaggtctccctgcagcccgactcccaggctccagcgatcctcctgcctcagctcttgagtagttgggagtaagagatgcctcccacatcgcctggtaatttgtatttgggagaggggatatttcgccacgtt

SEQ ID NO: 278490 - DNA, 1928 bp, Homo sapiens
atggcgcaaccaaagcaagagagggtggcgcgtgccagacaccaacggtcggaaaccgccagacaccaacggtcggaaaccgccaagacaccaacgctcggaaaccgccagacaccaacggtcggaaaccgccagacaccaacgctcggaatccacgccaggccacgacggagggcgactacctcccttctgaccctgctgctggcgttcggaaaaaacgcagtccggtgtgctctgattggtccaggctctttgacgtcacggactcgacctttgacagagccactaggcgaaaaggagagacgggaagtattttttccgccccgcccggaaagggtggagcacaacgtcgaaagcagccgttgggagcccaggaggcggggcgcctgtgggagccgtggagggaactttcccagtccccgaggcggatccggtgttgcatccttggagcgagctgagagctcgagtacagaacctgctaaggccatcaaacctattgatcggaagtcagtccatcagatttgctctgggccggtggtaccgagtctaagcactgcggtgaaggagttagtagaaaacagtctggatgctggtgccactaatattgatctaaagcttaaggactatggagtggatctcattgaagtttcaggcaatggatgtggggtagaagaagaaaacttcgaaggcttaactctgaaacatcacacatctaagattcaagagtttgccgacctacctcaggttgaaacttttggctttcggggggaagctctgagctcactttgtgcactgagtgatgtcaccatttctacctgccatgtatcggcgaaggttgggactcgactggtgtttgatcactatgggaaaatcatccagaaaaccccctacccccaccccagagggatgacagtcagtgtgaagcagttattttctacgctacctgtgcaccataaagaatttcaaaggaatattaagaaggactcctagaagtaccccaccccacccctgctccttggaggacaacgtgatcactgtattcagctctgtcaagaatggtccaggttcttctagatgatctgcacaaatggctcctctcctccttcctgatgtctgccattagcactggaataaagttcctgctgaaaatccacatctcccctgggtccggtgttctggaagtgagagagacaatgtcacacctcaaggagacagctctctagacaggaaggttattcacgtcccatgtcaagtctagctagagttcagagcaattgagaagtgcgattttatctcctgcctttcattctataccctgcttctgaaccatcgtgttcaactgtgaaactcacgctttggtgaccctgactccaaaacttaatacacccaaggtcagccccagtgatctgcttcatagcgaggactttgggtgggtcttcccagggagtagggcaccctcagagaatgtggctttggacttcatcacagctagggtcttttgtgtcacttcagatctaaacttgtaactgtgctagatctgtttctaatgtgacaacatcacaaaccacgagtccagaagcctaatccataatcctacctcctcatgacgaagtctcatgctctgtgctcaacatggttagctgcacaagatgtaaaccaaagcttcactgaaccctcgacccaaatcggtaactcaagtgcatcaatcataaagaacctccccgaactcagtatttatgattatttttgaggcagggtctcactctgtcgccccggctggagtgcagtggcaggatcaggtctccctgcagcccgactcccaggctccagcgatcctcctgcctcagctcttgagtagttgggagtaagagatgcctcccacatcgcctggtaatttgtatttgggagaggggatatttcgccacgtt

SEQ ID NO: 278491 - DNA, 1874 bp, Homo sapiens
atggcgcaaccaaagcaagagagggtggcgcgtgccagacaccaacggtcggaaaccgccagacaccaacggtcggaaaccgccaagacaccaacgctcggaaaccgccagacaccaacggtcggaaaccgccagacaccaacgctcggaatccacgccaggccacgacggagggcgactacctcccttctgaccctgctgctggcgttcggaaaaaacgcagtccggtgtgctctgattggtccaggctctttgacgtcacggactcgacctttgacagagccactaggcgaaaaggagagacgggaagtattttttccgccccgcccggaaagggtggagcacaacgtcgaaagcagccgttgggagcccaggaggcggggcgcctgtgggagccgtggagggaactttcccagtccccgaggcggatccggtgttgcatccttggagcgagctgagagctcgagtacagaacctgctaaggccatcaaacctattgatcggaagtcagtccatcagatttgctctgggccggtggtaccgagtctaagcactgcggtgaaggagttagtagaaaacagtctggatgctggtgccactaatattgatctaaagcttaaggactatggagtggatctcattgaagtttcaggcaatggatgtggggtagaagaagaaaacttcgaaggcttaactctgaaacatcacacatctaagattcaagagtttgccgacctacctcaggttgaaacttttggctttcggggggaagctctgagctcactttgtgcactgagtgatgtcaccatttctacctgccatgtatcggcgaaggttgggactcgactggtgtttgatcactatgggaaaatcatccagtctacgctacctgtgcaccataaagaatttcaaaggaatattaagaaggactcctagaagtaccccaccccacccctgctccttggaggacaacgtgatcactgtattcagctctgtcaagaatggtccaggttcttctagatgatctgcacaaatggctcctctcctccttcctgatgtctgccattagcactggaataaagttcctgctgaaaatccacatctcccctgggtccggtgttctggaagtgagagagacaatgtcacacctcaaggagacagctctctagacaggaaggttattcacgtcccatgtcaagtctagctagagttcagagcaattgagaagtgcgattttatctcctgcctttcattctataccctgcttctgaaccatcgtgttcaactgtgaaactcacgctttggtgaccctgactccaaaacttaatacacccaaggtcagccccagtgatctgcttcatagcgaggactttgggtgggtcttcccagggagtagggcaccctcagagaatgtggctttggacttcatcacagctagggtcttttgtgtcacttcagatctaaacttgtaactgtgctagatctgtttctaatgtgacaacatcacaaaccacgagtccagaagcctaatccataatcctacctcctcatgacgaagtctcatgctctgtgctcaacatggttagctgcacaagatgtaaaccaaagcttcactgaaccctcgacccaaatcggtaactcaagtgcatcaatcataaagaacctccccgaactcagtatttatgattatttttgaggcagggtctcactctgtcgccccggctggagtgcagtggcaggatcaggtctccctgcagcccgactcccaggctccagcgatcctcctgcctcagctcttgagtagttgggagtaagagatgcctcccacatcgcctggtaatttgtatttgggagaggggatatttcgccacgtt

SEQ ID NO: 278492 - DNA, 1104 bp, Homo sapiens
atggcgcaaccaaagcaagagagggtggcgcgtgccagacaccaacggtcggaaaccgccagacaccaacggtcggaaaccgccaagacaccaacgctcggaaaccgccagacaccaacggtcggaaaccgccagacaccaacgctcggaatccacgccaggccacgacggagggcgactacctcccttctgaccctgctgctggcgttcggaaaaaacgcagtccggtgtgctctgattggtccaggctctttgacgtcacggactcgacctttgacagagccactaggcgaaaaggagagacgggaagtattttttccgccccgcccggaaagggtggagcacaacgtcgaaagcagccgttgggagcccaggaggcggggcgcctgtgggagccgtggagggaactttcccagtccccgaggcggatccggtgttgcatccttggagcgagctgagagctcgagtacagaacctgctaaggccatcaaacctattgatcggaagtcagtccatcagatttgctctgggccggtggtaccgagtctaagcactgcggtgaaggagttagtagaaaacagtctggatgctggtgccactaatattgatctaaagcttaaggactatggagtggatctcattgaagtttcaggcaatggatgtggggtagaagaagaaaacttcgaaggcttaactctgaaacatcacacatctaagattcaagagtttgccgacctacctcaggttgaaacttttggctttcggggggaagctctgagctcactttgtgcactgagtgatgtcaccatttctacctgccatgtatcggcgaaggttgggactcgactggtgtttgatcactatgggaaaatcatccagaaaaccccctacccccaccccagagggatgacagtcagtgtgaagcagttattttctacgctacctgtgcaccataaagaatttcaaaggaatattaagaagaaacgtgcctgcttccccttcgccttctgccgtgattgtcagtttcctgaggcctccccagccatgcttcctgtacagcctgcagaactgtgagtcaattaaacctgttttcttcataaaaac

SEQ ID NO: 278493 - DNA, 988 bp, Homo sapiens
atggcgcaaccaaagcaagagagggtggcgcgtgccagacaccaacggtcggaaaccgccagacaccaacggtcggaaaccgccaagacaccaacgctcggaaaccgccagacaccaacggtcggaaaccgccagacaccaacgctcggaatccacgccaggccacgacggagggcgactacctcccttctgaccctgctgctggcgttcggaaaaaacgcagtccggtgtgctctgattggtccaggctctttgacgtcacggactcgacctttgacagagccactaggcgaaaaggagagacgggaagtattttttccgccccgcccggaaagggtggagcacaacgtcgaaagcagccgttgggagcccaggaggcggggcgcctgtgggagccgtggagggaactttcccagtccccgaggcggatccggtgttgcatccttggagcgagctgagagctcgagtacagaacctgctaaggccatcaaacctattgatcggaagtcagtccatcagatttgctctgggccggtggtaccgagtctaagcactgcggtgaaggagttagtagaaaacagtctggatgctggtgccactaatattgatctaaagcttaaggactatggagtggatctcattgaagtttcaggcaatggatgtggggtagaagaagaaaacttcgaaggcttaactctgaaacatcacacatctaagattcaagagtttgccgacctacctcaggttgaaacttttggctttcggggggaagctctgagctcactttgtgcactgaggtgataaaatatttttatccattcacttgaccccttagaaaaacctctctgaaaattaattggaatcattattatttacagttttctgtctcaatatctcagcttccagcttctgaattctgttttgtctcactgccaatctaagtcctagtacttctgaaatgtgagcaataaatgaatgaaatgaaaaa

SEQ ID NO: 278494 - DNA, 2374 bp, Homo sapiens
ccgggatctcgagatagccgcagctctcgcgatctttctggagccgcacctccacgcggagtccgagcgcgtgtgctgagaccccagggtcgggagggcggagactgggagggagggagaagcccctttggcctgccttacggaagcctgcgagggagggtggtgtccactgcccagttccgtgtcccgatgcccagcgccagcgccagccgcaagagtcaggagaagccgcgggagatcatggacgcggcggaagattatgctaaagagagatatggaatatcttcaatgatacaatcacaagaaaaaccagatcgagttttggttcgggttagagacttgacaatacaaaaagctgatgaagttgtttgggtacgtgcaagagttcatacaagcagagctaaagggaaacagtgcttcttagtcctacgtcagcagcagtttaatgtccaggctcttgtggcggtgggagaccatgcaagcaagcagatggttaaatttgctgccaacatcaacaaagagagcattgtggatgtagaaggtgttgtgagaaaagtgaatcagaaaattggaagctgtacacagcaagacgttgagttacatgttcagaagatttatgtgatcagtttggctgaaccccgtctgcccctgcagctggatgatgctgttcggcctgaggcagaaggagaagaggaaggaagagctactgttaaccaggatacaagattagacaacagagtcattgatcttaggacatcaactagtcaggcagtcttccgtctccagtctggcatctgccatctcttccgagaaactttaattaacaaaggttttgtggaaatccaaactcctaaaattatttcagctgccagtgaaggaggagccaatgtttttactgtgtcatattttaaaaataatgcatacctggctcagtccccacagctatataagcaaatgtgcatttgtgctgattttgagaaggttttctctattggaccagtattcagagcggaagactctaatacccatagacatctaactgagtttgttggtttggacattgaaatggcttttaattaccattaccacgaagttatggaagaaattgctgacaccatggtacaaatattcaaaggacttcaagaaaggtttcagactgaaattcaaacagtgaataaacagttcccatgtgagccattcaaatttttggagccaactctaagactagaatattgtgaagcattggctatgcttagggaagctggagtcgaaatgggagatgaagacgatctgagcacaccaaatgaaaagctgttgggtcatttggtaaaggaaaagtatgatacagatttttatattcttgataaatatccattggctgtaagacctttctataccatgcctgacccaagaaatcccaaacagtccaactcttacgatatgttcatgagaggagaagaaatattgtcaggagctcaaagaatacatgatcctcaactgctaacagagagagctttacatcatggaattgatttggagaaaattaaggcttacattgattccttccgctttggagcccctcctcatgctggtggaggcattggattggaacgagttactatgctgtttctgggattgcataatgttcgtcagacctccatgttccctcgtgatcccaaacgactcactccttaaattcacactttgccacttaactccagtgtggatgacagagcgagaccctgcctcaaaaaaaaaaaaaaaaaaaaaaaaaaaaaaaaaaaaaaaaaaaaaaaaaaaaaaaaaaaaaaaagaaagccacacttattcttttcagtaacctgctagtgcacaggctgtactttaggtacttaaaatatgcactagaataaatttgcaaggccctaaaatatcactgttatttttggagtaattcagtataggttcgtttaaaagagatttttataacttcagacatgcatcagtaggaaataacttgagaaattcatatggttatgttacaaattcatattctgttactacagtaaacgttaagagttttaaacagttaagattgtacaatttttcttcttttctatattacaagggccccagtgttaatgtcttagattttcagtatttgaacttatttttttaaattctgtcattgagataagaataattcaggtagcatctgaaattttaatgaatgtataattggcatatcatggaaaattaaccagaaagtatcagttcttaaaagttatgcctagaaattatgtaaagctaaactactggttagaaagtattcagtgtaatattgtattaatttgttaaattctaaacttgaatttcaataaaattttaaagctaa

SEQ ID NO: 278495 - DNA, 541 bp, Homo sapiens
  misc_feature (33)..(33): n is a, c, g, or t
gcggcccctactactactaaattcgcggccgtncgaccttaaaatatgcactagaataaatttgcaaggccctaaaatatcactgttatttttggagtaattcagtataggttcgtttaaaagagatttttataacttcagacatgcatcagtaggaaataacttgagaaattcatatggttatgttacaaattcatattctgttactacagtaaacgttaagagttttaaacagttaagattgtacaatttttcttcttttctatattacaagggccccagtgttaatgtcttagattttcagtatttgaacttatttttttaaattctgtcattgagataagaataattcaggtagcatctgaaattttaatgaatgtataattggcatatcatggaaaattaaccagaaagtatcagttcttaaaagttatgcctagaaattatgtaaagctaaactactggttagaaagtattcagtgtaatattgtattaatttgttaaattctaaacttgaatttcaataaaattttaaagctaa

SEQ ID NO: 278496 - DNA, 811 bp, Homo sapiens
ccgggatctcgagatagccgcagctctcgcgatctttctggagccgcacctccacgcggagtccgagcgcgtgtgctgagaccccagggtcgggagggcggagactgggagggagggagaagcccctttggcctgccttacggaagcctgcgagggagggtggtgtccactgcccagttccgtgtcccgatgcccagcgccagcgccagccgcaagagtcaggagaagccgcgggagatcatggacgcggcggaagattatgctaaagagagatatggaatatcttcaatgatacaatcacaagaaaaaccagatcgagttttggttcgggttagagacttgacaatacaaaaagctgatgaagttgtttgggtacgtgcaagagttcatacaagcagagctaaagggaaacagtgcttcttagtcctacgtcagcagcagtttaatgtccaggctcttgtggcggtgggagaccatgcaagcaagcagatggttaaatttgctgccaacatcaacaaagagagcattgtggatgtagaaggtgttgtgagaaaagtgaatcagaaaattggaagctgtacacagcaagacgttgagttacatgttcagaaggtaagttttttcaaaatataaaatcgcatatagaaatagatttgggttctaatagttttcatgtcaaatttatatgttcttactaattaatgtaaaatactgaggtttataaattagttactgaatcaattagcttttgttatataacaaatcaccccagtacttagtgacttgaaacaacaaacatttatttgcttac

SEQ ID NO: 278497 - DNA, 444 bp, Homo sapiens
ttttgttgtcgttgccactgtatttacacctcacttacacagggactggtaacccatgctgccttggcaagccaactgcactcctctgtcccaacaagcagggcaatggattgcgaagaggcctcctccgtccccaagcagctacgtcgcccaggggaagagagaaggcgggaaagtccaagagaggagaaaccaaggcccgcgcttaggtgggtgttgtagtgacgagtctgcggttacagccgagcggagttgaaagggggaagcctgcgagggagggtggtgtccactgcccagttccgtgtcccgatgcccagcgccagcgccagccgcaagagtcaggagaagccgcgggagatcatggacgcggcggaagtgggtttcctcctttcctgggcctgggaggacagacccctgggccgggctgcgccgagggagggagga

SEQ ID NO: 278498 - DNA, 636 bp, Homo sapiens
tgcatttattctttttatagtatgatacagatttttatattcttgataaatatccattggctgtaagacctttctataccatgcctgacccaagaaatcccgtaagtaatttggttttaagtaacccattttgaggcagaagggaaattttattgtcactgtcagattgtataataggaataatggttttcattaataatttgcagttttgatagacatacgtattaccattgatgtctgtcaccactggtcaaaatgatattgtaaaatttgaatattctagaaaattagttttaaaaacctatgttaaaatcattttacttggtcatttttctgaagatttatgagagagaaagactatgtaaattataaatagtactactagatttgcatactttagtaaatcatcctgtcattgaccttaaactgggaattcacattgtatcctgggagttaataatctaaataatgtcttacggtcttttaccgtttttccattgcagtggtttctaaactttaccatgcatcagaatcacctggagggctttttaaaacaccagttgctgaggcagaatttctcattagttgctgtggaatgggagcctgataatttgcaggccccactccagaccaagt

SEQ ID NO: 278499 - DNA, 270 bp, Homo sapiens
  misc_feature (231)..(231): n is a, c, g, or t
tccttgtaatccaagcagtcggcagatggttaaatttgctgccaacatcaacaaagagagcattgtggatgtagaaggtgttgtgagaaaagtgaatcagaaaattggaagctgtacacagcaagacgttgagttacatgttcagaagatttatgtgatcagtttggctgaaccccgtctgcccctgcagctggatgatgctgttcggcctgaggcagaaggagaagaggnaggaagagcgactgcttggattacaaggagggtaccgag

SEQ ID NO: 278500 - DNA, 220 bp, Homo sapiens
atcccgggggggggcccgggggggaaaaaaaaaaaaaaaaaaaaagaaagccacacttattcttttcagtaacctgctagtgcacaggctgtactttaggtacttaaaatatgcactagaataaatttgcaaggccctaaaatatcactgttatttttggagtaattcagtataggttcgtttaaaagagatttttagggagagaaagggggagcctcta

SEQ ID NO: 278501 - DNA, 2331 bp, Homo sapiens
ccgggatctcgagatagccgcagctctcgcgatctttctggagccgcacctccacgcggagtccgagcgcgtgtgctgagaccccagggtcgggagggcggagactgggagggagggagaagcccctttggcctgccttacggaagcctgcgagggagggtggtgtccactgcccagttccgtgtcccgatgcccagcgccagcgccagccgcaagagtcaggagaagccgcgggagatcatggacgcggcggaagattatgctaaagagagatatggaatatcttcaatgatacaatcacaagaaaaaccagatcgagttttggttcgggttagagacttgacaatacaaaaagctgatgaagttgtttgggtacgtgcaagagttcatacaagcagagctaaagggaaacagtgcttcttagtcctacgtcagcagcagtttaatgtccaggctcttgtggcggtgggagaccatgcaagcaagcagatggttaaatttgctgccaacatcaacaaagagagcattgtggatgtagaaggtgttgtgagaaaagtgaatcagaaaattggaagctgtacacagcaagacgttgagttacatgttcagaagatttatgtgatcagtttggctgaaccccgtctgcccctgcagctggatgatgctgttcggcctgaggcagaaggagaagaggaaggaagagctactgttaaccaggatacaagattagacaacagagtcattgatcttaggacatcaactagtcaggcagtcttccgtctccagtctggcatctgccatctcttccgagaaactttaattaacaaaggttttgtggaaatccaaactcctaaaattatttcagctgccagtgaaggaggagccaatgtttttactgtgtcatattttaaaaataatgcatacctggctcagtccccacagctatataagcaaatgtgcatttgtgctgattttgagaaggttttctctattggaccagtattcagagcggaagactctaatacccatagacatctaactgagtttgttggtttggacattgaaatggcttttaattaccattaccacgaagttatggaagaaattgctgacaccatggtacaaatattcaaaggacttcaagaaaggtttcagactgaaattcaaacagtgaataaacagttcccatgtgagccattcaaatttttggagccaactctaagactagaatattgtgaagcattggctatgcttagggaagctggagtcgaaatgggagatgaagacgatctgagcacaccaaatgaaaagctgttgggtcatttggtaaaggaaaagtatgatacagatttttatattcttgataaatatccattggctgtaagacctttctataccatgcctgacccaagaaatcccaaacagtccaactcttacgatatgttcatgagaggagaagaaatattgtcaggagctcaaagaatacatgatcctcaactgctaacagagagagctttacatcatggaattgatttggagaaaattaaggcttacattgattccttccgctttggagcccctcctcatgctggtggaggcattggattggaacgagttactatgctgtttctgggattgcataatgttcgtcagacctccatgttccctcgtgatcccaaacgactcactccttaaattcacactttgccacttaactccagtgtggatgacagagcgagaccctgcctcaaaaaaaaaaaaaaaaaaaaagaaagccacacttattcttttcagtaacctgctagtgcacaggctgtactttaggtacttaaaatatgcactagaataaatttgcaaggccctaaaatatcactgttatttttggagtaattcagtataggttcgtttaaaagagatttttataacttcagacatgcatcagtaggaaataacttgagaaattcatatggttatgttacaaattcatattctgttactacagtaaacgttaagagttttaaacagttaagattgtacaatttttcttcttttctatattacaagggccccagtgttaatgtcttagattttcagtatttgaacttatttttttaaattctgtcattgagataagaataattcaggtagcatctgaaattttaatgaatgtataattggcatatcatggaaaattaaccagaaagtatcagttcttaaaagttatgcctagaaattatgtaaagctaaactactggttagaaagtattcagtgtaatattgtattaatttgttaaattctaaacttgaatttcaataaaattttaaagctaa

SEQ ID NO: 278502 - DNA, 2277 bp, Homo sapiens
ccgggatctcgagatagccgcagctctcgcgatctttctggagccgcacctccacgcggagtccgagcgcgtgtgctgagaccccagggtcgggagggcggagactgggagggagggagaagcccctttggcctgccttacggaagcctgcgagggagggtggtgtccactgcccagttccgtgtcccgatgcccagcgccagcgccagccgcaagagtcaggagaagccgcgggagatcatggacgcggcggaagattatgctaaagagagatatggaatatcttcaatgatacaatcacaagaaaaaccagatcgagttttggttcgggttagagacttgacaatacaaaaagctgatgaagttgtttgggtacgtgcaagagttcatacaagcagagctaaagggaaacagtgcttcttagtcctacgtcagcagcagtttaatgtccaggctcttgtggcggtgggagaccatgcaagcaagcagatggttaaatttgctgccaacatcaacaaagagagcattgtggatgtagaaggtgttgtgagaaaagtgaatcagaaaattggaagctgtacacagcaagacgttgagttacatgttcagaagatttatgtgatcagtttggctgaaccccgtctgcccctgcagctggatgatgctgttcggcctgaggcagaaggagaagaggaaggaagagctactgttaaccaggatacaagattagacaacagagtcattgatcttaggacatcaactagtcaggcagtcttccgtctccagtctggcatctgccatctcttccgagaaactttaattaacaaaggttttgtggaaatccaaactcctaaaattatttcagctgccagtgaaggaggagccaatgtttttactgtgtcatattttaaaaataatgcatacctggctcagtccccacagctatataagcaaatgtgcatttgtgctgattttgagaaggttttctctattggaccagtattcagagcggaagactctaatacccatagacatctaactgagtttgttggtttggacattgaaatggcttttaattaccattaccacgaagttatggaagaaattgctgacaccatggtacaaatattcaaaggacttcaagaaaggtttcagactgaaattcaaacagtgaataaacagttcccatgtgagccattcaaatttttggagccaactctaagactagaatattgtgaagcattggctatgcttagggaagctggagtcgaaatgggagatgaagacgatctgagcacaccaaatgaaaagctgttgggtcatttggtaaaggaaaagtatgatacagatttttatattcttgataaatatccattggctgtaagacctttctataccatgcctgacccaagaaatcccaaacagtccaactcttacgatatgttcatgagaggagaagaaatattgtcaggagctcaaagaatacatgatcctcaactgctaacagagagagctttacatcatggaattgatttggagaaaattaaggcttacattgattccttccgctttggagcccctcctcatgctggtggaggcattggattggaacgagttactatgctgtttctgggattgcataatgttcgtcagacctccatgttccctcgtgatcccaaacgactcactccttaaattcacactttgccacttaactccagtgtggatgacagagcgagaccctgcctcaaaaaaaaaaaaaaaaaaaaagaaagccacacttattcttttcagtaacctgctagtgcacaggctgtactttaggtacttaaaatatgcactagaataaatttgcaaggccctaaaatatcactgttatttttggagtaattcagtataggttcgtttaaaagagatttttataacttcagacatgcatcagtaggaaataacttgagaaattcatatggttatgttacaaattcatattctgttactacagtaaacgttaagagttttaaacagttaagattgtacaatttttcttcttttctatattacaagggccccagtgttaatgtcttagattttcagtatttgaacttatttttttaaattctgtcattgagataagaataattcaggtagcatctgaaattttaatgaatgtataattggcatatcatggaaaattaaccagaaagtatcagttcttatgtaatattgtattaatttgttaaattctaaacttgaatttcaataaaattttaaagctaa

SEQ ID NO: 278503 - DNA, 2277 bp, Homo sapiens
ccgggatctcgagatagccgcagctctcgcgatctttctggagccgcacctccacgcggagtccgagcgcgtgtgctgagaccccagggtcgggagggcggagactgggagggagggagaagcccctttggcctgccttacggaagcctgcgagggagggtggtgtccactgcccagttccgtgtcccgatgcccagcgccagcgccagccgcaagagtcaggagaagccgcgggagatcatggacgcggcggaagattatgctaaagagagatatggaatatcttcaatgatacaatcacaagaaaaaccagatcgagttttggttcgggttagagacttgacaatacaaaaagctgatgaagttgtttgggtacgtgcaagagttcatacaagcagagctaaagggaaacagtgcttcttagtcctacgtcagcagcagtttaatgtccaggctcttgtggcggtgggagaccatgcaagcaagcagatggttaaatttgctgccaacatcaacaaagagagcattgtggatgtagaaggtgttgtgagaaaagtgaatcagaaaattggaagctgtacacagcaagacgttgagttacatgttcagaagatttatgtgatcagtttggctgaaccccgtctgcccctgcagctggatgatgctgttcggcctgaggcagaaggagaagaggaaggaagagctactgttaaccaggatacaagattagacaacagagtcattgatcttaggacatcaactagtcaggcagtcttccgtctccagtctggcatctgccatctcttccgagaaactttaattaacaaaggttttgtggaaatccaaactcctaaaattatttcagctgccagtgaaggaggagccaatgtttttactgtgtcatattttaaaaataatgcatacctggctcagtccccacagctatataagcaaatgtgcatttgtgctgattttgagaaggttttctctattggaccagtattcagagcggaagactctaatacccatagacatctaactgagtttgttggtttggacattgaaatggcttttaattaccattaccacgaagttatggaagaaattgctgacaccatggtacaaatattcaaaggacttcaagaaaggtttcagactgaaattcaaacagtgaataaacagttcccatgtgagccattcaaatttttggagccaactctaagactagaatattgtgaagcattggctatgcttagggaagctggagtcgaaatgggagatgaagacgatctgagcacaccaaatgaaaagctgttgggtcatttggtaaaggaaaagtatgatacagatttttatattcttgataaatatccattggctgtaagacctttctataccatgcctgacccaagaaatcccaaacagtccaactcttacgatatgttcatgagaggagaagaaatattgtcaggagctcaaagaatacatgatcctcaactgctaacagagagagctttacatcatggaattgatttggagaaaattaaggcttacattgattccttccgctttggagcccctcctcatgctggtggaggcattggattggaacgagttactatgctgtttctgggattgcataatgttcgtcagacctccatgttccctcgtgatcccaaacgactcactccttaaattcacactttgccacttaactccagtgtggatgacagagcgagaccctgcctcaaaaaaaaaaaaaaaaaaaaagaaagccacacttattcttttcagtaacctgctagtgcacaggctgtactttaggtacttaaaatatgcactagaataaatttgcaaggccctaaaatatcactgttatttttggagtaattcagtataggttcgttttcatatggttatgttacaaattcatattctgttactacagtaaacgttaagagttttaaacagttaagattgtacaatttttcttcttttctatattacaagggccccagtgttaatgtcttagattttcagtatttgaacttatttttttaaattctgtcattgagataagaataattcaggtagcatctgaaattttaatgaatgtataattggcatatcatggaaaattaaccagaaagtatcagttcttaaaagttatgcctagaaattatgtaaagctaaactactggttagaaagtattcagtgtaatattgtattaatttgttaaattctaaacttgaatttcaataaaattttaaagctaa

SEQ ID NO: 278504 - DNA, 1945 bp, Homo sapiens
ccgggatctcgagatagccgcagctctcgcgatctttctggagccgcacctccacgcggagtccgagcgcgtgtgctgagaccccagggtcgggagggcggagactgggagggagggagaagcccctttggcctgccttacggaagcctgcgagggagggtggtgtccactgcccagttccgtgtcccgatgcccagcgccagcgccagccgcaagagtcaggagaagccgcgggagatcatggacgcggcggaagattatgctaaagagagatatggaatatcttcaatgatacaatcacaagaaaaaccagatcgagttttggttcgggttagagacttgacaatacaaaaagctgatgaagttgtttgggtacgtgcaagagttcatacaagcagagctaaagggaaacagtgcttcttagtcctacgtcagcagcagtttaatgtccaggctcttgtggcggtgggagaccatgcaagcaagcagatggttaaatttgctgccaacatcaacaaagagagcattgtggatgtagaaggtgttgtgagaaaagtgaatcagaaaattggaagctgtacacagcaagacgttgagttacatgttcagaagatttatgtgatcagtttggctgaaccccgtctgcccctgcagctggatgatgctgttcggcctgaggcagaaggagaagaggaaggaagagctactgttaaccaggatacaagattagacaacagagtcattgatcttaggacatcaactagtcaggcagtcttccgtctccagtctggcatctgccatctcttccgagaaactttaattaacaaaggttttgtggaaatccaaactcctaaaattatttcagctgccagtgaaggaggagccaatgtttttactgtgtcatattttaaaaataatgcatacctggctcagtccccacagctatataagcaaatgtgcatttgtgctgattttgagaaggttttctctattggaccagtattcagagcggaagactctaatacccatagacatctaactgagtttgttggtttggacattgaaatggcttttaattaccattaccacgaagttatggaagaaattgctgacaccatggtacaaatattcaaaggacttcaagaaaggtttcagactgaaattcaaacagtgaataaacagttcccatgtgagccattcaaatttttggagccaactctaagactagaatattgtgaagcattggctatgcttagggaagctggagtcgaaatgggagatgaagacgatctgagcacaccaaatgaaaagctgttgggtcatttggtaaaggaaaagtatgatacagatttttatattcttgataaatatccattggctgtaagacctttctataccatgcctgacccaagaaatcccaaacagtccaactcttacgatatgttcatgagaggagaagaaatattgtcaggagctcaaagaatacatgatcctcaactgctaacagagagagctttacatcatggaattgatttggagaaaattaaggcttacattgattccttccgctttggagcccctcctcatgctggtggaggcattggattggaacgagttactatgctgtttctgggattgcataatgttcgtcagacctccatgttccctcgtgatcccaaacgactcactccttaaattcacactttgccacttaactccagtgtggatgacagagcgagaccctgcctcaaaaaaaaaaaaaaaaaaaaagaaagccacacttattcttttcagtaacctgctagtgcacaggctgtactttaggtacttaaaatatgcactagaataaatttgcaaggccctaaaatatcactgttatttttggagtaattcagtataggttcgtttaaaagagatttttagggagagaaagggggagcctcta

SEQ ID NO: 278505 - DNA, 2285 bp, Homo sapiens
ttttgttgtcgttgccactgtatttacacctcacttacacagggactggtaacccatgctgccttggcaagccaactgcactcctctgtcccaacaagcagggcaatggattgcgaagaggcctcctccgtccccaagcagctacgtcgcccaggggaagagagaaggcgggaaagtccaagagaggagaaaccaaggcccgcgcttaggattatgctaaagagagatatggaatatcttcaatgatacaatcacaagaaaaaccagatcgagttttggttcgggttagagacttgacaatacaaaaagctgatgaagttgtttgggtacgtgcaagagttcatacaagcagagctaaagggaaacagtgcttcttagtcctacgtcagcagcagtttaatgtccaggctcttgtggcggtgggagaccatgcaagcaagcagatggttaaatttgctgccaacatcaacaaagagagcattgtggatgtagaaggtgttgtgagaaaagtgaatcagaaaattggaagctgtacacagcaagacgttgagttacatgttcagaagatttatgtgatcagtttggctgaaccccgtctgcccctgcagctggatgatgctgttcggcctgaggcagaaggagaagaggaaggaagagctactgttaaccaggatacaagattagacaacagagtcattgatcttaggacatcaactagtcaggcagtcttccgtctccagtctggcatctgccatctcttccgagaaactttaattaacaaaggttttgtggaaatccaaactcctaaaattatttcagctgccagtgaaggaggagccaatgtttttactgtgtcatattttaaaaataatgcatacctggctcagtccccacagctatataagcaaatgtgcatttgtgctgattttgagaaggttttctctattggaccagtattcagagcggaagactctaatacccatagacatctaactgagtttgttggtttggacattgaaatggcttttaattaccattaccacgaagttatggaagaaattgctgacaccatggtacaaatattcaaaggacttcaagaaaggtttcagactgaaattcaaacagtgaataaacagttcccatgtgagccattcaaatttttggagccaactctaagactagaatattgtgaagcattggctatgcttagggaagctggagtcgaaatgggagatgaagacgatctgagcacaccaaatgaaaagctgttgggtcatttggtaaaggaaaagtatgatacagatttttatattcttgataaatatccattggctgtaagacctttctataccatgcctgacccaagaaatcccaaacagtccaactcttacgatatgttcatgagaggagaagaaatattgtcaggagctcaaagaatacatgatcctcaactgctaacagagagagctttacatcatggaattgatttggagaaaattaaggcttacattgattccttccgctttggagcccctcctcatgctggtggaggcattggattggaacgagttactatgctgtttctgggattgcataatgttcgtcagacctccatgttccctcgtgatcccaaacgactcactccttaaattcacactttgccacttaactccagtgtggatgacagagcgagaccctgcctcaaaaaaaaaaaaaaaaaaaaagaaagccacacttattcttttcagtaacctgctagtgcacaggctgtactttaggtacttaaaatatgcactagaataaatttgcaaggccctaaaatatcactgttatttttggagtaattcagtataggttcgtttaaaagagatttttataacttcagacatgcatcagtaggaaataacttgagaaattcatatggttatgttacaaattcatattctgttactacagtaaacgttaagagttttaaacagttaagattgtacaatttttcttcttttctatattacaagggccccagtgttaatgtcttagattttcagtatttgaacttatttttttaaattctgtcattgagataagaataattcaggtagcatctgaaattttaatgaatgtataattggcatatcatggaaaattaaccagaaagtatcagttcttaaaagttatgcctagaaattatgtaaagctaaactactggttagaaagtattcagtgtaatattgtattaatttgttaaattctaaacttgaatttcaataaaattttaaagctaa

SEQ ID NO: 278506 - DNA, 2358 bp, Homo sapiens
ttttgttgtcgttgccactgtatttacacctcacttacacagggactggtaacccatgctgccttggcaagccaactgcactcctctgtcccaacaagcagggcaatggattgcgaagaggcctcctccgtccccaagcagctacgtcgcccaggggaagagagaaggcgggaaagtccaagagaggagaaaccaaggcccgcgcttaggtgggtgttgtagtgacgagtctgcggttacagccgagcggagttgaaagggggaagcctgcgagggagggtggtgtccactgcccagttccgtgtcccgatgcccagcgccagcgccagccgcaagagtcaggagaagccgcgggagatcatggacgcggcggaagattatgctaaagagagatatggaatatcttcaatgatacaatcacaagaaaaaccagggaaacagtgcttcttagtcctacgtcagcagcagtttaatgtccaggctcttgtggcggtgggagaccatgcaagcaagcagatggttaaatttgctgccaacatcaacaaagagagcattgtggatgtagaaggtgttgtgagaaaagtgaatcagaaaattggaagctgtacacagcaagacgttgagttacatgttcagaagatttatgtgatcagtttggctgaaccccgtctgcccctgcagctggatgatgctgttcggcctgaggcagaaggagaagaggaaggaagagctactgttaaccaggatacaagattagacaacagagtcattgatcttaggacatcaactagtcaggcagtcttccgtctccagtctggcatctgccatctcttccgagaaactttaattaacaaaggttttgtggaaatccaaactcctaaaattatttcagctgccagtgaaggaggagccaatgtttttactgtgtcatattttaaaaataatgcatacctggctcagtccccacagctatataagcaaatgtgcatttgtgctgattttgagaaggttttctctattggaccagtattcagagcggaagactctaatacccatagacatctaactgagtttgttggtttggacattgaaatggcttttaattaccattaccacgaagttatggaagaaattgctgacaccatggtacaaatattcaaaggacttcaagaaaggtttcagactgaaattcaaacagtgaataaacagttcccatgtgagccattcaaatttttggagccaactctaagactagaatattgtgaagcattggctatgcttagggaagctggagtcgaaatgggagatgaagacgatctgagcacaccaaatgaaaagctgttgggtcatttggtaaaggaaaagtatgatacagatttttatattcttgataaatatccattggctgtaagacctttctataccatgcctgacccaagaaatcccaaacagtccaactcttacgatatgttcatgagaggagaagaaatattgtcaggagctcaaagaatacatgatcctcaactgctaacagagagagctttacatcatggaattgatttggagaaaattaaggcttacattgattccttccgctttggagcccctcctcatgctggtggaggcattggattggaacgagttactatgctgtttctgggattgcataatgttcgtcagacctccatgttccctcgtgatcccaaacgactcactccttaaattcacactttgccacttaactccagtgtggatgacagagcgagaccctgcctcaaaaaaaaaaaaaaaaaaaaagaaagccacacttattcttttcagtaacctgctagtgcacaggctgtactttaggtacttaaaatatgcactagaataaatttgcaaggccctaaaatatcactgttatttttggagtaattcagtataggttcgtttaaaagagatttttataacttcagacatgcatcagtaggaaataacttgagaaattcatatggttatgttacaaattcatattctgttactacagtaaacgttaagagttttaaacagttaagattgtacaatttttcttcttttctatattacaagggccccagtgttaatgtcttagattttcagtatttgaacttatttttttaaattctgtcattgagataagaataattcaggtagcatctgaaattttaatgaatgtataattggcatatcatggaaaattaaccagaaagtatcagttcttaaaagttatgcctagaaattatgtaaagctaaactactggttagaaagtattcagtgtaatattgtattaatttgttaaattctaaacttgaatttcaataaaattttaaagctaa

SEQ ID NO: 278507 - DNA, 2101 bp, Homo sapiens
aaaacagatcgagtttggtttttcttgtgattgtatcattgaagatattccatatctctctttacataatcacaagaaaaaccatcgagttttggttcgggttagagacttgacaatacaaaaagctgatgaagttgtttgggtacgtgcaagagttcatacaagcagagctaaagggaaacagtgcttcttagtcctacgtcagcagcagtttaatgtccaggctcttgtggcggtgggagaccatgcaagcaagcagatggttaaatttgctgccaacatcaacaaagagagcattgtggatgtagaaggtgttgtgagaaaagtgaatcagaaaattggaagctgtacacagcaagacgttgagttacatgttcagaagatttatgtgatcagtttggctgaaccccgtctgcccctgcagctggatgatgctgttcggcctgaggcagaaggagaagaggaaggaagagctactgttaaccaggatacaagattagacaacagagtcattgatcttaggacatcaactagtcaggcagtcttccgtctccagtctggcatctgccatctcttccgagaaactttaattaacaaaggttttgtggaaatccaaactcctaaaattatttcagctgccagtgaaggaggagccaatgtttttactgtgtcatattttaaaaataatgcatacctggctcagtccccacagctatataagcaaatgtgcatttgtgctgattttgagaaggttttctctattggaccagtattcagagcggaagactctaatacccatagacatctaactgagtttgttggtttggacattgaaatggcttttaattaccattaccacgaagttatggaagaaattgctgacaccatggtacaaatattcaaaggacttcaagaaaggtttcagactgaaattcaaacagtgaataaacagttcccatgtgagccattcaaatttttggagccaactctaagactagaatattgtgaagcattggctatgcttagggaagctggagtcgaaatgggagatgaagacgatctgagcacaccaaatgaaaagctgttgggtcatttggtaaaggaaaagtatgatacagatttttatattcttgataaatatccattggctgtaagacctttctataccatgcctgacccaagaaatcccaaacagtccaactcttacgatatgttcatgagaggagaagaaatattgtcaggagctcaaagaatacatgatcctcaactgctaacagagagagctttacatcatggaattgatttggagaaaattaaggcttacattgattccttccgctttggagcccctcctcatgctggtggaggcattggattggaacgagttactatgctgtttctgggattgcataatgttcgtcagacctccatgttccctcgtgatcccaaacgactcactccttaaattcacactttgccacttaactccagtgtggatgacagagcgagaccctgcctcaaaaaaaaaaaaaaaaaaaaagaaagccacacttattcttttcagtaacctgctagtgcacaggctgtactttaggtacttaaaatatgcactagaataaatttgcaaggccctaaaatatcactgttatttttggagtaattcagtataggttcgtttaaaagagatttttataacttcagacatgcatcagtaggaaataacttgagaaattcatatggttatgttacaaattcatattctgttactacagtaaacgttaagagttttaaacagttaagattgtacaatttttcttcttttctatattacaagggccccagtgttaatgtcttagattttcagtatttgaacttatttttttaaattctgtcattgagataagaataattcaggtagcatctgaaattttaatgaatgtataattggcatatcatggaaaattaaccagaaagtatcagttcttaaaagttatgcctagaaattatgtaaagctaaactactggttagaaagtattcagtgtaatattgtattaatttgttaaattctaaacttgaatttcaataaaattttaaagctaa

SEQ ID NO: 278508 - DNA, 2073 bp, Homo sapiens
taatttcttaatctaattgaacaaatacacaagtatctgcaattgtattgttgtaatggttaaaataaaaatacatggtttttattcatttattgtcaaataccaaaatcttacttagaacattagtatgctgcacaaacattgctatgtctcactttatgggttggttgcctttaaaaaaaacagaccattcacaagtaagttgtttcactaattgttaagaaacatttttcttttatggaattcctacaaattaaaacatctgctcactaaggatttccggtgaaattcctttatatgatcatatatagtcattgtattccagcatgcctttttgccttgtatttattcgtgtcctttcgtcttctctccaattattagaatttaaaaatgttgaaagcaagaattgttaggtttccacagtgcctagcccacagagttagtgcttagtaattaagtacgttgatttaattagattttattactgtcttctagacatcaactagtcaggcagtcttccgtctccagtctggcatctgccatctcttccgagaaactttaattaacaaaggttttgtggaaatccaaactcctaaaattatttcagctgccagtgaaggaggagccaatgtttttactgtgtcatattttaaaaataatgcatacctggctcagtccccacagctatataagcaaatgtgcatttgtgctgattttgagaaggttttctctattggaccagtattcagagcggaagactctaatacccatagacatctaactgagtttgttggtttggacattgaaatggcttttaattaccattaccacgaagttatggaagaaattgctgacaccatggtacaaatattcaaaggacttcaagaaaggtttcagactgaaattcaaacagtgaataaacagttcccatgtgagccattcaaatttttggagccaactctaagactagaatattgtgaagcattggctatgcttagggaagctggagtcgaaatgggagatgaagacgatctgagcacaccaaatgaaaagctgttgggtcatttggtaaaggaaaagtatgatacagatttttatattcttgataaatatccattggctgtaagacctttctataccatgcctgacccaagaaatcccaaacagtccaactcttacgatatgttcatgagaggagaagaaatattgtcaggagctcaaagaatacatgatcctcaactgctaacagagagagctttacatcatggaattgatttggagaaaattaaggcttacattgattccttccgctttggagcccctcctcatgctggtggaggcattggattggaacgagttactatgctgtttctgggattgcataatgttcgtcagacctccatgttccctcgtgatcccaaacgactcactccttaaattcacactttgccacttaactccagtgtggatgacagagcgagaccctgcctcaaaaaaaaaaaaaaaaaaaaagaaagccacacttattcttttcagtaacctgctagtgcacaggctgtactttaggtacttaaaatatgcactagaataaatttgcaaggccctaaaatatcactgttatttttggagtaattcagtataggttcgtttaaaagagatttttataacttcagacatgcatcagtaggaaataacttgagaaattcatatggttatgttacaaattcatattctgttactacagtaaacgttaagagttttaaacagttaagattgtacaatttttcttcttttctatattacaagggccccagtgttaatgtcttagattttcagtatttgaacttatttttttaaattctgtcattgagataagaataattcaggtagcatctgaaattttaatgaatgtataattggcatatcatggaaaattaaccagaaagtatcagttcttaaaagttatgcctagaaattatgtaaagctaaactactggttagaaagtattcagtgtaatattgtattaatttgttaaattctaaacttgaatttcaataaaattttaaagctaa

SEQ ID NO: 278509 - DNA, 1657 bp, Homo sapiens
  misc_feature (1550)..(1550): n is a, c, g, or t
  misc_feature (1638)..(1638): n is a, c, g, or t
  misc_feature (1641)..(1641): n is a, c, g, or t
ccgggatctcgagatagccgcagctctcgcgatctttctggagccgcacctccacgcggagtccgagcgcgtgtgctgagaccccagggtcgggagggcggagactgggagggagggagaagcccctttggcctgccttacggaagcctgcgagggagggtggtgtccactgcccagttccgtgtcccgatgcccagcgccagcgccagccgcaagagtcaggagaagccgcgggagatcatggacgcggcggaagattatgctaaagagagatatggaatatcttcaatgatacaatcacaagaaaaaccagatcgagttttggttcgggttagagacttgacaatacaaaaagctgatgaagttgtttgggtacgtgcaagagttcatacaagcagagctaaagggaaacagtgcttcttagtcctacgtcagcagcagtttaatgtccaggctcttgtggcggtgggagaccatgcaagcaagcagatggttaaatttgctgccaacatcaacaaagagagcattgtggatgtagaaggtgttgtgagaaaagtgaatcagaaaattggaagctgtacacagcaagacgttgagttacatgttcagaagatttatgtgatcagtttggctgaaccccgtctgcccctgcagctggatgatgctgttcggcctgaggcagaaggagaagaggaaggaagagctactgttaaccaggatacaagattagacaacagagtcattgatcttaggacatcaactagtcaggcagtcttccgtctccagtctggcatctgccatctcttccgagaaactttaattaacaaaggttttgtggaaatccaaactcctaaaattatttcagctgccagtgaaggaggagccaatgtttttactgtgtcatattttaaaaataatgcatacctggctcagtccccacagctatataagcaaatgtgcatttgtgctgattttgagaaggttttctctattggaccagtattcagagcggaagactctaatacccatagacatctaactgagtttgttggtttggacattgaaatggcttttaattaccattaccacgaagttatggaagaaattgctgacaccatggtacaaatattcaaaggacttcaagaaaggtttcagactgaaattcaaacagtgaataaacagttcccatgtgagccattcaaatttttggagccaactctaagactagaatattgtgaagcattggctatgcttagggaagctggagtcgaaatgggagatgaagacgatctgagcacaccaaatgaaaagctgttgggtcatttggtaaaggaaaagtatgatacagatttttatattcttgataaatatccattggctgtaagacctttctataccatgcctgacccaagaaatcccaaacagtccaactcttacgatatgttcatgagaggagaagaaatattgtcaggagctcaaagaatacatgatcctcaactgctaacagagagagctttacatcatggaattgatttgggaaaaaaattaanggcttaacatttgattccttcccgcctttgggaagccccctccctccattgcctgggttgggaaggcatttgggaatttgggaaaccnaantttacctaatgcctgt

SEQ ID NO: 278510 - DNA, 1204 bp, Homo sapiens
ccgggatctcgagatagccgcagctctcgcgatctttctggagccgcacctccacgcggagtccgagcgcgtgtgctgagaccccagggtcgggagggcggagactgggagggagggagaagcccctttggcctgccttacggaagcctgcgagggagggtggtgtccactgcccagttccgtgtcccgatgcccagcgccagcgccagccgcaagagtcaggagaagccgcgggagatcatggacgcggcggaagattatgctaaagagagatatggaatatcttcaatgatacaatcacaagaaaaaccagatcgagttttggttcgggttagagacttgacaatacaaaaagctgatgaagttgtttgggtacgtgcaagagttcatacaagcagagctaaagggaaacagtgcttcttagtcctacgtcagcagcagtttaatgtccaggctcttgtggcggtgggagaccatgcaagcaagcagatggttaaatttgctgccaacatcaacaaagagagcattgtggatgtagaaggtgttgtgagaaaagtgaatcagaaaattggaagctgtacacagcaagacgttgagttacatgttcagaagatttatgtgatcagtttggctgaaccccgtctgcccctgcagctggatgatgctgttcggcctgaggcagaaggagaagaggaaggaagagctactgttaaccaggatacaagattagacaacagagtcattgatcttaggacatcaactagtcaggcagtcttccgtctccagtctggcatctgccatctcttccgagaaactttaattaacaaaggttttgtggaaatccaaactcctaaaattatttcagctgccagtgaaggaggagccaatgtttttactgtgtcatattttaaaaataatgcatacctggctcagtccccacagctatataagcaaatgtgcatttgtgctgattttgagaaggttttctctattggaccagtattcagagcggaagactctaatacccatagacatctaactgagtttgttggtttggacattgaaatggcttttaattaccattaccacgaagttatggaagaaattgctgacaccatggtacaaatattcaaaggacttcaagaaaggtaaaaagtattttatgcacctagatggacttaatttcaaatgtttgggcccttta

SEQ ID NO: 278511 - DNA, 1115 bp, Homo sapiens
gggaggagagcacagaatctgatataaacaaagaaaaagttattcagccctcagtagtttaattctactttagagaacaagattgcattgttaattgtaggaaaaaatgaacttgctcttcatgcagcagagatttttttccgtatatatgtaatagaaataggatggtagtcacttgaggactggtgttttttctcttgcagaaacagtccaactcttacgatatgttcatgagaggagaagaaatattgtcaggagctcaaagaatacatgatcctcaactgctaacagagagagctttacatcatggaattgatttggagaaaattaaggcttacattgattccttccgctttggagcccctcctcatgctggtggaggcattggattggaacgagttactatgctgtttctgggattgcataatgttcgtcagacctccatgttccctcgtgatcccaaacgactcactccttaaattcacactttgccacttaactccagtgtggatgacagagcgagaccctgcctcaaaaaaaaaaaaaaaaaaaaagaaagccacacttattcttttcagtaacctgctagtgcacaggctgtactttaggtacttaaaatatgcactagaataaatttgcaaggccctaaaatatcactgttatttttggagtaattcagtataggttcgtttaaaagagatttttataacttcagacatgcatcagtaggaaataacttgagaaattcatatggttatgttacaaattcatattctgttactacagtaaacgttaagagttttaaacagttaagattgtacaatttttcttcttttctatattacaagggccccagtgttaatgtcttagattttcagtatttgaacttatttttttaaattctgtcattgagataagaataattcaggtagcatctgaaattttaatgaatgtataattggcatatcatggaaaattaaccagaaagtatcagttcttaaaagttatgcctagaaattatgtaaagctaaactactggttagaaagtattcagtgtaatattgtattaatttgttaaattctaaacttgaatttcaataaaattttaaagctaa

SEQ ID NO: 278512 - DNA, 1048 bp, Homo sapiens
tcaagcttataaagtcttttgttttgtttttcttattgttacatcatagattttgttcattcgtatagatttttgtggttcacattttagactccataccactcaaggatatattacttagtccttttcatttatagcagcatctttatttctgaatcaatactcaaaacagttttaaataaacccaaaataataagagtcattttctttcctaacaaggaaaagtatttagtttaacgattacatttatgtttgtagttctaagtaagaccctgagagattttcaaaaaggaattaatgattatttttgtcttccccaggattggaacgagttactatgctgtttctgggattgcataatgttcgtcagacctccatgttccctcgtgatcccaaacgactcactccttaaattcacactttgccacttaactccagtgtggatgacagagcgagaccctgcctcaaaaaaaaaaaaaaaaaaaaagaaagccacacttattcttttcagtaacctgctagtgcacaggctgtactttaggtacttaaaatatgcactagaataaatttgcaaggccctaaaatatcactgttatttttggagtaattcagtataggttcgtttaaaagagatttttataacttcagacatgcatcagtaggaaataacttgagaaattcatatggttatgttacaaattcatattctgttactacagtaaacgttaagagttttaaacagttaagattgtacaatttttcttcttttctatattacaagggccccagtgttaatgtcttagattttcagtatttgaacttatttttttaaattctgtcattgagataagaataattcaggtagcatctgaaattttaatgaatgtataattggcatatcatggaaaattaaccagaaagtatcagttcttaaaagttatgcctagaaattatgtaaagctaaactactggttagaaagtattcagtgtaatattgtattaatttgttaaattctaaacttgaatttcaataaaattttaaagctaa

SEQ ID NO: 278513 - DNA, 651 bp, Homo sapiens
cactccctccctgaattcccccctttgccacttaactccagtgtggatgacagagcgagaccctgcctcaaaaaaaaaaaaaaaaaaaaagaaagccacacttattcttttcagtaacctgctagtgcacaggctgtactttaggtacttaaaatatgcactagaataaatttgcaaggccctaaaatatcactgttatttttggagtaattcagtataggttcgtttaaaagagatttttataacttcagacatgcatcagtaggaaataacttgagaaattcatatggttatgttacaaattcatattctgttactacagtaaacgttaagagttttaaacagttaagattgtacaatttttcttcttttctatattacaagggccccagtgttaatgtcttagattttcagtatttgaacttatttttttaaattctgtcattgagataagaataattcaggtagcatctgaaattttaatgaatgtataattggcatatcatggaaaattaaccagaaagtatcagttcttaaaagttatgcctagaaattatgtaaagctaaactactggttagaaagtattcagtgtaatattgtattaatttgttaaattctaaacttgaatttcaataaaattttaaagctaa

SEQ ID NO: 278514 - DNA, 715 bp, Homo sapiens
tgtttatcgatgcccccccgccaggtgcaccgctctagtgttccgtttcctcttcgtgcctcctgggggtttccctttctttcgctctttgccacttaactccagtgtggatgacagagcgagaccctgcctcaaaaaaaaaaaaaaaaaaaaagaaagccacacttattcttttcagtaacctgctagtgcacaggctgtactttaggtacttaaaatatgcactagaataaatttgcaaggccctaaaatatcactgttatttttggagtaattcagtataggttcgtttaaaagagatttttataacttcagacatgcatcagtaggaaataacttgagaaattcatatggttatgttacaaattcatattctgttactacagtaaacgttaagagttttaaacagttaagattgtacaatttttcttcttttctatattacaagggccccagtgttaatgtcttagattttcagtatttgaacttatttttttaaattctgtcattgagataagaataattcaggtagcatctgaaattttaatgaatgtataattggcatatcatggaaaattaaccagaaagtatcagttcttaaaagttatgcctagaaattatgtaaagctaaactactggttagaaagtattcagtgtaatattgtattaatttgttaaattctaaacttgaatttcaataaaattttaaagctaa

SEQ ID NO: 278515 - DNA, 696 bp, Homo sapiens
ccgggatctcgagatagccgcagctctcgcgatctttctggagccgcacctccacgcggagtccgagcgcgtgtgctgagaccccagggtcgggagggcggagactgggagggagggagaagcccctttggcctgccttacggaagcctgcgagggagggtggtgtccactgcccagttccgtgtcccgatgcccagcgccagcgccagccgcaagagtcaggagaagccgcgggagatcatggacgcggcggaagattatgctaaagagagatatggaatatcttcaatgatacaatcacaagaaaaaccagatcgagttttggttcgggttagagacttgacaatacaaaaagctgatgaagttgtttgggtacgtgcaagagttcatacaagcagagctaaaggtaggattggtttcattattaaagctctttcggtaaggactccgaattttttgtcttacatattcctcacagaccaaagtaaatctttaaaaacaaaacaaaaacatgtaacttttctttcttaaaagtcactgtaaagtattaacccatggttaatcaattttagattcctgtaaaacatccttacaaataatttgaccctaaagactgatgaaatctaagacttcaagctacttttctagcatcgctctaaagtttaattattttcagctggagaaggagtagctaaa

SEQ ID NO: 278516 - DNA, 450 bp, Homo sapiens
ttgagcagcatctactaagcactgagtcactgtaccaaggtatactcataagtgattttcagtagtacttgccttttaagaaaagagcagaatagacaactgcgtgttctggccaaattttgtaatcccttgagaaactcaaatagaagaagttccttattaatgtttttaagttgccatttgatcttcaaacactgatttcacgtttctttttcagcacaccaaatgaaaagctgttgggtcatttggtaaaggaaaaggtaggactctttatatgctggatttctttttctaattctgaaatgtctcttgggactaaaaacaattgcagaggggtctgagcttcctagaatggtatgattctggaataaataaaaaccgaagaaggacaacattaaaaaaatttttttcttagaaaattgagaaatattcagacagcctgcctttctc

SEQ ID NO: 278517 - DNA, 437 bp, Homo sapiens
  misc_feature (316)..(316): n is a, c, g, or t
ccgggatctcgagatagccgcagctctcgcgatctttctggagccgcacctccacgcggagtccgagcgcgtgtgctgagaccccagggtcgggagggcggagactgggagggagggagaagcccctttggcctgccttacggaagcctgcgagggagggtggtgtccactgcccagttccgtgtcccgatgcccagcgccagcgccagccgcaagagtcaggagaagccgcgggagatcatggacgcggcggaagattatgctaaagagagatatggaatatcttcaatgatacaatcacaagaaaaaccagacnagtttgcttgggattagagcttgcaaactaaaacgtgatgaagttgtttggactggctaaaggcttatacaacgagcgaatggacagctcttatgcctactcgatcacagattctctcgct

SEQ ID NO: 278518 - DNA, 219 bp, Homo sapiens
ctattcatcggcacctcgctattcatcggcacctcgctattcatcggcactcaaagaatacatgatcctcaactgctaacagagagagctttacatcatggaattgatttggagaaaattaaggcttacattgattccttccgctttggtgcgcgatgaatagcgaggtgccgatgaatagcgaggtgccgatgaatagcgagtgccgatgagagcgaa

SEQ ID NO: 278519 - DNA, 2540 bp, Homo sapiens
ccgggatctcgagatagccgcagctctcgcgatctttctggagccgcacctccacgcggagtccgagcgcgtgtgctgagaccccagggtcgggagggcggagactgggagggagggagaagcccctttggcctgccttacggaagcctgcgagggagggtggtgtccactgcccagttccgtgtcccgatgcccagcgccagcgccagccgcaagagtcaggagaagccgcgggagatcatggacgcggcggaagattatgctaaagagagatatggaatatcttcaatgatacaatcacaagaaaaaccagatcgagttttggttcgggttagagacttgacaatacaaaaagctgatgaagttgtttgggtacgtgcaagagttcatacaagcagagctaaagggaaacagtgcttcttagtcctacgtcagcagcagtttaatgtccaggctcttgtggcggtgggagaccatgcaagcaagcagatggttaaatttgctgccaacatcaacaaagagagcattgtggatgtagaaggtgttgtgagaaaagtgaatcagaaaattggaagctgtacacagcaagacgttgagttacatgttcagaagatttatgtgatcagtttggctgaaccccgtctgcccctgcagctggatgatgctgttcggcctgaggcagaaggagaagaggaaggaagagctactgttaaccaggatacaagattagacaacagagtcattgatcttaggacatcaactagtcaggcagtcttccgtctccagtctggcatctgccatctcttccgagaaactttaattaacaaaggttttgtggaaatccaaactcctaaaattatttcagctgccagtgaaggaggagccaatgtttttactgtgtcatattttaaaaataatgcatacctggctcagtccccacagctatataagcaaatgtgcatttgtgctgattttgagaaggttttctctattggaccagtattcagagcggaagactctaatacccatagacatctaactgagtttgttggtttggacattgaaatggcttttaattaccattaccacgaagttatggaagaaattgctgacaccatggtacaaatattcaaaggacttcaagaaaggtttcagactgaaattcaaacagtgaataaacagttcccatgtgagccattcaaatttttggagccaactctaagactagaatattgtgaagcattggctatgcttagggaagctggagtcgaaatgggagatgaagacgatctgagcacaccaaatgaaaagctgttgggtcatttggtaaaggaaaagtatgatacagatttttatattcttgataaatatccattggctgtaagacctttctataccatgcctgacccaagaaatcccaaacagtccaactcttacgatatgttcatgagaggagaagaaatattgtcaggagctcaaagaatacatgatcctcaactgctaacagagagagctttacatcatggaattgatttggagaaaattaaggcttacattgattccttccgctttggagcccctcctcatgctggtggaggcattggattggaacgagttactatgctgtttctgggattgcataatgttcgtcagacctccatgttccctcgtgatcccaaacgactcactccttaaattcacactttgccacttaactccagtgtggatgacagagcgagaccctgcctcaaaaaaaaaaaaaaaaaaaaagaaagccacacttattcttttcagtaacctgctagtgcacaggctgtactttaggtacttaaaatatgcactagaataaatttgcaaggccctaaaatatcactgttatttttggagtaattcagtataggttcgtttaaaagagatttttataacttcagacatgcatcagtaggaaataacttgagaaattcatatggttatgttacaaattcatattctgttactacagtaaacgttaagagttttaaacagttaagattgtacaatttttcttcttttctatattacaagggccccagtgttaatgtcttagattttcagtatttgaacttatttttttaaattctgtcattgagataagaataattcaggtagcatctgaaattttaatgaatgtataattggcatatcatggaaaattaaccagaaagtatcagttcttaaaagttatgcctagaaattatgtaaagctaaactactggttagaaagtattcagtgtaatattgtattaatttgttaaattctaaacttgaatttcaataaaattttaaagctaattgtagtttttgtgtaactttgtggccaactgattttgtaagtggtgctaggcattcataatttggtaaaagaaaaaatacacaactagtttatataaataaagactaatatgttgtcaacatgtattcatttcaggatattagtttagatgggcgtagggatagagctcttaaagttgacagcttgggtcggttgacagagttcattt

SEQ ID NO: 278520 - DNA, 2512 bp, Homo sapiens
ccgggatctcgagatagccgcagctctcgcgatctttctggagccgcacctccacgcggagtccgagcgcgtgtgctgagaccccagggtcgggagggcggagactgggagggagggagaagcccctttggcctgccttacggaagcctgcgagggagggtggtgtccactgcccagttccgtgtcccgatgcccagcgccagcgccagccgcaagagtcaggagaagccgcgggagatcatggacgcggcggaagattatgctaaagagagatatggaatatcttcaatgatacaatcacaagaaaaaccagatcgagttttggttcgggttagagacttgacaatacaaaaagctgatgaagttgtttgggtacgtgcaagagttcatacaagcagagctaaagggaaacagtgcttcttagtcctacgtcagcagcagtttaatgtccaggctcttgtggcggtgggagaccatgcaagcaagcagatggttaaatttgctgccaacatcaacaaagagagcattgtggatgtagaaggtgttgtgagaaaagtgaatcagaaaattggaagctgtacacagcaagacgttgagttacatgttcagaagatttatgtgatcagtttggctgaaccccgtctgcccctgcagctggatgatgctgttcggcctgaggcagaaggagaagaggaaggaagagctactgttaaccaggatacaagattagacaacagagtcattgatcttaggacatcaactagtcaggcagtcttccgtctccagtctggcatctgccatctcttccgagaaactttaattaacaaaggttttgtggaaatccaaactcctaaaattatttcagctgccagtgaaggaggagccaatgtttttactgtgtcatattttaaaaataatgcatacctggctcagtccccacagctatataagcaaatgtgcatttgtgctgattttgagaaggttttctctattggaccagtattcagagcggaagactctaatacccatagacatctaactgagtttgttggtttggacattgaaatggcttttaattaccattaccacgaagttatggaagaaattgctgacaccatggtacaaatattcaaaggacttcaagaaaggtttcagactgaaattcaaacagtgaataaacagttcccatgtgagccattcaaatttttggagccaactctaagactagaatattgtgaagcattggctatgcttagggaagctggagtcgaaatgggagatgaagacgatctgagcacaccaaatgaaaagctgttgggtcatttggtaaaggaaaagtatgatacagatttttatattcttgataaatatccattggctgtaagacctttctataccatgcctgacccaagaaatcccaaacagtccaactcttacgatatgttcatgagaggagaagaaatattgtcaggagctcaaagaatacatgatcctcaactgctaacagagagagctttacatcatggaattgatttggagaaaattaaggcttacattgattccttccgctttggagcccctcctcatgctggtggaggcattggattggaacgagttactatgctgtttctgggattgcataatgttcgtcagacctccatgttccctcgtgatcccaaacgactcactccttaaattcacactttgccacttaactccagtgtggatgacagagcgagaccctgcctcaaaaaaaaaaaaaaaaaaaaagaaagccacacttattcttttcagtaacctgctagtgcacaggctgtactttaggtacttaaaatatgcactagaataaatttgcaaggccctaaaatatcactgttatttttggagtaattcagtataggttcgtttaaaagagatttttataacttcagacatgcatcagtaggaaataacttgagaaattcatatggttatgttacaaattcatattctgttactacagtaaacgttaagagttttaaacagttaagattgtacaatttttcttcttttctatattacaagggccccagtgttaatgtcttagattttcagtatttgaacttatttttttaaattctgtcattgagataagaataattcaggtagcatctgaaattttaatgaatgtataattggcatatcatggaaaattaaccagaaagtatcagttcttaaaagttatgcctagaaattatgtaaagctaaactactggttagaaagtattcagtgtaatattgtattaatttgttaaattctaaacttgaatttcaataaaattttaaagctaaaaaaaaaaaaaaaaaaaaaaaaaaaaaaaaaaaaaaaaaaaaaaaaaaaaaaagaaggaagagagaaacaagagagagaagagaacaagaaggggggggggggcttgaggtcccggggggggccccagtccacggggttttaaaggggggggcccagggggggcgggggacgaggggcgca

SEQ ID NO: 278521 - DNA, 2389 bp, Homo sapiens
ccgggatctcgagatagccgcagctctcgcgatctttctggagccgcacctccacgcggagtccgagcgcgtgtgctgagaccccagggtcgggagggcggagactgggagggagggagaagcccctttggcctgccttacggaagcctgcgagggagggtggtgtccactgcccagttccgtgtcccgatgcccagcgccagcgccagccgcaagagtcaggagaagccgcgggagatcatggacgcggcggaagattatgctaaagagagatatggaatatcttcaatgatacaatcacaagaaaaaccagatcgagttttggttcgggttagagacttgacaatacaaaaagctgatgaagttgtttgggtacgtgcaagagttcatacaagcagagctaaagggaaacagtgcttcttagtcctacgtcagcagcagtttaatgtccaggctcttgtggcggtgggagaccatgcaagcaagcagatggttaaatttgctgccaacatcaacaaagagagcattgtggatgtagaaggtgttgtgagaaaagtgaatcagaaaattggaagctgtacacagcaagacgttgagttacatgttcagaagatttatgtgatcagtttggctgaaccccgtctgcccctgcagctggatgatgctgttcggcctgaggcagaaggagaagaggaaggaagagctactgttaaccaggatacaagattagacaacagagtcattgatcttaggacatcaactagtcaggcagtcttccgtctccagtctggcatctgccatctcttccgagaaactttaattaacaaaggttttgtggaaatccaaactcctaaaattatttcagctgccagtgaaggaggagccaatgtttttactgtgtcatattttaaaaataatgcatacctggctcagtccccacagctatataagcaaatgtgcatttgtgctgattttgagaaggttttctctattggaccagtattcagagcggaagactctaatacccatagacatctaactgagtttgttggtttggacattgaaatggcttttaattaccattaccacgaagttatggaagaaattgctgacaccatggtacaaatattcaaaggacttcaagaaaggtttcagactgaaattcaaacagtgaataaacagttcccatgtgagccattcaaatttttggagccaactctaagactagaatattgtgaagcattggctatgcttagggaagctggagtcgaaatgggagatgaagacgatctgagcacaccaaatgaaaagctgttgggtcatttggtaaaggaaaagtatgatacagatttttatattcttgataaatatccattggctgtaagacctttctataccatgcctgacccaagaaatcccaaacagtccaactcttacgatatgttcatgagaggagaagaaatattgtcaggagctcaaagaatacatgatcctcaactgctaacagagagagctttacatcatggaattgatttggagaaaattaaggcttacattgattccttccgctttggagcccctcctcatgctggtggaggcattggattggaacgagttactatgctgtttctgggattgcataatgttcgtcagacctccatgttccctcgtgatcccaaacgactcactccttaaattcacactttgccacttaactccagtgtggatgacagagcgagaccctgcctccttaaaatatgcactagaataaatttgcaaggccctaaaatatcactgttatttttggagtaattcagtataggttcgtttaaaagagatttttataacttcagacatgcatcagtaggaaataacttgagaaattcatatggttatgttacaaattcatattctgttactacagtaaacgttaagagttttaaacagttaagattgtacaatttttcttcttttctatattacaagggccccagtgttaatgtcttagattttcagtatttgaacttatttttttaaattctgtcattgagataagaataattcaggtagcatctgaaattttaatgaatgtataattggcatatcatggaaaattaaccagaaagtatcagttcttaaaagttatgcctagaaattatgtaaagctaaactactggttagaaagtattcagtgtaatattgtattaatttgttaaattctaaacttgaatttcaataaaattttaaagctaagaaaataaacaactcgaggggggcggtaccattgcctataggtcgttaaatccgggggcggttagagtggagggacgcggttacattaagttggacatccttgtcgggtgtataagaaggagtgtttgcatgatgt

SEQ ID NO: 278522 - DNA, 2421 bp, Homo sapiens
ttttgttgtcgttgccactgtatttacacctcacttacacagggactggtaacccatgctgccttggcaagccaactgcactcctctgtcccaacaagcagggcaatggattgcgaagaggcctcctccgtccccaagcagctacgtcgcccaggggaagagagaaggcgggaaagtccaagagaggagaaaccaaggcccgcgcttaggtgggtgttgtagtgacgagtctgcggttacagccgagcggagttgaaagggctgttagaagaatggagcagaagtcgcagttgggacgaagctgaagagagctggcattcgcccaggtctacagccagccacctggattatgctaaagagagatatggaatatcttcaatgatacaatcacaagaaaaaccagatcgagttttggttcgggttagagacttgacaatacaaaaagctgatgaagttgtttgggtacgtgcaagagttcatacaagcagagctaaagggaaacagtgcttcttagtcctacgtcagcagcagtttaatgtccaggctcttgtggcggtgggagaccatgcaagcaagcagatggttaaatttgctgccaacatcaacaaagagagcattgtggatgtagaaggtgttgtgagaaaagtgaatcagaaaattggaagctgtacacagcaagacgttgagttacatgttcagaagatttatgtgatcagtttggctgaaccccgtctgcccctgcagctggatgatgctgttcggcctgaggcagaaggagaagaggaaggaagagctactgttaaccaggatacaagattagacaacagagtcattgatcttaggacatcaactagtcaggcagtcttccgtctccagtctggcatctgccatctcttccgagaaactttaattaacaaaggttttgtggaaatccaaactcctaaaattatttcagctgccagtgaaggaggagccaatgtttttactgtgtcatattttaaaaataatgcatacctggctcagtccccacagctatataagcaaatgtgcatttgtgctgattttgagaaggttttctctattggaccagtattcagagcggaagactctaatacccatagacatctaactgagtttgttggtttggacattgaaatggcttttaattaccattaccacgaagttatggaagaaattgctgacaccatggtacaaatattcaaaggacttcaagaaaggtttcagactgaaattcaaacagtgaataaacagttcccatgtgagccattcaaatttttggagccaactctaagactagaatattgtgaagcattggctatgcttagggaagctggagtcgaaatgggagatgaagacgatctgagcacaccaaatgaaaagctgttgggtcatttggtaaaggaaaagtatgatacagatttttatattcttgataaatatccattggctgtaagacctttctataccatgcctgacccaagaaatcccaaacagtccaactcttacgatatgttcatgagaggagaagaaatattgtcaggagctcaaagaatacatgatcctcaactgctaacagagagagctttacatcatggaattgatttggagaaaattaaggcttacattgattccttccgctttggagcccctcctcatgctggtggaggcattggattggaacgagttactatgctgtttctgggattgcataatgttcgtcagacctccatgttccctcgtgatcccaaacgactcactccttaaattcacactttgccacttaactccagtgtggatgacagagcgagaccctgcctcaaaaaaaaaaaaaaaaaaaaagaaagccacacttattcttttcagtaacctgctagtgcacaggctgtactttaggtacttaaaatatgcactagaataaatttgcaaggccctaaaatatcactgttatttttggagtaattcagtataggttcgtttaaaagagatttttataacttcagacatgcatcagtaggaaataacttgagaaattcatatggttatgttacaaattcatattctgttactacagtaaacgttaagagttttaaacagttaagattgtacaatttttcttcttttctatattacaagggccccagtgttaatgtcttagattttcagtatttgaacttatttttttaaattctgtcattgagataagaataattcaggtagcatctgaaattttaatgaatgtataattggcatatcatggaaaattaaccagaaagtatcagttcttaaaagttatgcctagaaattatgtaaagctaaactactggttagaaagtattcagtgtaatattgtattaatttgttaaattctaaacttgaatttcaataaaattttaaagctaa

SEQ ID NO: 278523 - DNA, 1843 bp, Homo sapiens
ttaccaggatacagctatacacatcaacaaagagagcattgtggatgtagaaggtgttgtgagaaaagtgaatcagaaaattggaagctgtacacagcaagacgttgagttacatgttcagaagatttatgtgatcagtttggctgaaccccgtctgcccctgcagctggatgatgctgttcggcctgaggcagaaggagaagaggaaggaagagctactgttaaccaggatacaagattagacaacagagtcattgatcttaggacatcaactagtcaggcagtcttccgtctccagtctggcatctgccatctcttccgagaaactttaattaacaaaggttttgtggaaatccaaactcctaaaattatttcagctgccagtgaaggaggagccaatgtttttactgtgtcatattttaaaaataatgcatacctggctcagtccccacagctatataagcaaatgtgcatttgtgctgattttgagaaggttttctctattggaccagtattcagagcggaagactctaatacccatagacatctaactgagtttgttggtttggacattgaaatggcttttaattaccattaccacgaagttatggaagaaattgctgacaccatggtacaaatattcaaaggacttcaagaaaggtttcagactgaaattcaaacagtgaataaacagttcccatgtgagccattcaaatttttggagccaactctaagactagaatattgtgaagcattggctatgcttagggaagctggagtcgaaatgggagatgaagacgatctgagcacaccaaatgaaaagctgttgggtcatttggtaaaggaaaagtatgatacagatttttatattcttgataaatatccattggctgtaagacctttctataccatgcctgacccaagaaatcccaaacagtccaactcttacgatatgttcatgagaggagaagaaatattgtcaggagctcaaagaatacatgatcctcaactgctaacagagagagctttacatcatggaattgatttggagaaaattaaggcttacattgattccttccgctttggagcccctcctcatgctggtggaggcattggattggaacgagttactatgctgtttctgggattgcataatgttcgtcagacctccatgttccctcgtgatcccaaacgactcactccttaaattcacactttgccacttaactccagtgtggatgacagagcgagaccctgcctcaaaaaaaaaaaaaaaaaaaaagaaagccacacttattcttttcagtaacctgctagtgcacaggctgtactttaggtacttaaaatatgcactagaataaatttgcaaggccctaaaatatcactgttatttttggagtaattcagtataggttcgtttaaaagagatttttataacttcagacatgcatcagtaggaaataacttgagaaattcatatggttatgttacaaattcatattctgttactacagtaaacgttaagagttttaaacagttaagattgtacaatttttcttcttttctatattacaagggccccagtgttaatgtcttagattttcagtatttgaacttatttttttaaattctgtcattgagataagaataattcaggtagcatctgaaattttaatgaatgtataattggcatatcatggaaaattaaccagaaagtatcagttcttaaaagttatgcctagaaattatgtaaagctaaactactggttagaaagtattcagtgtaatattgtattaatttgttaaattctaaacttgaatttcaataaaattttaaagctaa

SEQ ID NO: 278524 - DNA, 2250 bp, Homo sapiens
ccgggatctcgagatagccgcagctctcgcgatctttctggagccgcacctccacgcggagtccgagcgcgtgtgctgagaccccagggtcgggagggcggagactgggagggagggagaagcccctttggcctgccttacggaagcctgcgagggagggtggtgtccactgcccagttccgtgtcccgatgcccagcgccagcgccagccgcaagagtcaggagaagccgcgggagatcatggacgcggcggaagattatgctaaagagagatatggaatatcttcaatgatacaatcacaagaaaaaccagatcgagttttggttcgggttagagacttgacaatacaaaaagctgatgaagttgtttgggtacgtgcaagagttcatacaagcagagctaaagggaaacagtgcttcttagtcctacgtcagcagcagtttaatgtccaggctcttgtggcggtgggagaccatgcaagcaagcagatggttaaatttgctgccaacatcaacaaagagagcattgtggatgtagaaggtgttgtgagaaaagtgaatcagaaaattggaagctgtacacagcaagacgttgagttacatgttcagaagatttatgtgatcagtttggctgaaccccgtctgcccctgcagctggatgatgctgttcggcctgaggcagaaggagaagaggaaggaagagctactgttaaccaggatacaagattagacaacagagtcattgatcttaggacatcaactagtcaggcagtcttccgtctccagtctggcatctgccatctcttccgagaaactttaattaacaaaggttttgtggaaatccaaactcctaaaattatttcagctgccagtgaaggaggagccaatgtttttactgtgtcatattttaaaaataatgcatacctggctcagtccccacagctatataagcaaatgtgcatttgtgctgattttgagaaggttttctctattggaccagtattcagagcggaagactctaatacccatagacatctaactgagtttgttggtttggacattgaaatggcttttaattaccattaccacgaagttatggaagaaattgctgacaccatggtacaaatattcaaaggacttcaagaaaggtttcagactgaaattcaaacagtgaataaacagttcccatgtgagccattcaaatttttggagccaactctaagactagaatattgtgaagcattggctatgcttagggaagctggagtcgaaatgggagatgaagacgatctgagcacaccaaatgaaaagctgttgggtcatttggtaaaggaaaagaaacagtccaactcttacgatatgttcatgagaggagaagaaatattgtcaggagctcaaagaatacatgatcctcaactgctaacagagagagctttacatcatggaattgatttggagaaaattaaggcttacattgattccttccgctttggagcccctcctcatgctggtggaggcattggattggaacgagttactatgctgtttctgggattgcataatgttcgtcagacctccatgttccctcgtgatcccaaacgactcactccttaaattcacactttgccacttaactccagtgtggatgacagagcgagaccctgcctcaaaaaaaaaaaaaaaaaaaaagaaagccacacttattcttttcagtaacctgctagtgcacaggctgtactttaggtacttaaaatatgcactagaataaatttgcaaggccctaaaatatcactgttatttttggagtaattcagtataggttcgtttaaaagagatttttataacttcagacatgcatcagtaggaaataacttgagaaattcatatggttatgttacaaattcatattctgttactacagtaaacgttaagagttttaaacagttaagattgtacaatttttcttcttttctatattacaagggccccagtgttaatgtcttagattttcagtatttgaacttatttttttaaattctgtcattgagataagaataattcaggtagcatctgaaattttaatgaatgtataattggcatatcatggaaaattaaccagaaagtatcagttcttaaaagttatgcctagaaattatgtaaagctaaactactggttagaaagtattcagtgtaatattgtattaatttgttaaattctaaacttgaatttcaataaaattttaaagctaa

SEQ ID NO: 278525 - DNA, 1894 bp, Homo sapiens
ccgggatctcgagatagccgcagctctcgcgatctttctggagccgcacctccacgcggagtccgagcgcgtgtgctgagaccccagggtcgggagggcggagactgggagggagggagaagcccctttggcctgccttacggaagcctgcgagggagggtggtgtccactgcccagttccgtgtcccgatgcccagcgccagcgccagccgcaagagtcaggagaagccgcgggagatcatggacgcggcggaagattatgctaaagagagatatggaatatcttcaatgatacaatcacaagaaaaaccagatcgagttttggttcgggttagagacttgacaatacaaaaagctgatgaagttgtttgggtacgtgcaagagttcatacaagcagagctaaagggaaacagtgcttcttagtcctacgtcagcagcagtttaatgtccaggctcttgtggcggtgggagaccatgcaagcaagcagatggttaaatttgctgccaacatcaacaaagagagcattgtggatgtagaaggtgttgtgagaaaagtgaatcagaaaattggaagctgtacacagcaagacgttgagttacatgttcagaagatttatgtgatcagtttggctgaaccccgtctgcccctgcagctggatgatgctgttcggcctgaggcagaaggagaagaggaaggaagagctactgttaaccaggatacaagattagacaacagagtcattgatcttaggacatcaactagtcaggcagtcttccgtctccagtctggcatctgccatctcttccgagaaactttaattaacaaaggttttgtggaaatccaaactcctaaaattatttcagctgccagtgaaggaggagccaatgtttttactgtgtcatattttaaaaataatgcatacctggctcagtccccacagctatataagcaaatgtgcatttgtgctgattttgagaaggttttctctattggaccagtattcagagcggaagactctaatacccatagacatctaactgagtttgttggtttggacattgaaatggcttttaattaccattaccacgaagttatggaagaaattgctgacaccatggtacaaatattcaaaggacttcaagaaaggtttcagactgaaattcaaacagtgaataaacagttcccatgtgagccattcaaatttttggagccaactctaagactagaatattgtgaagcattggctatgcttagggaagctggagtcgaaatgggagatgaagacgatctgagcacaccaaatgaaaagctgttgggtcatttggtaaaggaaaagtatgatacagatttttatattcttgataaatatccattggctgtaagacctttctataccatgcctgacccaagaaatcccaaacagtccaactcttacgatatgttcatgagaggagaagaaatattgtcaggagctcaaagaatacatgatcctcaactgctaacagagagagctttacatcatggaattgatttggagaaaattaaggcttacattgattccttccgctttggagcccctcctcatgctggtggaggcattggtaatattctgttattgcttacaaataagttcataagttctaagtataatacaaatttgaattacaagaatttttaaaagtgaattacgacataagtgaaaatttgatttccaagaaacaaaataaacagctaacttgtgtgttataaaatattattgtcataaagttctagccattttttttctcttaagaatttagaagccaaatgtcttgtaagtggagtatcctgttttctctctgctgctgtgagttcattcgcattagcacaaattaaagctctaccttaaaata

SEQ ID NO: 278526 - DNA, 1084 bp, Homo sapiens
caaaagacgacccaaatctacaacaacttttactaattttcgaccttacacaccaaatgaaaagctgttgggtcatttggtaaaggaaaagtatgatacagatttttatattcttgataaatatccattggctgtaagacctttctataccatgcctgacccaagaaatcccaaacagtccaactcttacgatatgttcatgagaggagaagaaatattgtcaggagctcaaagaatacatgatcctcaactgctaacagagagagctttacatcatggaattgatttggagaaaattaaggcttacattgattccttccgctttggagcccctcctcatgctggtggaggcattggattggaacgagttactatgctgtttctgggattgcataatgttcgtcagacctccatgttccctcgtgatcccaaacgactcactccttaaattcacactttgccacttaactccagtgtggatgacagagcgagaccctgcctcaaaaaaaaaaaaaaaaaaaaagaaagccacacttattcttttcagtaacctgctagtgcacaggctgtactttaggtacttaaaatatgcactagaataaatttgcaaggccctaaaatatcactgttatttttggagtaattcagtataggttcgtttaaaagagatttttataacttcagacatgcatcagtaggaaataacttgagaaattcatatggttatgttacaaattcatattctgttactacagtaaacgttaagagttttaaacagttaagattgtacaatttttcttcttttctatattacaagggccccagtgttaatgtcttagattttcagtatttgaacttatttttttaaattctgtcattgagataagaataattcaggtagcatctgaaattttaatgaatgtataattggcatatcatggaaaattaaccagaaagtatcagttcttaaaagttatgcctagaaattatgtaaagctaaactactggttagaaagtattcagtgtaatattgtattaatttgttaaattctaaacttgaatttcaataaaattttaaagctaa

SEQ ID NO: 278527 - DNA, 890 bp, Homo sapiens
ccgggatctcgagatagccgcagctctcgcgatctttctggagccgcacctccacgcggagtccgagcgcgtgtgctgagaccccagggtcgggagggcggagactgggagggagggagaagcccctttggcctgccttacggaagcctgcgagggagggtggtgtccactgcccagttccgtgtcccgatgcccagcgccagcgccagccgcaagagtcaggagaagccgcgggagatcatggacgcggcggaagattatgctaaagagagatatggaatatcttcaatgatacaatcacaagaaaaaccagatcgagttttggttcgggttagagacttgacaatacaaaaagctgatgaagttgtttgggtacgtgcaagagttcatacaagcagagctaaagggaaacagtgcttcttagtcctacgtcagcagcagtttaatgtccaggctcttgtggcggtgggagaccatgcaagcaagcagatggttaaatttgctgccaacatcaacaaagagagcattgtggatgtagaaggtgttgtgagaaaagtgaatcagaaaattggaagctgtacacagcaagacgttgagttacatgttcagaagatttatgtgatcagtttggctgaaccccgtctgcccctgcagctggatgatgctgttcggcctgaggcagaaggagaagaggtaaaaattatacttatgaaatattatgcttccgctgtatatttagtttgcaaaacattgaaaacctgatgtactaagggtgtctgtgaattgattttgagctccattgttatttaaacttactcttaaaatcagcaattctcaaaccttttggtatcgagttgccttttacattattaaaaataattaagaaccct

SEQ ID NO: 278528 - DNA, 651 bp, Homo sapiens
aattttcttgcagagacaagacaaagtgcttgtaagacatagaactgagtgttgtaattaccttaatctctcctgccacgatttaaggggagcacagcttcaacacttcaaaaacgaagcactatcatgggaaagaaagctcgttttcaacaagcgccaacaataaacaggtcagatctggtttcttctctgaaagaatctctaaaaggaactggtcaaaaatatctgtaaactattttaaatgcttattattttacgtaacaacagagaccaagtgctgaacacagaccttggctgcgtctgttcagtgaggttttagcaatgacactctagaaatgccctagtgttatgtcaggactgaaagtttatcatataatcttccactagggattctctaaagcttgggtaagtggcatcttctctcatcaatgttcatttaatgaaaagtgaaataaaccaacagattatcagatgctgtcagttttggagcttcaacccaaaataatagtccttttgctttgtatttttggtaatgttgaagtcactgtgtatgtttgtttggtcaatgtttccgcagtatttattaaaacatacttttttttttcttcaaataaaaaagtaaccagacatatcagggggatctctagagtc

SEQ ID NO: 278529 - DNA, 2380 bp, Homo sapiens
aattcggcactaggaagtgggagttgggtcgtgatgtgacagtcaaaggacttagccggaaagggtagagttaatgcatgacagacaaggggactctcatctgaaaatttgtgtgtctttgtttcttctcaggttctccttactatgacaatgtccgccccctctcttaccctgattcggatgctgtgctgatttgctttgacatcagtagaccagagaccctggacagtgtcctcaaaaagtggaaaggtgaaatccaggaattttgtccaaataccaaaatgctcttggtcggctgcaagtctgatctgcggacagatgttagtacattagtagagctctccaatcacaggcagacgccagtgtcctatgaccagggggcaaatatggccaaacagattggagcagctacttatatcgaatgctcagctttacagtcggaaaatagcgtcagagacatttttcacgttgccaccttggcatgtgtaaataagacaaataaaaacgttaagcggaacaaatcacagagagccacaaagcggatttcacacatgcctagcagaccagaactctcggcagttgctacggacttacgaaaggacaaagcgaagagctgcactgtgatgtgaatctttcattatctttaatgaagacaaaggaatctagtgtaaaaaacaacagcaaacaaaaaggtgaagtctaaatgaagtgcacagccaaagtcatgtataccagaggcttaggaggcgtttgagaggatactcatctttttggaatcctgaccttaggttcggcatgtagaccaagtgatgagaagtgaatacatggaagagtttttaagtgtgacttgaaaaatatgcctccaagaagaaaaatcacactctgaatggtgcttgcatttttgggttttttttttttgttataatctattcatggatctccactttgatttaatttttaaatgttttaatctcctttacaaaaagtatacgttaatataccgtcctcaagggggaactggcactgtgaccttagcatttagttttctagaggatgtgatctaatttctttctagctcatcattaaaaaggaaattgtatcaggacccatgggatatatccagaggcaaactttatgaggctttgaaatcttgccttcctgaagatagctgagtaggatggttctaaggaaagcctttgcaatcttgcaagatttgtagaccagcactacaaagatcgcatagatcaaataggaaaaaaaatgtcgatttttattcagtctgatggttctgttcttcattgtgattgtcattaaaaagtggtaaattgctcaatgtaatatttttgtgcgctgtttagaagttgtgtgattttttgccatcgttgataaaaatgcaaagtcaaataaaaggtgtcttggtttgatgtcatagaatgatccaaggagagaaaaaaggtagttactgttttcaccagaaaaggtaatgagtgaaggaaagaatagtagcagaaagcacagtttgtgagtaaagctgtctggaattaagttaccaaaaatacaaagcaaaaggactattattttgggttgaagctccaaaactgacagcatctgataatctgttggtttatttcacttttcattaaatgaacattgatgagagaagatgccacttacccaagctttagagaatccctagtggaagattatatgataaactttcagtcctgacataacactagggcatttctagagtgtcattgctaaaacctcactgaacagatgcagccaaggtctgtgttcagcacttggtctctgttgttacgtaaaataataagcatttaaaatagtttacagatatttttgaccagttccttttagagattctttcagagaagaaaccagatctgacctgtttattgttggcgcttgttgaaaacgagctttctttcccatgatagtgcttcgtttttgaagtgttgaagctgtgctccccttaaatcgtggcaggagagattaaggtaattacaacactcagttctatgtcttacaagcactttgtcttgtctctgcaagaaaattcgattccagtcatttcccataaaatacagacattttaccaacataatatgctttgattgatgcagcattatgctttgggcagtattacaaaatagctggcgagtgctttctgtatttaaatattgtaaaaagaaaataagttataactgttataaagcagaacttttgttgcattttttaaactgttgaagtcactgtgtatgtttgtttggtcaatgtttccgcagtatttattaaaacatacttttttttttcttcaaataaaaaagtaaccagacatatcagggggatctctagagtc

SEQ ID NO: 278530 - DNA, 1742 bp, Homo sapiens
atgtgctggggtgactctagaggaccagtgtcatgtataccagaggcttaggaggcgtttgagaggatactcatctttttggaatcctgaccttaggttcggcatgtagaccaagtgatgagaagtgaatacatggaagagtttttaagtgtgacttgaaaaatatgccaaaaaatgagagatacaaatgagctagaggaagatgaggggggatgcgagtacctccaagaagaaaaatcacactctgaatggtgcttgcatttttgggttttttttttttgttataatctattcatggatctccactttgatttaatttttaaatgttttaatctcctttacaaaaagtatacgttaatataccgtcctcaagggggaactggcactgtgaccttagcatttagttttctagaggatgtgatctaatttctttctagctcatcattaaaaaggaaattgtatcaggacccatgggatatatccagaggcaaactttatgaggctttgaaatcttgccttcctgaagatagctgagtaggatggttctaaggaaagcctttgcaatcttgcaagatttgtagaccagcactacaaagatcgcatagatcaaataggaaaaaaaatgtcgatttttattcagtctgatggttctgttcttcattgtgattgtcattaaaaagtggtaaattgctcaatgtaatatttttgtgcgctgtttagaagttgtgtgattttttgccatcgttgataaaaatgcaaagtcaaataaaaggtgtcttggtttgatgtcatagaatgatccaaggagagaaaaaaggtagttactgttttcaccagaaaaggtaatgagtgaaggaaagaatagtagcagaaagcacagtttgtgagtaaagctgtctggaattaagttaccaaaaatacaaagcaaaaggactattattttgggttgaagctccaaaactgacagcatctgataatctgttggtttatttcacttttcattaaatgaacattgatgagagaagatgccacttacccaagctttagagaatccctagtggaagattatatgataaactttcagtcctgacataacactagggcatttctagagtgtcattgctaaaacctcactgaacagatgcagccaaggtctgtgttcagcacttggtctctgttgttacgtaaaataataagcatttaaaatagtttacagatatttttgaccagttccttttagagattctttcagagaagaaaccagatctgacctgtttattgttggcgcttgttgaaaacgagctttctttcccatgatagtgcttcgtttttgaagtgttgaagctgtgctccccttaaatcgtggcaggagagattaaggtaattacaacactcagttctatgtcttacaagcactttgtcttgtctctgcaagaaaattcgattccagtcatttcccataaaatacagacattttaccaacataatatgctttgattgatgcagcattatgctttgggcagtattacaaaatagctggcgagtgctttctgtatttaaatattgtaaaaagaaaataagttataactgttataaagcagaacttttgttgcattttttaaactgttgaagtcactgtgtatgtttgtttggtcaatgtttccgcagtatttattaaaacatacttttttttttcttcaaataaaaaagtaaccagacatatcagggggatctctagagtc

SEQ ID NO: 278531 - DNA, 214 bp, Homo sapiens
tggtattagaagatgctagctaactttcccccaaagtcttattgctggttaaaatcccttcttttgcttctcagggggcaaatatggccaaacagattggagcagctacttatatcgaatgctcagctttacagtcggaaaatagcgtcagagacatttttcacgttgccaccttggcatgtgtaaataagacaaataaaaacgttaagcggaa

SEQ ID NO: 278532 - DNA, 2434 bp, Homo sapiens
aattcggcactaggaagtgggagttgggtcgtgatgtgacagtcaaaggacttagccggaaagggtagagttaatgcatgacagacaaggggactctcatctgaaaatttgtgtgtctttgtttcttctcaggttctccttactatgacaatgtccgccccctctcttaccctgattcggatgctgtgctgatttgctttgacatcagtagaccagagaccctggacagtgtcctcaaaaagtggaaaggtgaaatccaggaattttgtccaaataccaaaatgctcttggtcggctgcaagtctgatctgcggacagatgttagtacattagtagagctctccaatcacaggcagacgccagtgtcctatgaccagggggcaaatatggccaaacagattggagcagctacttatatcgaatgctcagctttacagtcggaaaatagcgtcagagacatttttcacgttgccaccttggcatgtgtaaataagacaaataaaaacgttaagcggaacaaatcacagagagccacaaagcggatttcacacatgcctagcagaccagaactctcggcagttgctacggacttacgaaaggacaaagcgaagagctgcactgtgatgtgaatctttcattatctttaatgaagacaaaggaatctagtgtaaaaaacaacagcaaacaaaaaggtgaagtctaaatgaagtgcacagccaaagtcatgtataccagaggcttaggaggcgtttgagaggatactcatctttttggaatcctgaccttaggttcggcatgtagaccaagtgatgagaagtgaatacatggaagagtttttaagtgtgacttgaaaaatatgccaaaaaatgagagatacaaatgagctagaggaagatgaggggggatgcgagtacctccaagaagaaaaatcacactctgaatggtgcttgcatttttgggttttttttttttgttataatctattcatggatctccactttgatttaatttttaaatgttttaatctcctttacaaaaagtatacgttaatataccgtcctcaagggggaactggcactgtgaccttagcatttagttttctagaggatgtgatctaatttctttctagctcatcattaaaaaggaaattgtatcaggacccatgggatatatccagaggcaaactttatgaggctttgaaatcttgccttcctgaagatagctgagtaggatggttctaaggaaagcctttgcaatcttgcaagatttgtagaccagcactacaaagatcgcatagatcaaataggaaaaaaaatgtcgatttttattcagtctgatggttctgttcttcattgtgattgtcattaaaaagtggtaaattgctcaatgtaatatttttgtgcgctgtttagaagttgtgtgattttttgccatcgttgataaaaatgcaaagtcaaataaaaggtgtcttggtttgatgtcatagaatgatccaaggagagaaaaaaggtagttactgttttcaccagaaaaggtaatgagtgaaggaaagaatagtagcagaaagcacagtttgtgagtaaagctgtctggaattaagttaccaaaaatacaaagcaaaaggactattattttgggttgaagctccaaaactgacagcatctgataatctgttggtttatttcacttttcattaaatgaacattgatgagagaagatgccacttacccaagctttagagaatccctagtggaagattatatgataaactttcagtcctgacataacactagggcatttctagagtgtcattgctaaaacctcactgaacagatgcagccaaggtctgtgttcagcacttggtctctgttgttacgtaaaataataagcatttaaaatagtttacagatatttttgaccagttccttttagagattctttcagagaagaaaccagatctgacctgtttattgttggcgcttgttgaaaacgagctttctttcccatgatagtgcttcgtttttgaagtgttgaagctgtgctccccttaaatcgtggcaggagagattaaggtaattacaacactcagttctatgtcttacaagcactttgtcttgtctctgcaagaaaattcgattccagtcatttcccataaaatacagacattttaccaacataatatgctttgattgatgcagcattatgctttgggcagtattacaaaatagctggcgagtgctttctgtatttaaatattgtaaaaagaaaataagttataactgttataaagcagaacttttgttgcattttttaaactgttgaagtcactgtgtatgtttgtttggtcaatgtttccgcagtatttattaaaacatacttttttttttcttcaaataaaaaagtaaccagacatatcagggggatctctagagtc

SEQ ID NO: 278533 - DNA, 2380 bp, Homo sapiens
aattcggcactaggaagtgggagttgggtcgtgatgtgacagtcaaaggacttagccggaaagggtagagttaatgcatgacagacaaggggactctcatctgaaaatttgtgtgtctttgtttcttctcaggttctccttactatgacaatgtccgccccctctcttaccctgattcggatgctgtgctgatttgctttgacatcagtagaccagagaccctggacagtgtcctcaaaaagtggaaaggtgaaatccaggaattttgtccaaataccaaaatgctcttggtcggctgcaagtctgatctgcggacagatgttagtacattagtagagctctccaatcacaggcagacgccagtgtcctatgaccagggggcaaatatggccaaacagattggagcagctacttatatcgaatgctcagctttacagtcggaaaatagcgtcagagacatttttcacgttgccaccttggcatgtgtaaataagacaaataaaaacgttaagcggaacaaatcacagagagccacaaagcggatttcacacatgcctagcagaccagaactctcggcagttgctacggacttacgaaaggacaaagcgaagagctgcactgtgatgtgaatctttcattatctttaatgaagacaaaggaatctagtgtaaaaaacaacagcaaacaaaaaggcgtttgagaggatactcatctttttggaatcctgaccttaggttcggcatgtagaccaagtgatgagaagtgaatacatggaagagtttttaagtgtgacttgaaaaatatgccaaaaaatgagagatacaaatgagctagaggaagatgaggggggatgcgagtacctccaagaagaaaaatcacactctgaatggtgcttgcatttttgggttttttttttttgttataatctattcatggatctccactttgatttaatttttaaatgttttaatctcctttacaaaaagtatacgttaatataccgtcctcaagggggaactggcactgtgaccttagcatttagttttctagaggatgtgatctaatttctttctagctcatcattaaaaaggaaattgtatcaggacccatgggatatatccagaggcaaactttatgaggctttgaaatcttgccttcctgaagatagctgagtaggatggttctaaggaaagcctttgcaatcttgcaagatttgtagaccagcactacaaagatcgcatagatcaaataggaaaaaaaatgtcgatttttattcagtctgatggttctgttcttcattgtgattgtcattaaaaagtggtaaattgctcaatgtaatatttttgtgcgctgtttagaagttgtgtgattttttgccatcgttgataaaaatgcaaagtcaaataaaaggtgtcttggtttgatgtcatagaatgatccaaggagagaaaaaaggtagttactgttttcaccagaaaaggtaatgagtgaaggaaagaatagtagcagaaagcacagtttgtgagtaaagctgtctggaattaagttaccaaaaatacaaagcaaaaggactattattttgggttgaagctccaaaactgacagcatctgataatctgttggtttatttcacttttcattaaatgaacattgatgagagaagatgccacttacccaagctttagagaatccctagtggaagattatatgataaactttcagtcctgacataacactagggcatttctagagtgtcattgctaaaacctcactgaacagatgcagccaaggtctgtgttcagcacttggtctctgttgttacgtaaaataataagcatttaaaatagtttacagatatttttgaccagttccttttagagattctttcagagaagaaaccagatctgacctgtttattgttggcgcttgttgaaaacgagctttctttcccatgatagtgcttcgtttttgaagtgttgaagctgtgctccccttaaatcgtggcaggagagattaaggtaattacaacactcagttctatgtcttacaagcactttgtcttgtctctgcaagaaaattcgattccagtcatttcccataaaatacagacattttaccaacataatatgctttgattgatgcagcattatgctttgggcagtattacaaaatagctggcgagtgctttctgtatttaaatattgtaaaaagaaaataagttataactgttataaagcagaacttttgttgcattttttaaactgttgaagtcactgtgtatgtttgtttggtcaatgtttccgcagtatttattaaaacatacttttttttttcttcaaataaaaaagtaaccagacatatcagggggatctctagagtc

SEQ ID NO: 278534 - DNA, 1986 bp, Homo sapiens
cccgggcaggttagaagacagcaggggaactcgagaagttggttgttttcagcagattaaaacaatacagatttatcagcaagactgttgaacgcataactgcccaagatgcctgtccctccccctccagcacccccgccgcccccgacgtttgcactggccaatacagagaagcctaccttgaataagacagagcaggctgggagaaatgctctcctttctgatatcagcaaagggaagaaactaaagaagacggtcaccaatgacagaagtgcaccaatactggacaaacctaaaggagctggtgctggaggcggtggtggtggctttggtggaggcggcggatttggcggaggaggtggtggcggaggcggtggaagttttggagggggcggacctccaggtctgggaggattgttccaggctggaatgccgaagctgagatccacggccaacagggataatgattctggaggaagccgaccaccattgttgccaccgggaggaagatccacatctgcgaaacccttttcacccccaagtggcccagggaggtttcctgtgccttctccaggccacagaagtggtcccccagagcctcagaggaaccgaatgccgcccccaaggcccgacgtgggctcaaagcctgatagcattcctcctccagtacctagtactccaagacccattcaatcaagtctgcacaaccgggggtccccaccagtgcccggaggccccaggcagcccagccccgggcccactcctccccctttccctggaaaccgcggcactgctttgggaggaggctcaatacgtcagtcccccttgagctcctcctcgcccttctccaaccggcctcccctgccgcctacccccagcagggccttggatgacaaaccccctccaccacctcctccagtgggcaacaggccctccatccacagggaagcggttccccctcctcctcctcagaacaacaagcctccagtgccttccactccgcggccttcggcctcctcacaggccccacctccgccgccacctcccagcaggcccgggccgcctcctctgcctccaagttccagcggcaatgacgaaaccccaagactcccacagcggaatctgtccctcagttcgtccacgcccccgttaccttcgccaggacgttcaggtcctcttcctcccccgcccagtgagagacccccacctccagtgagggacccgccaggccgatcaggccccctcccaccacctcctccagtaagcagaaacggcagcacatctcgggccctgcctgctacccctcagttgccatccaggagtggagtagacagtcccaggagtggacccaggcctccccttcctcctgataggcccagtgctggggcacctcccccacctccaccatcaacatctattagaaatggcttccaagactctccatgtgaagatgagtgggaaagcagattctacttccatccgatttccgatttgccacctccagagccatatgtacaaacgaccaaaagttatcccagcaaactggcaagaaacgaaagccggagtggatccaaccgaagagaaaggggtgctccaccactccctcccatcccgaggtgatctttgcctgctcttctctacccaagctcaagagctgcttctgttgctatctaagaactgcataccctcctccctgcttcttcccttgtgcctcatgtatgggcaggaggaaaggtgggagggggagtgggaatatgcgtgtgtgggtgggaatcggtaagaaatgcacctagcttttcatattgtgtttattctccaggctattgcttgcttcagctgcagcctgcctgtgctggctgctggggtcgataggcttttgtcgtaataggcagagatgacttgcatcccagctttccaccaaccaaattcaaacattcactgcttatttgttacagactgtaattattaaagtccctgagagctgtt

SEQ ID NO: 278535 - DNA, 791 bp, Homo sapiens
gtatactctgtaactctaccagggaagggattgcctatgtgcctgattgattttttactctgccatttcaatttccctctatttcgtcatcagtcagaaggttggtgctgtttaaaggggaaaaaaaagctctaagtgtccccttctcccaaaaaaaggaaccagaaaatgacaagaagagttgcatttgtctatgaaagtgcatagaaagcttttcctggaaaagaataaactgggaaaagatgagtccttgaagtagaaccctgtcatagtgcaacaaactgaatttaagaggcatctgttcccagcttatacaacatccagtaccagttccacagccaacaatggatagatttggtcgtccttgaagcatttagagacctgtagaatgaacttaacttctgaaaactgggtgcggggccaatagaggggctgctcaatacctcaccagcctgctacgcggaaggctagatggagggctgctaaaggaagagaactgctgttccacctccgcctcctccctgcagtgtggcttcttagaaaaggagataccgctggccctccatattcacaagctctgcatctgtgggttcagccaactatggatcgaaatatgcaacttcaaattatcttcattcaggaaggagaaccctgagttcttctgggttggatctaagcatgtaagactattgagttacatttgacttctgaagtcactttttgtctttactttttagtcagcttgtgaaagcaaaaagcatcttatttttaaaatacctatgttagtaccc

SEQ ID NO: 278536 - DNA, 620 bp, Homo sapiens
cccgggcaggttagaagacagcaggggaactcgagaagttggttgttttcagcagattaaaacaatacaggaaccagaaaatgacaagaagagttgcatttgtctatgaaagtgcatagaaagcttttcctggaaaagaataaactgggaaaagatgagtccttgaagtagaaccctgtcatagtgcaacaaactgaatttaagaggcatctgttcccagcttatacaacatccagtaccagttccacagccaacaatggatagatttggtcgtccttgaagcatttagagacctgtagaatgaacttaacttctgaaaactgggtgcggggccaatagaggggctgctcaatacctcaccagcctgctacgcggaaggctagatggagggctgctaaaggaagagaactgctgttccacctccgcctcctccctgcagtgtggcttcttagaaaaggagataccgctggccctccatattcacaagctctgcatctgtgggttcagccaactatggatcgaaatatgcaacttcaaattatcttcattcaggaaggagaaccctgagttcttctgggttggatctaagcatggaagccagctaccgtgttaagagctgc

SEQ ID NO: 278537 - DNA, 152 bp, Homo sapiens
tcaagcttctaacgatgtacggggacatgcactatgtaaacagacacattttgctatctgtgtcatcaggatagtgtaagtggtagggtagagactaccctagacatctgcatctttgtaagttagccagacaataaagaaaagcagaatga

SEQ ID NO: 278538 - DNA, 4490 bp, Homo sapiens
cccgggcaggttagaagacagcaggggaactcgagaagttggttgttttcagcagattaaaacaatacagatttatcagcaagactgttgaacgcataactgcccaagatgcctgtccctccccctccagcacccccgccgcccccgacgtttgcactggccaatacagagaagcctaccttgaataagacagagcaggctgggagaaatgctctcctttctgatatcagcaaagggaagaaactaaagaagacggtcaccaatgacagaagtgcaccaatactggacaaacctaaaggagctggtgctggaggcggtggtggtggctttggtggaggcggcggatttggcggaggaggtggtggcggaggcggtggaagttttggagggggcggacctccaggtctgggaggattgttccaggctggaatgccgaagctgagatccacggccaacagggataatgattctggaggaagccgaccaccattgttgccaccgggaggaagatccacatctgcgaaacccttttcacccccaagtggcccagggaggtttcctgtgccttctccaggccacagaagtggtcccccagagcctcagaggaaccgaatgccgcccccaaggcccgacgtgggctcaaagcctgatagcattcctcctccagtacctagtactccaagacccattcaatcaagtctgcacaaccgggggtccccaccagtgcccggaggccccaggcagcccagccccgggcccactcctccccctttccctggaaaccgcggcactgctttgggaggaggctcaatacgtcagtcccccttgagctcctcctcgcccttctccaaccggcctcccctgccgcctacccccagcagggccttggatgacaaaccccctccaccacctcctccagtgggcaacaggccctccatccacagggaagcggttccccctcctcctcctcagaacaacaagcctccagtgccttccactccgcggccttcggcctcctcacaggccccacctccgccgccacctcccagcaggcccgggccgcctcctctgcctccaagttccagcggcaatgacgaaaccccaagactcccacagcggaatctgtccctcagttcgtccacgcccccgttaccttcgccaggacgttcaggtcctcttcctcccccgcccagtgagagacccccacctccagtgagggacccgccaggccgatcaggccccctcccaccacctcctccagtaagcagaaacggcagcacatctcgggccctgcctgctacccctcagttgccatccaggagtggagtagacagtcccaggagtggacccaggcctccccttcctcctgataggcccagtgctggggcacctcccccacctccaccatcaacatctattagaaatggcttccaagactctccatgtgaagatgagtgggaaagcagattctacttccatccgatttccgatttgccacctccagagccatatgtacaaacgaccaaaagttatcccagcaaactggcaagaaacgaaagccggagtggatccaaccgaagagaaaggggtgctccaccactccctcccatcccgaggtgatctttgcctgctcttctctacccaagctcaagagctgcttctgttgctatctaagaactgcataccctcctccctgcttcttcccttgtgcctcatgctattgcttgcttcagctgcagcctgcctgtgctggctgctggggtcgataggcttttgtcgtaataggcagagatgacttgcatcccagctttccaccaaccaaattcaaacattcactgcttatttgttacagactgtaattattaaagtccctgagagctgttttctcccgttcctttttcgcatgcttggcctcctctctgtttctatgaaccacagaccacctaagcaagctgctgagtaagggctcactggaaacttgcagtcacaggatgtccaatctttggcagtccgagcttggctctaggacagagctgtccaatagaaatataatgtgagccccatatacaatttttacatttctaatatattttaaacaagtgaagttaatatgcatccaaaatatttcaacctgtaatcaacataaaattttaatgagatattttatattattttttggtactgaatcttcaaaatccagagtgtattttacacttaccgcacatctccattcagactagtcacatttttaagtgctcagtagccacatgtggctggtggctactggattagacagcacgagtctggaagatggaagctagtgcagaaacctcttgtttaaaaaacaaaaaaggcaagatgggcttgagcgattcaagaggcaactaaaaataaaattaggacccagcaccttgtttgacacacagtttgaccttcgattttcctcccttaacttccctcttcccttaatatctgtatacaagtgttgcttcaaagtaccaaggtcagaaattgattcagtacggtttactaaagtcatgtggaataaagccattggaaacaaatggaaagcctgtcgggacttctgggctcagaaccagctggctcacgcactccacttgtcagctggacttctgccttgtgaaatggaagcagcctttgttcctttctggctgagcaagctcctgaggctgggagagactaggaaggcttggtaggaggggaaaaaagtcaggaaaagatatcaaatcagaaacatggaagaagaagggaaccgatttgagttggtgggcaaaactctaaaaatctaaatctgatgcttatgtaagggttgagcgaattagggagattgctagtggaaattggagggaatttgttttgcatcatttgtctaggatctatgcaaatatagctccactaaaggaccatagggaagagccagccttgccttttcttatatgattttgtttacaaaattttactgggacttttaaatctagctatagagttgggaaaaaatatttccacttagatattttacatggttttgtttaaaattaccattacttgttttttaaaaacacatgaccacatatgtatatgtatatctacctaaacattgtatcatggtttcagtatgttattcatgtattactgggagatgctaccaagaaaccaacccaaagaaaattctgaaaaatacatttctatttatagaataaatgtttcatttatataaaagcaaaagaacttagagttctaataaatgggatgtctaataaattatgaagttactgatttgaatatattatatttttataacttccttgccaaagtcctgatttagtacattagagaacctgtgtttcctctctcctctaccattcatctctcttccatacagtcatttgggctttttactcaaagagaatcaagaaataataagatataacaagcttggcaaagtgttggctttttaaaaaaaaatttttttaatctctagcagtttggtaatttagcagcatcatttatttgggattcttttatctgatttcaacagtgaaaaacatccctatgataaagcctaatgacccatttcacaaaagatggaatttgcccttcctagaaaatatgacggagaaaagtctgactcagagaaagtgagtctgaattttataaggggtagtaagaattggacaattcctttgcatatctgaacttggcaggtaccgttctaaatctgaaacagggtgatagctcaaagttgccattcatccagaatagattgttttagaatgtagtgtttaagtgactgtttcattaatacacctacaccctttctttgaaagtttgcaacctaattgcatctaaaactatgaataagttctgtggtaaaatcttaaactatggaaaattacaaaaatgaatttttcttccctgaaatcagagcttacatgtgtgtttttttataacattttcagataaatgtattcaacatgtaatacagtattttaacattcacctcttattttatattgaaatgtattacagtattaaaactcagtgttcagtatttatttcactatgcattttatttagtaaaagccaggagaaatgtttaatccaatggtgccttactttgtgatttaaaagaaatcaacttttttttatgtctaagtagtagattatttgcatatttgtaaaaactgttaggtctttatattttaaagtgtaataccagttttgttattttagtagcagaaatgggatgattgttaaagttccccaaaaatgttggcatgaaattaatttttccctccttatagtcaaggaccgtagaggaagaaaaacttttttttcatatcatgcactatgtaaacagacacattttgctatctgtgtcatcaggatagtgtaagtggtagggtagagactaccctagacatctgcatctttgtaagttagccagacaataaagaaaagcagaatga

SEQ ID NO: 278539 - DNA, 4728 bp, Homo sapiens
cacagaaggacgtctgcctctgactcagtatgtcacatttaacaagaggccagagcttgtccaaaatggctgtccaaaaacgaccccacacttgcgttagaagatgatacctttttcagggacagttttctctcttggctcctgtcccgctggccctctgtctgcctgtgtccctgaccatggctccctgcagtaccctttaacgatttatcagcaagactgttgaacgcataactgcccaagatgcctgtccctccccctccagcacccccgccgcccccgacgtttgcactggccaatacagagaagcctaccttgaataagacagagcaggctgggagaaatgctctcctttctgatatcagcaaagggaagaaactaaagaagacggtcaccaatgacagaagtgcaccaatactggacaaacctaaaggagctggtgctggaggcggtggtggtggctttggtggaggcggcggatttggcggaggaggtggtggcggaggcggtggaagttttggagggggcggacctccaggtctgggaggattgttccaggctggaatgccgaagctgagatccacggccaacagggataatgattctggaggaagccgaccaccattgttgccaccgggaggaagatccacatctgcgaaacccttttcacccccaagtggcccagggaggtttcctgtgccttctccaggccacagaagtggtcccccagagcctcagaggaaccgaatgccgcccccaaggcccgacgtgggctcaaagcctgatagcattcctcctccagtacctagtactccaagacccattcaatcaagtctgcacaaccgggggtccccaccagtgcccggaggccccaggcagcccagccccgggcccactcctccccctttccctggaaaccgcggcactgctttgggaggaggctcaatacgtcagtcccccttgagctcctcctcgcccttctccaaccggcctcccctgccgcctacccccagcagggccttggatgacaaaccccctccaccacctcctccagtgggcaacaggccctccatccacagggaagcggttccccctcctcctcctcagaacaacaagcctccagtgccttccactccgcggccttcggcctcctcacaggccccacctccgccgccacctcccagcaggcccgggccgcctcctctgcctccaagttccagcggcaatgacgaaaccccaagactcccacagcggaatctgtccctcagttcgtccacgcccccgttaccttcgccaggacgttcaggtcctcttcctcccccgcccagtgagagacccccacctccagtgagggacccgccaggccgatcaggccccctcccaccacctcctccagtaagcagaaacggcagcacatctcgggccctgcctgctacccctcagttgccatccaggagtggagtagacagtcccaggagtggacccaggcctccccttcctcctgataggcccagtgctggggcacctcccccacctccaccatcaacatctattagaaatggcttccaagactctccatgtgaagatgagtgggaaagcagattctacttccatccgatttccgatttgccacctccagagccatatgtacaaacgaccaaaagttatcccagcaaactggcaagaaacgaaagccggagtggatccaaccgaagagaaaggggtgctccaccactccctcccatcccgaggtgatctttgcctgctcttctctacccaagctcaagagctgcttctgttgctatctaagaactgcataccctcctccctgcttcttcccttgtgcctcatgtatgggcaggaggaaaggtgggagggggagtgggaatatgcgtgtgtgggtgggaatcggtaagaaatgcacctagcttttcatattgtgtttattctccaggctattgcttgcttcagctgcagcctgcctgtgctggctgctggggtcgataggcttttgtcgtaataggcagagatgacttgcatcccagctttccaccaaccaaattcaaacattcactgcttatttgttacagactgtaattattaaagtccctgagagctgttttctcccgttcctttttcgcatgcttggcctcctctctgtttctatgaaccacagaccacctaagcaagctgctgagtaagggctcactggaaacttgcagtcacaggatgtccaatctttggcagtccgagcttggctctaggacagagctgtccaatagaaatataatgtgagccccatatacaatttttacatttctaatatattttaaacaagtgaagttaatatgcatccaaaatatttcaacctgtaatcaacataaaattttaatgagatattttatattattttttggtactgaatcttcaaaatccagagtgtattttacacttaccgcacatctccattcagactagtcacatttttaagtgctcagtagccacatgtggctggtggctactggattagacagcacgagtctggaagatggaagctagtgcagaaacctcttgtttaaaaaacaaaaaaggcaagatgggcttgagcgattcaagaggcaactaaaaataaaattaggacccagcaccttgtttgacacacagtttgaccttcgattttcctcccttaacttccctcttcccttaatatctgtatacaagtgttgcttcaaagtaccaaggtcagaaattgattcagtacggtttactaaagtcatgtggaataaagccattggaaacaaatggaaagcctgtcgggacttctgggctcagaaccagctggctcacgcactccacttgtcagctggacttctgccttgtgaaatggaagcagcctttgttcctttctggctgagcaagctcctgaggctgggagagactaggaaggcttggtaggaggggaaaaaagtcaggaaaagatatcaaatcagaaacatggaagaagaagggaaccgatttgagttggtgggcaaaactctaaaaatctaaatctgatgcttatgtaagggttgagcgaattagggagattgctagtggaaattggagggaatttgttttgcatcatttgtctaggatctatgcaaatatagctccactaaaggaccatagggaagagccagccttgccttttcttatatgattttgtttacaaaattttactgggacttttaaatctagctatagagttgggaaaaaatatttccacttagatattttacatggttttgtttaaaattaccattacttgttttttaaaaacacatgaccacatatgtatatgtatatctacctaaacattgtatcatggtttcagtatgttattcatgtattactgggagatgctaccaagaaaccaacccaaagaaaattctgaaaaatacatttctatttatagaataaatgtttcatttatataaaagcaaaagaacttagagttctaataaatgggatgtctaataaattatgaagttactgatttgaatatattatatttttataacttccttgccaaagtcctgatttagtacattagagaacctgtgtttcctctctcctctaccattcatctctcttccatacagtcatttgggctttttactcaaagagaatcaagaaataataagatataacaagcttggcaaagtgttggctttttaaaaaaaaatttttttaatctctagcagtttggtaatttagcagcatcatttatttgggattcttttatctgatttcaacagtgaaaaacatccctatgataaagcctaatgacccatttcacaaaagatggaatttgcccttcctagaaaatatgacggagaaaagtctgactcagagaaagtgagtctgaattttataaggggtagtaagaattggacaattcctttgcatatctgaacttggcaggtaccgttctaaatctgaaacagggtgatagctcaaagttgccattcatccagaatagattgttttagaatgtagtgtttaagtgactgtttcattaatacacctacaccctttctttgaaagtttgcaacctaattgcatctaaaactatgaataagttctgtggtaaaatcttaaactatggaaaattacaaaaatgaatttttcttccctgaaatcagagcttacatgtgtgtttttttataacattttcagataaatgtattcaacatgtaatacagtattttaacattcacctcttattttatattgaaatgtattacagtattaaaactcagtgttcagtatttatttcactatgcattttatttagtaaaagccaggagaaatgtttaatccaatggtgccttactttgtgatttaaaagaaatcaacttttttttatgtctaagtagtagattatttgcatatttgtaaaaactgttaggtctttatattttaaagtgtaataccagttttgttattttagtagcagaaatgggatgattgttaaagttccccaaaaatgttggcatgaaattaatttttccctccttatagtcaaggaccgtagaggaagaaaaacttttttttcatatcatgcactatgtaaacagacacattttgctatctgtgtcatcaggatagtgtaagtggtagggtagagactaccctagacatctgcatctttgtaagttagccagacaataaagaaaagcagaatga

SEQ ID NO: 278540 - DNA, 4634 bp, Homo sapiens
ggagcgcttttcctgcccgcccggctcagccctgcggaccccgggagaagtttcccagaaaaaatgcccagcgcggcgcggggctgcggagtcgtccggagccgctgcgcgatttatcagcaagactgttgaacgcataactgcccaagatgcctgtccctccccctccagcacccccgccgcccccgacgtttgcactggccaatacagagaagcctaccttgaataagacagagcaggctgggagaaatgctctcctttctgatatcagcaaagggaagaaactaaagaagacggtcaccaatgacagaagtgcaccaatactggacaaacctaaaggagctggtgctggaggcggtggtggtggctttggtggaggcggcggatttggcggaggaggtggtggcggaggcggtggaagttttggagggggcggacctccaggtctgggaggattgttccaggctggaatgccgaagctgagatccacggccaacagggataatgattctggaggaagccgaccaccattgttgccaccgggaggaagatccacatctgcgaaacccttttcacccccaagtggcccagggaggtttcctgtgccttctccaggccacagaagtggtcccccagagcctcagaggaaccgaatgccgcccccaaggcccgacgtgggctcaaagcctgatagcattcctcctccagtacctagtactccaagacccattcaatcaagtctgcacaaccgggggtccccaccagtgcccggaggccccaggcagcccagccccgggcccactcctccccctttccctggaaaccgcggcactgctttgggaggaggctcaatacgtcagtcccccttgagctcctcctcgcccttctccaaccggcctcccctgccgcctacccccagcagggccttggatgacaaaccccctccaccacctcctccagtgggcaacaggccctccatccacagggaagcggttccccctcctcctcctcagaacaacaagcctccagtgccttccactccgcggccttcggcctcctcacaggccccacctccgccgccacctcccagcaggcccgggccgcctcctctgcctccaagttccagcggcaatgacgaaaccccaagactcccacagcggaatctgtccctcagttcgtccacgcccccgttaccttcgccaggacgttcaggtcctcttcctcccccgcccagtgagagacccccacctccagtgagggacccgccaggccgatcaggccccctcccaccacctcctccagtaagcagaaacggcagcacatctcgggccctgcctgctacccctcagttgccatccaggagtggagtagacagtcccaggagtggacccaggcctccccttcctcctgataggcccagtgctggggcacctcccccacctccaccatcaacatctattagaaatggcttccaagactctccatgtgaagatgagtgggaaagcagattctacttccatccgatttccgatttgccacctccagagccatatgtacaaacgaccaaaagttatcccagcaaactggcaagaaacgaaagccggagtggatccaaccgaagagaaaggggtgctccaccactccctcccatcccgaggtgatctttgcctgctcttctctacccaagctcaagagctgcttctgttgctatctaagaactgcataccctcctccctgcttcttcccttgtgcctcatgtatgggcaggaggaaaggtgggagggggagtgggaatatgcgtgtgtgggtgggaatcggtaagaaatgcacctagcttttcatattgtgtttattctccaggctattgcttgcttcagctgcagcctgcctgtgctggctgctggggtcgataggcttttgtcgtaataggcagagatgacttgcatcccagctttccaccaaccaaattcaaacattcactgcttatttgttacagactgtaattattaaagtccctgagagctgttttctcccgttcctttttcgcatgcttggcctcctctctgtttctatgaaccacagaccacctaagcaagctgctgagtaagggctcactggaaacttgcagtcacaggatgtccaatctttggcagtccgagcttggctctaggacagagctgtccaatagaaatataatgtgagccccatatacaatttttacatttctaatatattttaaacaagtgaagttaatatgcatccaaaatatttcaacctgtaatcaacataaaattttaatgagatattttatattattttttggtactgaatcttcaaaatccagagtgtattttacacttaccgcacatctccattcagactagtcacatttttaagtgctcagtagccacatgtggctggtggctactggattagacagcacgagtctggaagatggaagctagtgcagaaacctcttgtttaaaaaacaaaaaaggcaagatgggcttgagcgattcaagaggcaactaaaaataaaattaggacccagcaccttgtttgacacacagtttgaccttcgattttcctcccttaacttccctcttcccttaatatctgtatacaagtgttgcttcaaagtaccaaggtcagaaattgattcagtacggtttactaaagtcatgtggaataaagccattggaaacaaatggaaagcctgtcgggacttctgggctcagaaccagctggctcacgcactccacttgtcagctggacttctgccttgtgaaatggaagcagcctttgttcctttctggctgagcaagctcctgaggctgggagagactaggaaggcttggtaggaggggaaaaaagtcaggaaaagatatcaaatcagaaacatggaagaagaagggaaccgatttgagttggtgggcaaaactctaaaaatctaaatctgatgcttatgtaagggttgagcgaattagggagattgctagtggaaattggagggaatttgttttgcatcatttgtctaggatctatgcaaatatagctccactaaaggaccatagggaagagccagccttgccttttcttatatgattttgtttacaaaattttactgggacttttaaatctagctatagagttgggaaaaaatatttccacttagatattttacatggttttgtttaaaattaccattacttgttttttaaaaacacatgaccacatatgtatatgtatatctacctaaacattgtatcatggtttcagtatgttattcatgtattactgggagatgctaccaagaaaccaacccaaagaaaattctgaaaaatacatttctatttatagaataaatgtttcatttatataaaagcaaaagaacttagagttctaataaatgggatgtctaataaattatgaagttactgatttgaatatattatatttttataacttccttgccaaagtcctgatttagtacattagagaacctgtgtttcctctctcctctaccattcatctctcttccatacagtcatttgggctttttactcaaagagaatcaagaaataataagatataacaagcttggcaaagtgttggctttttaaaaaaaaatttttttaatctctagcagtttggtaatttagcagcatcatttatttgggattcttttatctgatttcaacagtgaaaaacatccctatgataaagcctaatgacccatttcacaaaagatggaatttgcccttcctagaaaatatgacggagaaaagtctgactcagagaaagtgagtctgaattttataaggggtagtaagaattggacaattcctttgcatatctgaacttggcaggtaccgttctaaatctgaaacagggtgatagctcaaagttgccattcatccagaatagattgttttagaatgtagtgtttaagtgactgtttcattaatacacctacaccctttctttgaaagtttgcaacctaattgcatctaaaactatgaataagttctgtggtaaaatcttaaactatggaaaattacaaaaatgaatttttcttccctgaaatcagagcttacatgtgtgtttttttataacattttcagataaatgtattcaacatgtaatacagtattttaacattcacctcttattttatattgaaatgtattacagtattaaaactcagtgttcagtatttatttcactatgcattttatttagtaaaagccaggagaaatgtttaatccaatggtgccttactttgtgatttaaaagaaatcaacttttttttatgtctaagtagtagattatttgcatatttgtaaaaactgttaggtctttatattttaaagtgtaataccagttttgttattttagtagcagaaatgggatgattgttaaagttccccaaaaatgttggcatgaaattaatttttccctccttatagtcaaggaccgtagaggaagaaaaacttttttttcatatcatgcactatgtaaacagacacattttgctatctgtgtcatcaggatagtgtaagtggtagggtagagactaccctagacatctgcatctttgtaagttagccagacaataaagaaaagcagaatga

SEQ ID NO: 278541 - DNA, 4462 bp, Homo sapiens
aatgacagaagtgcaccaatactggacaaacctaaaggaagctggtgctggaggcggtggtggtcgtcttctttagtttcttctcctttctgatatcagcaaagggaagaaactaaagaagacggtcaccaatgacagaagtgcaccaatactggacaaacctaaaggagctggtgctggaggcggtggtggtggctttggtggaggcggcggatttggcggaggaggtggtggcggaggcggtggaagttttggagggggcggacctccaggtctgggaggattgttccaggctggaatgccgaagctgagatccacggccaacagggataatgattctggaggaagccgaccaccattgttgccaccgggaggaagatccacatctgcgaaacccttttcacccccaagtggcccagggaggtttcctgtgccttctccaggccacagaagtggtcccccagagcctcagaggaaccgaatgccgcccccaaggcccgacgtgggctcaaagcctgatagcattcctcctccagtacctagtactccaagacccattcaatcaagtctgcacaaccgggggtccccaccagtgcccggaggccccaggcagcccagccccgggcccactcctccccctttccctggaaaccgcggcactgctttgggaggaggctcaatacgtcagtcccccttgagctcctcctcgcccttctccaaccggcctcccctgccgcctacccccagcagggccttggatgacaaaccccctccaccacctcctccagtgggcaacaggccctccatccacagggaagcggttccccctcctcctcctcagaacaacaagcctccagtgccttccactccgcggccttcggcctcctcacaggccccacctccgccgccacctcccagcaggcccgggccgcctcctctgcctccaagttccagcggcaatgacgaaaccccaagactcccacagcggaatctgtccctcagttcgtccacgcccccgttaccttcgccaggacgttcaggtcctcttcctcccccgcccagtgagagacccccacctccagtgagggacccgccaggccgatcaggccccctcccaccacctcctccagtaagcagaaacggcagcacatctcgggccctgcctgctacccctcagttgccatccaggagtggagtagacagtcccaggagtggacccaggcctccccttcctcctgataggcccagtgctggggcacctcccccacctccaccatcaacatctattagaaatggcttccaagactctccatgtgaagatgagtgggaaagcagattctacttccatccgatttccgatttgccacctccagagccatatgtacaaacgaccaaaagttatcccagcaaactggcaagaaacgaaagccggagtggatccaaccgaagagaaaggggtgctccaccactccctcccatcccgaggtgatctttgcctgctcttctctacccaagctcaagagctgcttctgttgctatctaagaactgcataccctcctccctgcttcttcccttgtgcctcatgtatgggcaggaggaaaggtgggagggggagtgggaatatgcgtgtgtgggtgggaatcggtaagaaatgcacctagcttttcatattgtgtttattctccaggctattgcttgcttcagctgcagcctgcctgtgctggctgctggggtcgataggcttttgtcgtaataggcagagatgacttgcatcccagctttccaccaaccaaattcaaacattcactgcttatttgttacagactgtaattattaaagtccctgagagctgttttctcccgttcctttttcgcatgcttggcctcctctctgtttctatgaaccacagaccacctaagcaagctgctgagtaagggctcactggaaacttgcagtcacaggatgtccaatctttggcagtccgagcttggctctaggacagagctgtccaatagaaatataatgtgagccccatatacaatttttacatttctaatatattttaaacaagtgaagttaatatgcatccaaaatatttcaacctgtaatcaacataaaattttaatgagatattttatattattttttggtactgaatcttcaaaatccagagtgtattttacacttaccgcacatctccattcagactagtcacatttttaagtgctcagtagccacatgtggctggtggctactggattagacagcacgagtctggaagatggaagctagtgcagaaacctcttgtttaaaaaacaaaaaaggcaagatgggcttgagcgattcaagaggcaactaaaaataaaattaggacccagcaccttgtttgacacacagtttgaccttcgattttcctcccttaacttccctcttcccttaatatctgtatacaagtgttgcttcaaagtaccaaggtcagaaattgattcagtacggtttactaaagtcatgtggaataaagccattggaaacaaatggaaagcctgtcgggacttctgggctcagaaccagctggctcacgcactccacttgtcagctggacttctgccttgtgaaatggaagcagcctttgttcctttctggctgagcaagctcctgaggctgggagagactaggaaggcttggtaggaggggaaaaaagtcaggaaaagatatcaaatcagaaacatggaagaagaagggaaccgatttgagttggtgggcaaaactctaaaaatctaaatctgatgcttatgtaagggttgagcgaattagggagattgctagtggaaattggagggaatttgttttgcatcatttgtctaggatctatgcaaatatagctccactaaaggaccatagggaagagccagccttgccttttcttatatgattttgtttacaaaattttactgggacttttaaatctagctatagagttgggaaaaaatatttccacttagatattttacatggttttgtttaaaattaccattacttgttttttaaaaacacatgaccacatatgtatatgtatatctacctaaacattgtatcatggtttcagtatgttattcatgtattactgggagatgctaccaagaaaccaacccaaagaaaattctgaaaaatacatttctatttatagaataaatgtttcatttatataaaagcaaaagaacttagagttctaataaatgggatgtctaataaattatgaagttactgatttgaatatattatatttttataacttccttgccaaagtcctgatttagtacattagagaacctgtgtttcctctctcctctaccattcatctctcttccatacagtcatttgggctttttactcaaagagaatcaagaaataataagatataacaagcttggcaaagtgttggctttttaaaaaaaaatttttttaatctctagcagtttggtaatttagcagcatcatttatttgggattcttttatctgatttcaacagtgaaaaacatccctatgataaagcctaatgacccatttcacaaaagatggaatttgcccttcctagaaaatatgacggagaaaagtctgactcagagaaagtgagtctgaattttataaggggtagtaagaattggacaattcctttgcatatctgaacttggcaggtaccgttctaaatctgaaacagggtgatagctcaaagttgccattcatccagaatagattgttttagaatgtagtgtttaagtgactgtttcattaatacacctacaccctttctttgaaagtttgcaacctaattgcatctaaaactatgaataagttctgtggtaaaatcttaaactatggaaaattacaaaaatgaatttttcttccctgaaatcagagcttacatgtgtgtttttttataacattttcagataaatgtattcaacatgtaatacagtattttaacattcacctcttattttatattgaaatgtattacagtattaaaactcagtgttcagtatttatttcactatgcattttatttagtaaaagccaggagaaatgtttaatccaatggtgccttactttgtgatttaaaagaaatcaacttttttttatgtctaagtagtagattatttgcatatttgtaaaaactgttaggtctttatattttaaagtgtaataccagttttgttattttagtagcagaaatgggatgattgttaaagttccccaaaaatgttggcatgaaattaatttttccctccttatagtcaaggaccgtagaggaagaaaaacttttttttcatatcatgcactatgtaaacagacacattttgctatctgtgtcatcaggatagtgtaagtggtagggtagagactaccctagacatctgcatctttgtaagttagccagacaataaagaaaagcagaatga

SEQ ID NO: 278542 - DNA, 4338 bp, Homo sapiens
cacgaggcaaaccccctccaccacctcctccagtgggcaacaggccctccatccacagggaagcggttccccctcctcctcctcagaacaacaagcctccagtgccttccactccgcggtggaagttttggagggggcggacctccaggtctgggaggattgttccaggctggaatgccgaagctgagatccacggccaacagggataatgattctggaggaagccgaccaccattgttgccaccgggaggaagatccacatctgcgaaacccttttcacccccaagtggcccagggaggtttcctgtgccttctccaggccacagaagtggtcccccagagcctcagaggaaccgaatgccgcccccaaggcccgacgtgggctcaaagcctgatagcattcctcctccagtacctagtactccaagacccattcaatcaagtctgcacaaccgggggtccccaccagtgcccggaggccccaggcagcccagccccgggcccactcctccccctttccctggaaaccgcggcactgctttgggaggaggctcaatacgtcagtcccccttgagctcctcctcgcccttctccaaccggcctcccctgccgcctacccccagcagggccttggatgacaaaccccctccaccacctcctccagtgggcaacaggccctccatccacagggaagcggttccccctcctcctcctcagaacaacaagcctccagtgccttccactccgcggccttcggcctcctcacaggccccacctccgccgccacctcccagcaggcccgggccgcctcctctgcctccaagttccagcggcaatgacgaaaccccaagactcccacagcggaatctgtccctcagttcgtccacgcccccgttaccttcgccaggacgttcaggtcctcttcctcccccgcccagtgagagacccccacctccagtgagggacccgccaggccgatcaggccccctcccaccacctcctccagtaagcagaaacggcagcacatctcgggccctgcctgctacccctcagttgccatccaggagtggagtagacagtcccaggagtggacccaggcctccccttcctcctgataggcccagtgctggggcacctcccccacctccaccatcaacatctattagaaatggcttccaagactctccatgtgaagatgagtgggaaagcagattctacttccatccgatttccgatttgccacctccagagccatatgtacaaacgaccaaaagttatcccagcaaactggcaagaaacgaaagccggagtggatccaaccgaagagaaaggggtgctccaccactccctcccatcccgaggtgatctttgcctgctcttctctacccaagctcaagagctgcttctgttgctatctaagaactgcataccctcctccctgcttcttcccttgtgcctcatgtatgggcaggaggaaaggtgggagggggagtgggaatatgcgtgtgtgggtgggaatcggtaagaaatgcacctagcttttcatattgtgtttattctccaggctattgcttgcttcagctgcagcctgcctgtgctggctgctggggtcgataggcttttgtcgtaataggcagagatgacttgcatcccagctttccaccaaccaaattcaaacattcactgcttatttgttacagactgtaattattaaagtccctgagagctgttttctcccgttcctttttcgcatgcttggcctcctctctgtttctatgaaccacagaccacctaagcaagctgctgagtaagggctcactggaaacttgcagtcacaggatgtccaatctttggcagtccgagcttggctctaggacagagctgtccaatagaaatataatgtgagccccatatacaatttttacatttctaatatattttaaacaagtgaagttaatatgcatccaaaatatttcaacctgtaatcaacataaaattttaatgagatattttatattattttttggtactgaatcttcaaaatccagagtgtattttacacttaccgcacatctccattcagactagtcacatttttaagtgctcagtagccacatgtggctggtggctactggattagacagcacgagtctggaagatggaagctagtgcagaaacctcttgtttaaaaaacaaaaaaggcaagatgggcttgagcgattcaagaggcaactaaaaataaaattaggacccagcaccttgtttgacacacagtttgaccttcgattttcctcccttaacttccctcttcccttaatatctgtatacaagtgttgcttcaaagtaccaaggtcagaaattgattcagtacggtttactaaagtcatgtggaataaagccattggaaacaaatggaaagcctgtcgggacttctgggctcagaaccagctggctcacgcactccacttgtcagctggacttctgccttgtgaaatggaagcagcctttgttcctttctggctgagcaagctcctgaggctgggagagactaggaaggcttggtaggaggggaaaaaagtcaggaaaagatatcaaatcagaaacatggaagaagaagggaaccgatttgagttggtgggcaaaactctaaaaatctaaatctgatgcttatgtaagggttgagcgaattagggagattgctagtggaaattggagggaatttgttttgcatcatttgtctaggatctatgcaaatatagctccactaaaggaccatagggaagagccagccttgccttttcttatatgattttgtttacaaaattttactgggacttttaaatctagctatagagttgggaaaaaatatttccacttagatattttacatggttttgtttaaaattaccattacttgttttttaaaaacacatgaccacatatgtatatgtatatctacctaaacattgtatcatggtttcagtatgttattcatgtattactgggagatgctaccaagaaaccaacccaaagaaaattctgaaaaatacatttctatttatagaataaatgtttcatttatataaaagcaaaagaacttagagttctaataaatgggatgtctaataaattatgaagttactgatttgaatatattatatttttataacttccttgccaaagtcctgatttagtacattagagaacctgtgtttcctctctcctctaccattcatctctcttccatacagtcatttgggctttttactcaaagagaatcaagaaataataagatataacaagcttggcaaagtgttggctttttaaaaaaaaatttttttaatctctagcagtttggtaatttagcagcatcatttatttgggattcttttatctgatttcaacagtgaaaaacatccctatgataaagcctaatgacccatttcacaaaagatggaatttgcccttcctagaaaatatgacggagaaaagtctgactcagagaaagtgagtctgaattttataaggggtagtaagaattggacaattcctttgcatatctgaacttggcaggtaccgttctaaatctgaaacagggtgatagctcaaagttgccattcatccagaatagattgttttagaatgtagtgtttaagtgactgtttcattaatacacctacaccctttctttgaaagtttgcaacctaattgcatctaaaactatgaataagttctgtggtaaaatcttaaactatggaaaattacaaaaatgaatttttcttccctgaaatcagagcttacatgtgtgtttttttataacattttcagataaatgtattcaacatgtaatacagtattttaacattcacctcttattttatattgaaatgtattacagtattaaaactcagtgttcagtatttatttcactatgcattttatttagtaaaagccaggagaaatgtttaatccaatggtgccttactttgtgatttaaaagaaatcaacttttttttatgtctaagtagtagattatttgcatatttgtaaaaactgttaggtctttatattttaaagtgtaataccagttttgttattttagtagcagaaatgggatgattgttaaagttccccaaaaatgttggcatgaaattaatttttccctccttatagtcaaggaccgtagaggaagaaaaacttttttttcatatcatgcactatgtaaacagacacattttgctatctgtgtcatcaggatagtgtaagtggtagggtagagactaccctagacatctgcatctttgtaagttagccagacaataaagaaaagcagaatga

SEQ ID NO: 278543 - DNA, 4055 bp, Homo sapiens
cagctaggaaaccaagttccatagggtaccagcttgctcagggtcaagattcacattagcatttatagccatggatgttgattagctgtttgtcactccctgtgtttatctgcctccccaaagaggaagaaccaagaagaaactcttactgctctcaggatgactggtatttggtttcctgatgccacttctgcctggaaacagatcatatacatcacagaaacatgcttctgtaattaacaacaaaactatgcatttaaagaactttgttcttctgaagacctaaaataatttcataactatcttattctttttaaaaaaattctttcatcatgtcacagtaattagttcaatagctctttaaaggattataaaatgtttttttaaatatacggttgtccgtgtaaacagattttcacctgttttcaatttcactgtgccatctccaatctgagtgctaattcaaagccaaaacacccatttagctatcagtatgcacttgttttgcatatacatgtgtacacatgtgcaatttttgtgtttctgtgtgtttactcatttctcagccaaatatcctagaaaatcaccctaattaaagggcatgtgtccagcaagtcctcatcagctgtacaccaatggtgaccacggtaatggaatgtggatgtaaggttctgcactaagtgtctttttttgctccaggccccctcccaccacctcctccagtaagcagaaacggcagcacatctcgggccctgcctgctacccctcagttgccatccaggagtggagtagacagtcccaggagtggacccaggcctccccttcctcctgataggcccagtgctggggcacctcccccacctccaccatcaacatctattagaaatggcttccaagactctccatgtgaagatgagtgggaaagcagattctacttccatccgatttccgatttgccacctccagagccatatgtacaaacgaccaaaagttatcccagcaaactggcaagaaacgaaagccggagtggatccaaccgaagagaaaggggtgctccaccactccctcccatcccgaggtgatctttgcctgctcttctctacccaagctcaagagctgcttctgttgctatctaagaactgcataccctcctccctgcttcttcccttgtgcctcatgtatgggcaggaggaaaggtgggagggggagtgggaatatgcgtgtgtgggtgggaatcggtaagaaatgcacctagcttttcatattgtgtttattctccaggctattgcttgcttcagctgcagcctgcctgtgctggctgctggggtcgataggcttttgtcgtaataggcagagatgacttgcatcccagctttccaccaaccaaattcaaacattcactgcttatttgttacagactgtaattattaaagtccctgagagctgttttctcccgttcctttttcgcatgcttggcctcctctctgtttctatgaaccacagaccacctaagcaagctgctgagtaagggctcactggaaacttgcagtcacaggatgtccaatctttggcagtccgagcttggctctaggacagagctgtccaatagaaatataatgtgagccccatatacaatttttacatttctaatatattttaaacaagtgaagttaatatgcatccaaaatatttcaacctgtaatcaacataaaattttaatgagatattttatattattttttggtactgaatcttcaaaatccagagtgtattttacacttaccgcacatctccattcagactagtcacatttttaagtgctcagtagccacatgtggctggtggctactggattagacagcacgagtctggaagatggaagctagtgcagaaacctcttgtttaaaaaacaaaaaaggcaagatgggcttgagcgattcaagaggcaactaaaaataaaattaggacccagcaccttgtttgacacacagtttgaccttcgattttcctcccttaacttccctcttcccttaatatctgtatacaagtgttgcttcaaagtaccaaggtcagaaattgattcagtacggtttactaaagtcatgtggaataaagccattggaaacaaatggaaagcctgtcgggacttctgggctcagaaccagctggctcacgcactccacttgtcagctggacttctgccttgtgaaatggaagcagcctttgttcctttctggctgagcaagctcctgaggctgggagagactaggaaggcttggtaggaggggaaaaaagtcaggaaaagatatcaaatcagaaacatggaagaagaagggaaccgatttgagttggtgggcaaaactctaaaaatctaaatctgatgcttatgtaagggttgagcgaattagggagattgctagtggaaattggagggaatttgttttgcatcatttgtctaggatctatgcaaatatagctccactaaaggaccatagggaagagccagccttgccttttcttatatgattttgtttacaaaattttactgggacttttaaatctagctatagagttgggaaaaaatatttccacttagatattttacatggttttgtttaaaattaccattacttgttttttaaaaacacatgaccacatatgtatatgtatatctacctaaacattgtatcatggtttcagtatgttattcatgtattactgggagatgctaccaagaaaccaacccaaagaaaattctgaaaaatacatttctatttatagaataaatgtttcatttatataaaagcaaaagaacttagagttctaataaatgggatgtctaataaattatgaagttactgatttgaatatattatatttttataacttccttgccaaagtcctgatttagtacattagagaacctgtgtttcctctctcctctaccattcatctctcttccatacagtcatttgggctttttactcaaagagaatcaagaaataataagatataacaagcttggcaaagtgttggctttttaaaaaaaaatttttttaatctctagcagtttggtaatttagcagcatcatttatttgggattcttttatctgatttcaacagtgaaaaacatccctatgataaagcctaatgacccatttcacaaaagatggaatttgcccttcctagaaaatatgacggagaaaagtctgactcagagaaagtgagtctgaattttataaggggtagtaagaattggacaattcctttgcatatctgaacttggcaggtaccgttctaaatctgaaacagggtgatagctcaaagttgccattcatccagaatagattgttttagaatgtagtgtttaagtgactgtttcattaatacacctacaccctttctttgaaagtttgcaacctaattgcatctaaaactatgaataagttctgtggtaaaatcttaaactatggaaaattacaaaaatgaatttttcttccctgaaatcagagcttacatgtgtgtttttttataacattttcagataaatgtattcaacatgtaatacagtattttaacattcacctcttattttatattgaaatgtattacagtattaaaactcagtgttcagtatttatttcactatgcattttatttagtaaaagccaggagaaatgtttaatccaatggtgccttactttgtgatttaaaagaaatcaacttttttttatgtctaagtagtagattatttgcatatttgtaaaaactgttaggtctttatattttaaagtgtaataccagttttgttattttagtagcagaaatgggatgattgttaaagttccccaaaaatgttggcatgaaattaatttttccctccttatagtcaaggaccgtagaggaagaaaaacttttttttcatatcatgcactatgtaaacagacacattttgctatctgtgtcatcaggatagtgtaagtggtagggtagagactaccctagacatctgcatctttgtaagttagccagacaataaagaaaagcagaatga

SEQ ID NO: 278544 - DNA, 4672 bp, Homo sapiens
cccgggcaggttagaagacagcaggggaactcgagaagttggttgttttcagcagattaaaacaatacagatttatcagcaagactgttgaacgcataactgcccaagatgcctgtccctccccctccagcacccccgccgcccccgacgtttgcactggccaatacagagaagcctaccttgaataagacagagcaggctgggagaaatgctctcctttctgatatcagcaaagggaagaaactaaagaagacggtcaccaatgacagaagtgcaccaatactggacaaacctaaaggagctggtgctggaggcggtggtggtggctttggtggaggcggcggatttggcggaggaggtggtggcggaggcggtggaagttttggagggggcggacctccaggtctgggaggattgttccaggctggaatgccgaagctgagatccacggccaacagggataatgattctggaggaagccgaccaccattgttgccaccgggaggaagatccacatctgcgaaacccttttcacccccaagtggcccagggaggtttcctgtgccttctccaggccacagaagtggtcccccagagcctcagaggaaccgaatgccgcccccaaggcccgacgtgggctcaaagcctgatagcattcctcctccagtacctagtactccaagacccattcaatcaagtctgcacaaccgggggtccccaccagtgcccggaggccccaggcagcccagccccgggcccactcctccccctttccctggaaaccgcggcactgctttgggaggaggctcaatacgtcagtcccccttgagctcctcctcgcccttctccaaccggcctcccctgccgcctacccccagcagggccttggatgacaaaccccctccaccacctcctccagtgggcaacaggccctccatccacagggaagcggttccccctcctcctcctcagaacaacaagcctccagtgccttccactccgcggccttcggcctcctcacaggccccacctccgccgccacctcccagcaggcccgggccgcctcctctgcctccaagttccagcggcaatgacgaaaccccaagactcccacagcggaatctgtccctcagttcgtccacgcccccgttaccttcgccaggacgttcaggtcctcttcctcccccgcccagtgagagacccccacctccagtgagggacccgccaggccgatcaggccccctcccaccacctcctccagtaagcagaaacggcagcacatctcgggccctgcctgctacccctcagttgccatccaggagtggagtagacagtcccaggagtggacccaggcctccccttcctcctgataggcccagtgctggggcacctcccccacctccaccatcaacatctattagaaatggcttccaagactctccatgtgaagatgagtgggaaagcagattctacttccatccgatttccgatttgccacctccagagccatatgtacaaacgaccaaaagttatcccagcaaactggcaagaaacgaaagccggagtggatccaaccgaagagaaaggggtgctccaccactccctcccatcccgaggtgatctttgcctgctcttctctacccaagctcaagagctgcttctgttgctatctaagaactgcataccctcctccctgcttcttcccttgtgcctcatgtatgggcaggaggaaaggtgggagggggagtgggaatatgcgtgtgtgggtgggaatcggtaagaaatgcacctagcttttcatattgtgtttattctccaggctattgcttgcttcagctgcagcctgcctgtgctggctgctggggtcgataggcttttgtcgtaataggcagagatgacttgcatcccagctttccaccaaccaaattcaaacattcactgcttatttgttacagactgtaattattaaagtccctgagagctgttttctcccgttcctttttcgcatgcttggcctcctctctgtttctatgaaccacagaccacctaagcaagctgctgagtaagggctcactggaaacttgcagtcacaggatgtccaatctttggcagtccgagcttggctctaggacagagctgtccaatagaaatataatgtgagccccatatacaatttttacatttctaatatattttaaacaagtgaagttaatatgcatccaaaatatttcaacctgtaatcaacataaaattttaatgagatattttatattattttttggtactgaatcttcaaaatccagagtgtattttacacttaccgcacatctccattcagactagtcacatttttaagtgctcagtagccacatgtggctggtggctactggattagacagcacgagtctggaagatggaagctagtgcagaaacctcttgtttaaaaaacaaaaaaggcaagatgggcttgagcgattcaagaggcaactaaaaataaaattaggacccagcaccttgtttgacacacagtttgaccttcgattttcctcccttaacttccctcttcccttaatatctgtatacaagtgttgcttcaaagtaccaaggtcagaaattgattcagtacggtttactaaagtcatgtggaataaagccattggaaacaaatggaaagcctgtcgggacttctgggctcagaaccagctggctcacgcactccacttgtcagctggacttctgccttgtgaaatggaagcagcctttgttcctttctggctgagcaagctcctgaggctgggagagactaggaaggcttggtaggaggggaaaaaagtcaggaaaagatatcaaatcagaaacatggaagaagaagggaaccgatttgagttggtgggcaaaactctaaaaatctaaatctgatgcttatgtaagggttgagcgaattagggagattgctagtggaaattggagggaatttgttttgcatcatttgtctaggatctatgcaaatatagctccactaaaggaccatagggaagagccagccttgccttttcttatatgattttgtttacaaaattttactgggacttttaaatctagctatagagttgggaaaaaatatttccacttagatattttacatggttttgtttaaaattaccattacttgttttttaaaaacacatgaccacatatgtatatgtatatctacctaaacattgtatcatggtttcagtatgttattcatgtattactgggagatgctaccaagaaaccaacccaaagaaaattctgaaaaatacatttctatttatagaataaatgtttcatttatataaaagcaaaagaacttagagttctaataaatgggatgtctaataaattatgaagttactgatttgaatatattatatttttataacttccttgccaaagtcctgatttagtacattagagaacctgtgtttcctctctcctctaccattcatctctcttccatacagtcatttgggctttttactcaaagagaatcaagaaataataagatataacaagcttggcaaagtgttggctttttaaaaaaaaatttttttaatctctagcagtttggtaatttagcagcatcatttatttgggattcttttatctgatttcaacagtgaaaaacatccctatgataaagcctaatgacccatttcacaaaagatggaatttgcccttcctagaaaatatgacggagaaaagtctgactcagagaaagtgagtctgaattttataaggggtagtaagaattggacaattcctttgcatatctgaacttggcaggtaccgttctaaatctgaaacagggtgatagctcaaagttgccattcatccagaatagattgttttagaatgtagtgtttaagtgactgtttcattaatacacctacaccctttctttgaaagtttgcaacctaattgcatctaaaactatgaataagttctgtggtaaaatcttaaactatggaaaattacaaaaatgaatttttcttccctgaaatcagagcttacatgtgtgtttttttataacattttcagataaatgtattcaacatgtaatacagtattttaacattcacctcttattttatattgaaatgtattacagtattaaaactcagtgttcagtatttatttcactatgcattttatttagtaaaagccaggagaaatgtttaatccaatggtgccttactttgtgatttaaaagaaatcaacttttttttatgtctaagtagtagattatttgcatatttgtaaaaactgttaggtctttatattttaaagtgtaataccagttttgttattttagtagcagaaatgggatgattgttaaagttccccaaaaatgttggcatgaaattaatttttccctccttatagtcaaggaccgtagaggaagaaaaacttttttttcatatcatgcactatgtaaacagacacattttgctatctgtgtcatcaggatagtgtaagtggtagggtagagactaccctagacatctgcatctttgtaagttagccagacaataaagaaaagcagaatgatatggtgtcaactggtggtttttcttttaagtattgtttatgtaaatataaacaaaaaaacaagtgtctgttttcggtt

SEQ ID NO: 278545 - DNA, 1762 bp, Homo sapiens
cccgggcaggttagaagacagcaggggaactcgagaagttggttgttttcagcagattaaaacaatacagatttatcagcaagactgttgaacgcataactgcccaagatgcctgtccctccccctccagcacccccgccgcccccgacgtttgcactggccaatacagagaagcctaccttgaataagacagagcaggctgggagaaatgctctcctttctgatatcagcaaagggaagaaactaaagaagacggtcaccaatgacagaagtgcaccaatactggacaaacctaaaggagctggtgctggaggcggtggtggtggctttggtggaggcggcggatttggcggaggaggtggtggcggaggcggtggaagttttggagggggcggacctccaggtctgggaggattgttccaggctggaatgccgaagctgagatccacggccaacagggataatgattctggaggaagccgaccaccattgttgccaccgggaggaagatccacatctgcgaaacccttttcacccccaagtggcccagggaggtttcctgtgccttctccaggccacagaagtggtcccccagagcctcagaggaaccgaatgccgcccccaaggcccgacgtgggctcaaagcctgatagcattcctcctccagtacctagtactccaagacccattcaatcaagtctgcacaaccgggggtccccaccagtgcccggaggccccaggcagcccagccccgggcccactcctccccctttccctggaaaccgcggcactgctttgggaggaggctcaatacgtcagtcccccttgagctcctcctcgcccttctccaaccggcctcccctgccgcctacccccagcagggccttggatgacaaaccccctccaccacctcctccagtgggcaacaggccctccatccacagggaagcggttccccctcctcctcctcagaacaacaagcctccagtgccttccactccgcggccttcggcctcctcacaggccccacctccgccgccacctcccagcaggcccgggccgcctcctctgcctccaagttccagcggcaatgacgaaaccccaagactcccacagcggaatctgtccctcagttcgtccacgcccccgttaccttcgccaggacgttcaggtcctcttcctcccccgcccagtgagagacccccacctccagtgagggacccgccaggccgatcaggccccctcccaccacctcctccagtaagcagaaacggcagcacatctcgggccctgcctgctacccctcagttgccatccaggagtggagtagacagtcccaggagtggacccaggcctccccttcctcctgataggcccagtgctggggcacctcccccacctccaccatcaacatctattagaaatggcttccaagactctccatgtgaagatgagtgggaaagcagattctacttccatccgatttccgatttgccacctccagagccatatgtacaaacgaccaaaagttatcccagcaaactggcaagaaacgaaagccggagtggatccaaccgaagagaaaggggtgctccaccactccctcccatcccgaggtgatctttgcctgctcttctctacccaagctcaagagctgcttctgttgctatctaagaactgcataccctcctccctgcttcttcccttgtgcctcatccagtaagcagaaacggcagcacatctcgggccctgcctgctaccc

SEQ ID NO: 278546 - DNA, 1686 bp, Homo sapiens
cacagaaggacgtctgcctctgactcagtatgtcacatttaacaagaggccagagcttgtccaaaatggctgtccaaaaacgaccccacacttgcgttagaagatgatacctttttcagggacagttttctctcttggctcctgtcccgctggccctctgtctgcctgtgtccctgaccatggctccctgcagtaccctttaacgatttatcagcaagactgttgaacgcataactgcccaagatgcctgtccctccccctccagcacccccgccgcccccgacgtttgcactggccaatacagagaagcctaccttgaataagacagagcaggctgggagaaatgctctcctttctgatatcagcaaagggaagaaactaaagaagacggtcaccaatgacagaagtgcaccaatactggacaaacctaaaggagctggtgctggaggcggtggtggtggctttggtggaggcggcggatttggcggaggaggtggtggcggaggcggtggaagttttggagggggcggacctccaggtctgggaggattgttccaggctggaatgccgaagctgagatccacggccaacagggataatgattctggaggaagccgaccaccattgttgccaccgggaggaagatccacatctgcgaaacccttttcacccccaagtggcccagggaggtttcctgtgccttctccaggccacagaagtggtcccccagagcctcagaggaaccgaatgccgcccccaaggcccgacgtgggctcaaagcctgatagcattcctcctccagtacctagtactccaagacccattcaatcaagtctgcacaaccgggggtccccaccagtgcccggaggccccaggcagcccagccccgggcccactcctcccccacctccagtgagggacccgccaggccgatcaggccccctcccaccacctcctccagtaagcagaaacggcagcacatctcgggccctgcctgctacccctcagttgccatccaggagtggagtagacagtcccaggagtggacccaggcctccccttcctcctgataggcccagtgctggggcacctcccccacctccaccatcaacatctattagaaatggcttccaagactctccatgtgaagatgagtgggaaagcagattctacttccatccgatttccgatttgccacctccagagccatatgtacaaacgaccaaaagttatcccagcaaactggcaagaaacgaaagccggagtggatccaaccgaagagaaaggggtgctccaccactccctcccatcccgaggtgatctttgcctgctcttctctacccaagctcaagagctgcttctgttgctatctaagaactgcataccctcctccctgcttcttcccttgtgcctcatgtatgggcaggaggaaaggtgggagggggagtgggaatatgcgtgtgtgggtgggaatcggtaagaaatgcacctagcttttcatattgtgtttattctccaggctattgcttgcttcagctgcagcctgcctgtgctggctgctggggtcgataggcttttgtcgtaataggcagagatgacttgcatcccagctttccaccaaccaaattcaaacattcactgcttatttgttacagactgtaattattaaagtccctgagagctgtt

SEQ ID NO: 278547 - DNA, 419 bp, Homo sapiens
atacatagctcgattccccttttggggtctttgctagtaaactgtaattctttcagtaagtcactgctttactgaatggtgaagatttggaatgtcttctttgatttccaggccaacaatggatagatttggtcgtccttgaagcatttagagacctgtagaatgaacttaacttctgaaaactgggtgcggggccaatagaggggctgctcaatacctcaccagcctgctacgcggaaggctagatggagggctgctaaaggaagagaactgctgttccacctccgcctcctccctgcagtgtggcttcttaggcaagtcccagtttagaagtcatctaactaagtgaacattcttgaactgccaccagacctctcctaaaacttttttctaagcaaagaccccaaaagggggatcct

SEQ ID NO: 278548 - DNA, 316 bp, Homo sapiens
tctgtgcctttcgttacgtaagtcttcatagcacattgtctgtcactgaagatactgcttgtttctcttcccagatgagtgggaaagcagattctacttccatccgatttccgatttgccacctccagagccatatgtacaaacgaccaaaagttatcccagcaaactggcaagaaacgaaagccggagtgagtatttctgccaaggtttttgaagattcacgcttgagtagcctgagtgacactcgggctatatagaaagtccaggcttcttgcctggagtggggtagagaaccctttggagccatctacattct

SEQ ID NO: 278549 - DNA, 1279 bp, Homo sapiens
  misc_feature (435)..(435): n is a, c, g, or t
  misc_feature (438)..(438): n is a, c, g, or t
  misc_feature (951)..(951): n is a, c, g, or t
  misc_feature (1279)..(1279): n is a, c, g, or t
cggacgcgtgggtcgacccacgcgtccggactcagtatgtcacatttaacaagaggccagagcttgtccaaaatggctgtccaaaaacgaccccacacttgcgttagaagatgatacctttttcagggacagttttctctcttggctcctgtcccgctggccctctgtctgcctgtgtccctgaccatggctccctgcagtaccctttaacgatttatcagcaagactgttgaacgcataactgcccaagatgcctgtccctccccctccagcacccccgccgcccccgacgtttgcactggccaatacagagaagcctaccttgaataagacagagcaggctgggagaaatgctctcctttctgatatcagcaaagggaagaaactaaagaagacggtcaccaatgacagaagtgcaccaatactggacaaacntanaggagctggtgctggaggcggggaggctggctccgccggcaggcagacggactaacggccgaaggacagtgagaaggcaggcagcaggtgacaacgataccgaagcgcgggacacacccatccaacaacagcaaaagatacgcaccacagcatagaaaagcccgaaagccacaaacaccacggcaccaaacaagggaactaaaggaatacatgagaaggaagacggaacacagcaaaagtgagacaacagcggagcgacgatcgaaactacagaaaaaccacaaaacaaccacacgaaagtggaaccaagagaacagaaaccagatgacacatacgaaaggcaaagagaaatacgaaaccagcaaaagacacacagacggaaacagagaagagaggaccacaaaaagtagaaagaaagagtagaccgcacagcagcagaaaaaaacaaacgacacaacacatagaaccaacgacaacccactagagcaagatagcaaaaaaggagacacacgnaaatcagaacagagagcacaagagacgcaaagcaagcagaagacaccccagccccgagaacaacacagacgcacgatcaccgcagggctacaaacagacccaagaagagaaaacgacacaagacccacagagaagacgcgaggagaaaacgaagcagagagcacaaaacgaaaaaacagaccagagcagagcaacacacacagaaccacagacaagcaccaacgacagacgaaaacgaggccaagaaacagcaagagacgaccaaccaaacacacaacacagcccaggacagcacggacacaacgaacagcagcacaaaaaacaaagn

SEQ ID NO: 278550 - DNA, 4593 bp, Homo sapiens
cccgggcaggttagaagacagcaggggaactcgagaagttggttgttttcagcagattaaaacaatacagatttatcagcaagactgttgaacgcataactgcccaagatgcctgtccctccccctccagcacccccgccgcccccgacgtttgcactggccaatacagagaagcctaccttgaataagacagagcaggctgggagaaatgctctcctttctgatatcagcaaagggaagaaactaaagaagacggtcaccaatgacagaagtgcaccaatactggacaaacctaaaggagctggtgctggaggcggtggtggtggctttggtggaggcggcggatttggcggaggaggtggtggcggaggcggtggaagttttggagggggcggacctccaggtctgggaggattgttccaggctggaatgccgaagctgagatccacggccaacagggataatgattctggaggaagccgaccaccattgttgccaccgggaggaagatccacatctgcgaaacccttttcacccccaagtggcccagggaggtttcctgtgccttctccaggccacagaagtggtcccccagagcctcagaggaaccgaatgccgcccccaaggcccgacgtgggctcaaagcctgatagcattcctcctccagtacctagtactccaagacccattcaatcaagtctgcacaaccgggggtccccaccagtgcccggaggccccaggcagcccagccccgggcccactcctccccctttccctggaaaccgcggcactgctttgggaggaggctcaatacgtcagtcccccttgagctcctcctcgcccttctccaaccggcctcccctgccgcctacccccagcagggccttggatgacaaaccccctccaccacctcctccagtgggcaacaggccctccatccacagggaagcggttccccctcctcctcctcagaacaacaagcctccagtgccttccactccgcggccttcggcctcctcacaggccccacctccgccgccacctcccagcaggcccgggccgcctcctctgcctccaagttccagcggcaatgacgaaaccccaagactcccacagcggaatctgtccctcagttcgtccacgcccccgttaccttcgccaggacgttcaggtcctcttcctcccccgcccagtgagagacccccacctccagtgagggacccgccaggccgatcaggccccctcccaccacctcctccagtaagcagaaacggcagcacatctcgggccctgcctgctacccctcagttgccatccaggagtggagtagacagtcccaggagtggacccaggcctccccttcctcctgataggcccagtgctggggcacctcccccacctccaccatcaacatctattagaaatggcttccaagactctccatgtgaagatgagtgggaaagcagattctacttccatccgatttccgatttgccacctccagagccatatgtacaaacgaccaaaagttatcccagcaaactggcaagaaacgaaagccggagtggatccaaccgaagagaaaggggtgctccaccactccctcccatcccgaggtgatctttgcctgctcttctctacccaagctcaagagctgcttctgttgctatctaagaactgcataccctcctccctgcttcttcccttgtgcctcatgtatgggcaggaggaaaggtgggagggggagtgggaatatgcgtgtgtgggtgggaatcggtaagaaatgcacctagcttttcatattgtgtttattctccaggctattgcttgcttcagctgcagcctgcctgtgctggctgctggggtcgataggcttttgtcgtaataggcagagatgacttgcatcccagctttccaccaaccaaattcaaacattcactgcttatttgttacagactgtaattattaaagtccctgagagctgttttctcccgttcctttttcgcatgcttggcctcctctctgtttctatgaaccacagaccacctaagcaagctgctgagtaagggctcactggaaacttgcagtcacaggatgtccaatctttggcagtccgagcttggctctaggacagagctgtccaatagaaatataatgtgagccccatatacaatttttacatttctaatatattttaaacaagtgaagttaatatgcatccaaaatatttcaacctgtaatcaacataaaattttaatgagatattttatattattttttggtactgaatcttcaaaatccagagtgtattttacacttaccgcacatctccattcagactagtcacatttttaagtgctcagtagccacatgtggctggtggctactggattagacagcacgagtctggaagatggaagctagtgcagaaacctcttgtttaaaaaacaaaaaaggcaagatgggcttgagcgattcaagaggcaactaaaaataaaattaggacccagcaccttgtttgacacacagtttgaccttcgattttcctcccttaacttccctcttcccttaatatctgtatacaagtgttgcttcaaagtaccaaggtcagaaattgattcagtacggtttactaaagtcatgtggaataaagccattggaaacaaatggaaagcctgtcgggacttctgggctcagaaccagctggctcacgcactccacttgtcagctggacttctgccttgtgaaatggaagcagcctttgttcctttctggctgagcaagctcctgaggctgggagagactaggaaggcttggtaggaggggaaaaaagtcaggaaaagatatcaaatcagaaacatggaagaagaagggaaccgatttgagttggtgggcaaaactctaaaaatctaaatctgatgcttatgtaagggttgagcgaattagggagattgctagtggaaattggagggaatttgttttgcatcatttgtctaggatctatgcaaatatagctccactaaaggaccatagggaagagccagccttgccttttcttatatgattttgtttacaaaattttactgggacttttaaatctagctatagagttgggaaaaaatatttccacttagatattttacatggttttgtttaaaattaccattacttgttttttaaaaacacatgaccacatatgtatatgtatatctacctaaacattgtatcatggtttcagtatgttattcatgtattactgggagatgctaccaagaaaccaacccaaagaaaattctgaaaaatacatttctatttatagaataaatgtttcatttatataaaagcaaaagaacttagagttctaataaatgggatgtctaataaattatgaagttactgatttgaatatattatatttttataacttccttgccaaagtcctgatttagtacattagagaacctgtgtttcctctctcctctaccattcatctctcttccatacagtcatttgggctttttactcaaagagaatcaagaaataataagatataacaagcttggcaaagtgttggctttttaaaaaaaaatttttttaatctctagcagtttggtaatttagcagcatcatttatttgggattcttttatctgatttcaacagtgaaaaacatccctatgataaagcctaatgacccatttcacaaaagatggaatttgcccttcctagaaaatatgacggagaaaagtctgactcagagaaagtgagtctgaattttataaggggtagtaagaattggacaattcctttgcatatctgaacttggcaggtaccgttctaaatctgaaacagggtgatagctcaaagttgccattcatccagaatagattgttttagaatgtagtgtttaagtgactgtttcattaatacacctacaccctttctttgaaagtttgcaacctaattgcatctaaaactatgaataagttctgtggtaaaatcttaaactatggaaaattacaaaaatgaatttttcttccctgaaatcagagcttacatgtgtgtttttttataacattttcagataaatgtattcaacatgtaatacagtattttaacattcacctcttattttatattgaaatgtattacagtattaaaactcagtgttcagtatttatttcactatgcattttatttagtaaaagccaggagaaatgtttaatccaatggtgccttactttgtgatttaaaagaaatcaacttttttttatgtctaagtagtagattatttgcatatttgtaaaaactgttaggtctttatattttaaagtgtaataccagttttgttattttagtagcagaaatgggatgattgttaaagttccccaaaaatgttggcatgaaattaatttttccctccttatagtcaaggaccgtagaggaagaaaaacttttttttcatatcatgcactatgtaaacagacacattttgctatctgtgtcatcaggatagtgtaagtggtagggtagagactaccctagacatctgcatctttgtaagttagccagacaataaagaaaagcagaatga

SEQ ID NO: 278551 - DNA, 4556 bp, Homo sapiens
gagaagaagcccttagcctaatgaagcgataagatttatcagcaagactgttgaacgcataactgcccaagatgcctgtccctccccctccagcacccccgccgcccccgacgtttgcactggccaatacagagaagcctaccttgaataagacagagcaggctgggagaaatgctctcctttctgatatcagcaaagggaagaaactaaagaagacggtcaccaatgacagaagtgcaccaatactggacaaacctaaaggagctggtgctggaggcggtggtggtggctttggtggaggcggcggatttggcggaggaggtggtggcggaggcggtggaagttttggagggggcggacctccaggtctgggaggattgttccaggctggaatgccgaagctgagatccacggccaacagggataatgattctggaggaagccgaccaccattgttgccaccgggaggaagatccacatctgcgaaacccttttcacccccaagtggcccagggaggtttcctgtgccttctccaggccacagaagtggtcccccagagcctcagaggaaccgaatgccgcccccaaggcccgacgtgggctcaaagcctgatagcattcctcctccagtacctagtactccaagacccattcaatcaagtctgcacaaccgggggtccccaccagtgcccggaggccccaggcagcccagccccgggcccactcctccccctttccctggaaaccgcggcactgctttgggaggaggctcaatacgtcagtcccccttgagctcctcctcgcccttctccaaccggcctcccctgccgcctacccccagcagggccttggatgacaaaccccctccaccacctcctccagtgggcaacaggccctccatccacagggaagcggttccccctcctcctcctcagaacaacaagcctccagtgccttccactccgcggccttcggcctcctcacaggccccacctccgccgccacctcccagcaggcccgggccgcctcctctgcctccaagttccagcggcaatgacgaaaccccaagactcccacagcggaatctgtccctcagttcgtccacgcccccgttaccttcgccaggacgttcaggtcctcttcctcccccgcccagtgagagacccccacctccagtgagggacccgccaggccgatcaggccccctcccaccacctcctccagtaagcagaaacggcagcacatctcgggccctgcctgctacccctcagttgccatccaggagtggagtagacagtcccaggagtggacccaggcctccccttcctcctgataggcccagtgctggggcacctcccccacctccaccatcaacatctattagaaatggcttccaagactctccatgtgaagatgagtgggaaagcagattctacttccatccgatttccgatttgccacctccagagccatatgtacaaacgaccaaaagttatcccagcaaactggcaagaaacgaaagccggagtggatccaaccgaagagaaaggggtgctccaccactccctcccatcccgaggtgatctttgcctgctcttctctacccaagctcaagagctgcttctgttgctatctaagaactgcataccctcctccctgcttcttcccttgtgcctcatgtatgggcaggaggaaaggtgggagggggagtgggaatatgcgtgtgtgggtgggaatcggtaagaaatgcacctagcttttcatattgtgtttattctccaggctattgcttgcttcagctgcagcctgcctgtgctggctgctggggtcgataggcttttgtcgtaataggcagagatgacttgcatcccagctttccaccaaccaaattcaaacattcactgcttatttgttacagactgtaattattaaagtccctgagagctgttttctcccgttcctttttcgcatgcttggcctcctctctgtttctatgaaccacagaccacctaagcaagctgctgagtaagggctcactggaaacttgcagtcacaggatgtccaatctttggcagtccgagcttggctctaggacagagctgtccaatagaaatataatgtgagccccatatacaatttttacatttctaatatattttaaacaagtgaagttaatatgcatccaaaatatttcaacctgtaatcaacataaaattttaatgagatattttatattattttttggtactgaatcttcaaaatccagagtgtattttacacttaccgcacatctccattcagactagtcacatttttaagtgctcagtagccacatgtggctggtggctactggattagacagcacgagtctggaagatggaagctagtgcagaaacctcttgtttaaaaaacaaaaaaggcaagatgggcttgagcgattcaagaggcaactaaaaataaaattaggacccagcaccttgtttgacacacagtttgaccttcgattttcctcccttaacttccctcttcccttaatatctgtatacaagtgttgcttcaaagtaccaaggtcagaaattgattcagtacggtttactaaagtcatgtggaataaagccattggaaacaaatggaaagcctgtcgggacttctgggctcagaaccagctggctcacgcactccacttgtcagctggacttctgccttgtgaaatggaagcagcctttgttcctttctggctgagcaagctcctgaggctgggagagactaggaaggcttggtaggaggggaaaaaagtcaggaaaagatatcaaatcagaaacatggaagaagaagggaaccgatttgagttggtgggcaaaactctaaaaatctaaatctgatgcttatgtaagggttgagcgaattagggagattgctagtggaaattggagggaatttgttttgcatcatttgtctaggatctatgcaaatatagctccactaaaggaccatagggaagagccagccttgccttttcttatatgattttgtttacaaaattttactgggacttttaaatctagctatagagttgggaaaaaatatttccacttagatattttacatggttttgtttaaaattaccattacttgttttttaaaaacacatgaccacatatgtatatgtatatctacctaaacattgtatcatggtttcagtatgttattcatgtattactgggagatgctaccaagaaaccaacccaaagaaaattctgaaaaatacatttctatttatagaataaatgtttcatttatataaaagcaaaagaacttagagttctaataaatgggatgtctaataaattatgaagttactgatttgaatatattatatttttataacttccttgccaaagtcctgatttagtacattagagaacctgtgtttcctctctcctctaccattcatctctcttccatacagtcatttgggctttttactcaaagagaatcaagaaataataagatataacaagcttggcaaagtgttggctttttaaaaaaaaatttttttaatctctagcagtttggtaatttagcagcatcatttatttgggattcttttatctgatttcaacagtgaaaaacatccctatgataaagcctaatgacccatttcacaaaagatggaatttgcccttcctagaaaatatgacggagaaaagtctgactcagagaaagtgagtctgaattttataaggggtagtaagaattggacaattcctttgcatatctgaacttggcaggtaccgttctaaatctgaaacagggtgatagctcaaagttgccattcatccagaatagattgttttagaatgtagtgtttaagtgactgtttcattaatacacctacaccctttctttgaaagtttgcaacctaattgcatctaaaactatgaataagttctgtggtaaaatcttaaactatggaaaattacaaaaatgaatttttcttccctgaaatcagagcttacatgtgtgtttttttataacattttcagataaatgtattcaacatgtaatacagtattttaacattcacctcttattttatattgaaatgtattacagtattaaaactcagtgttcagtatttatttcactatgcattttatttagtaaaagccaggagaaatgtttaatccaatggtgccttactttgtgatttaaaagaaatcaacttttttttatgtctaagtagtagattatttgcatatttgtaaaaactgttaggtctttatattttaaagtgtaataccagttttgttattttagtagcagaaatgggatgattgttaaagttccccaaaaatgttggcatgaaattaatttttccctccttatagtcaaggaccgtagaggaagaaaaacttttttttcatatcatgcactatgtaaacagacacattttgctatctgtgtcatcaggatagtgtaagtggtagggtagagactaccctagacatctgcatctttgtaagttagccagacaataaagaaaagcagaatga

SEQ ID NO: 278552 - DNA, 4823 bp, Homo sapiens
cccgggcaggttagaagacagcaggggaactcgagaagttggttgttttcagcagattaaaacaatacagatttatcagcaagactgttgaacgcataactgcccaagatgcctgtccctccccctccagcacccccgccgcccccgacgtttgcactggccaatacagagaagcctaccttgaataagacagagcaggctgggagaaatgctctcctttctgatatcagcaaagggaagaaactaaagaagacggtcaccaatgacagaagtgcaccaatactggacaaacctaaaggagctggtgctggaggcggtggtggtggctttggtggaggcggcggatttggcggaggaggtggtggcggaggcggtggaagttttggagggggcggacctccaggtctgggaggattgttccaggctggaatgccgaagctgagatccacggccaacagggataatgattctggaggaagccgaccaccattgttgccaccgggaggaagatccacatctgcgaaacccttttcacccccaagtggcccagggaggtttcctgtgccttctccaggccacagaagtggtcccccagagcctcagaggaaccgaatgccgcccccaaggcccgacgtgggctcaaagcctgatagcattcctcctccagtacctagtactccaagacccattcaatcaagtctgcacaaccgggggtccccaccagtgcccggaggccccaggcagcccagccccgggcccactcctccccctttccctggaaaccgcggcactgctttgggaggaggctcaatacgtcagtcccccttgagctcctcctcgcccttctccaaccggcctcccctgccgcctacccccagcagggccttggatgacaaaccccctccaccacctcctccagtgggcaacaggccctccatccacagggaagcggttccccctcctcctcctcagaacaacaagcctccagtgccttccactccgcggccttcggcctcctcacaggccccacctccgccgccacctcccagcaggcccgggccgcctcctctgcctccaagttccagcggcaatgacgaaaccccaagactcccacagcggaatctgtccctcagttcgtccacgcccccgttaccttcgccaggacgttcaggtcctcttcctcccccgcccagtgagagacccccacctccagtgagggacccgccaggccgatcaggccccctcccaccacctcctccagtaagcagaaacggcagcacatctcgggccctgcctgctacccctcagttgccatccaggagtggagtagacagtcccaggagtggacccaggcctccccttcctcctgataggcccagtgctggggcacctcccccacctccaccatcaacatctattagaaatggcttccaagactctccatgtgaagatgagtgggaaagcagattctacttccatccgatttccgatttgccacctccagagccatatgtacaaacgaccaaaagttatcccagcaaactggcaagaaacgaaagccggagtggatccaaccgaagagaaaggggtgctccaccactccctcccatcccgaggtgatctttgcctgctcttctctacccaagctcaagagctgcttctgttgctatctaagaactgcataccctcctccctgcttcttcccttgtgcctcatgtatgggcaggaggaaaggtgggagggggagtgggaatatgcgtgtgtgggtgggaatcggtaagaaatgcacctagcttttcatattgtgtttattctccaggctattgcttgcttcagctgcagcctgcctgtgctggctgctggggtcgataggcttttgtcgtaataggcagagatgacttgcatcccagctttccaccaaccaaattcaaacattcactgcttatttgttacagactgtaattattaaagtccctgagagctgttttctcccgttcctttttcgcatgcttggcctcctctctgtttctatgaaccacagaccacctaagcaagctgctgagtaagggctcactggaaacttgcagtcacaggatgtccaatctttggcagtccgagcttggctctaggacagagctgtccaatagaaatataatgtgagccccatatacaatttttacatttctaatatattttaaacaagtgaagttaatatgcatccaaaatatttcaacctgtaatcaacataaaattttaatgagatattttatattattttttggtactgaatcttcaaaatccagagtgtattttacacttaccgcacatctccattcagactagtcacatttttaagtgctcagtagccacatgtggctggtggctactggattagacagcacgagtctggaagatggaagctagtgcagaaacctcttgtttaaaaaacaaaaaaggcaagatgggcttgagcgattcaagaggcaactaaaaataaaattaggacccagcaccttgtttgacacacagtttgaccttcgattttcctcccttaacttccctcttcccttaatatctgtatacaagtgttgcttcaaagtaccaaggtcagaaattgattcagtacggtttactaaagtcatgtggaataaagccattggaaacaaatggaaagcctgtcgggacttctgggctcagaaccagctggctcacgcactccacttgtcagctggacttctgccttgtgaaatggaagcagcctttgttcctttctggctgagcaagctcctgaggctgggagagactaggaaggcttggtaggaggggaaaaaagtcaggaaaagatatcaaatcagaaacatggaagaagaagggaaccgatttgagttggtgggcaaaactctaaaaatctaaatctgatgcttatgtaagggttgagcgaattagggagattgctagtggaaattggagggaatttgttttgcatcatttgtctaggatctatgcaaatatagctccactaaaggaccatagggaagagccagccttgccttttcttatatgattttgtttacaaaattttactgggacttttaaatctagctatagagttgggaaaaaatatttccacttagatattttacatggttttgtttaaaattaccattacttgttttttaaaaacacatgaccacatatgtatatgtatatctacctaaacattgtatcatggtttcagtatgttattcatgtattactgggagatgctaccaagaaaccaacccaaagaaaattctgaaaaatacatttctatttatagaataaatgtttcatttatataaaagcaaaagaacttagagttctaataaatgggatgtctaataaattatgaagttactgatttgaatatattatatttttataacttccttgccaaagtcctgatttagtacattagagaacctgtgtttcctctctcctctaccattcatctctcttccatacagtcatttgggctttttactcaaagagaatcaagaaataataagatataacaagcttggcaaagtgttggctttttaaaaaaaaatttttttaatctctagcagtttggtaatttagcagcatcatttatttgggattcttttatctgatttcaacagtgaaaaacatccctatgataaagcctaatgacccatttcacaaaagatggaatttgcccttcctagaaaatatgacggagaaaagtctgactcagagaaagtgagtctgaattttataaggggtagtaagaattggacaattcctttgcatatctgaacttggcaggtaccgttctaaatctgaaacagggtgatagctcaaagttgccattcatccagaatagattgttttagaatgtagtgtttaagtgactgtttcattaatacacctacaccctttctttgaaagtttgcaacctaattgcatctaaaactatgaataagttctgtggtaaaatcttaaactatggaaaattacaaaaatgaatttttcttccctgaaatcagagcttacatgtgtgtttttttataacattttcagataaatgtattcaacatgtaatacagtattttaacattcacctcttattttatattgaaatgtattacagtattaaaactcagtgttcagtatttatttcactatgcattttatttagtaaaagccaggagaaatgtttaatccaatggtgccttactttgtgatttaaaagaaatcaacttttttttatgtctaagtagtagattatttgcatatttgtaaaaactgttaggtctttatattttaaagtgtaataccagttttgttattttagtagcagaaatgggatgattgttaaagttccccaaaaatgttggcatgaaattaatttttccctccttatagtcaaggaccgtagaggaagaaaaacttttttttcatatcatgcactatgtaaacagacacattttgctatctgtgtcatcaggatagtgtaagtggtagggtagagactaccctagacatctgcatctttgtaagttagccagacaataaagaaaagcagaatgaaaaaaaaaaacccatcgcaaaaacaaagggggggggcaaaaattcccggggggccagttacgcgcacccgtttttgtaacaagggggccaataggggcgataaaaaacaggcggggggttacaacgcggaggcaaacggcctgggtttggaagaccctcggtgggaaatgggccccccaaatacgcccggaacaaactggttatggtaacccatcggggaatgcggataa

SEQ ID NO: 278553 - DNA, 2608 bp, Homo sapiens
  misc_feature (1855)..(1855): n is a, c, g, or t
  misc_feature (1862)..(1863): n is a, c, g, or t
  misc_feature (2592)..(2592): n is a, c, g, or t
  misc_feature (2594)..(2594): n is a, c, g, or t
cacagaaggacgtctgcctctgactcagtatgtcacatttaacaagaggccagagcttgtccaaaatggctgtccaaaaacgaccccacacttgcgttagaagatgatacctttttcagggacagttttctctcttggctcctgtcccgctggccctctgtctgcctgtgtccctgaccatggctccctgcagtaccctttaacgatttatcagcaagactgttgaacgcataactgcccaagatgcctgtccctccccctccagcacccccgccgcccccgacgtttgcactggccaatacagagaagcctaccttgaataagacagagcaggctgggagaaatgctctcctttctgatatcagcaaagggaagaaactaaagaagacggtcaccaatgacagaagtgcaccaatactggacaaacctaaaggagctggtgctggaggcggtggtggtggctttggtggaggcggcggatttggcggaggaggtggtggcggaggcggtggaagttttggagggggcggacctccaggtctgggaggattgttccaggctggaatgccgaagctgagatccacggccaacagggataatgattctggaggaagccgaccaccattgttgccaccgggaggaagatccacatctgcgaaacccttttcacccccaagtggcccagggaggtttcctgtgccttctccaggccacagaagtggtcccccagagcctcagaggaaccgaatgccgcccccaaggcccgacgtgggctcaaagcctgatagcattcctcctccagtacctagtactccaagacccattcaatcaagtctgcacaaccgggggtccccaccagtgcccggaggccccaggcagcccagccccgggcccactcctccccctttccctggaaaccgcggcactgctttgggaggaggctcaatacgtcagtcccccttgagctcctcctcgcccttctccaaccggcctcccctgccgcctacccccagcagggccttggatgacaaaccccctccaccacctcctccagtgggcaacaggccctccatccacagggaagcggttccccctcctcctcctcagaacaacaagcctccagtgccttccactccgcggccttcggcctcctcacaggccccacctccgccgccacctcccagcaggcccgggccgcctcctctgcctccaagttccagcggcaatgacgaaaccccaagactcccacagcggaatctgtccctcagttcgtccacgcccccgttaccttcgccaggacgttcaggtcctcttcctcccccgcccagtgagagacccccacctccagtgagggacccgccaggccgatcaggccccctcccaccacctcctccagtaagcagaaacggcagcacatctcgggccctgcctgctacccctcagttgccatccaggagtggagtagacagtcccaggagtggacccaggcctccccttcctcctgataggcccagtgctggggcacctcccccacctccaccatcaacatctattagaaatggcttccaagactctccatgtgaagatgagtgggaaagcagattctacttccatccgatttccgatttgccacctccagagccatatgtacaaacgaccaaaagttatcccagcaaactggcaagaaacgaaagccggagtgagtatttctgccaaggtttttgaagattcacgcttgagtagcctgagtgacactcgggctatatagaaagtccaggcttcttgcctggagtggggtagagaaccctttggagccatctacattctagtaaattccccttccacaggcagtgangaaattnnagatgcccagaatgcatatgagaaacagttattttaatgtgtcattacaagctcaaaataccgtggtttgctagtattaaattttattattttacttctttggacgtcttcctctgttttcatcttcctgagacagcacaagtagagccatcttctattccttctagttttgaaattggcataatgtctgattaattataacaaaaactccctttaactgccttgatcttttaaacgtattgtaatcatagctttacagagcattacatgaaaatgtaaatatatccataatctctccacataatagatattttcattttaccagattctcatccaattttttatccatataattctgtttttttatgtagttataatgacgatgtacagttttttggcggggtttacataacattgcttagtaaatagtgcccatgttatcacatggtttttatttcagcatatagtaatttaccattaccatggacatttaaattatttctgttgttctgctaatgtaggtaatgctaccataaagaactaaattgcttttcctccattgaagaagaatgtcaacaagaaaggaaaaatagacaaactggaattttataacagtaaatgtataggaagtgttacagctctttgagaatttgtctagcaggctttccagggttttgctggaaagcctctgaaatttacttttaaaaaaacacaatagctgggcatggngnctcacgcctgtaat

SEQ ID NO: 278554 - DNA, 1885 bp, Homo sapiens
cacagaaggacgtctgcctctgactcagtatgtcacatttaacaagaggccagagcttgtccaaaatggctgtccaaaaacgaccccacacttgcgttagaagatgatacctttttcagggacagttttctctcttggctcctgtcccgctggccctctgtctgcctgtgtccctgaccatggctccctgcagtaccctttaacgatttatcagcaagactgttgaacgcataactgcccaagatgcctgtccctccccctccagcacccccgccgcccccgacgtttgcactggccaatacagagaagcctaccttgaataagacagagcaggctgggagaaatgctctcctttctgatatcagcaaagggaagaaactaaagaagacggtcaccaatgacagaagtgcaccaatactggacaaacctaaaggagctggtgctggaggcggtggtggtggctttggtggaggcggcggatttggcggaggaggtggtggcggaggcggtggaagttttggagggggcggacctccaggtctgggaggattgttccaggctggaatgccgaagctgagatccacggccaacagggataatgattctggaggaagccgaccaccattgttgccaccgggaggaagatccacatctgcgaaacccttttcacccccaagtggcccagggaggtttcctgtgccttctccaggccacagaagtggtcccccagagcctcagaggaaccgaatgccgcccccaaggcccgacgtgggctcaaagcctgatagcattcctcctccagtacctagtactccaagacccattcaatcaagtctgcacaaccgggggtccccaccagtgcccggaggccccaggcagcccagccccgggcccactcctccccctttccctggaaaccgcggcactgctttgggaggaggctcaatacgtcagtcccccttgagctcctcctcgcccttctccaaccggcctcccctgccgcctacccccagcagggccttggatgacaaaccccctccaccacctcctccagtgggcaacaggccctccatccacagggaagcggttccccctcctcctcctcagaacaacaagcctccagtgccttccactccgcggccttcggcctcctcacaggccccacctccgccgccacctcccagcaggcccgggccgcctcctctgcctccaagttccagcggcaatgacgaaaccccaagactcccacagcggaatctgtccctcagttcgtccacgcccccgttaccttcgccaggacgttcaggtcctcttcctcccccgcccagtgagagacccccacctccagtgagggacccgccaggccgatcaggtatgacaagacgtggagtgagttgcttccaaaacccagcctgcccaaatgtaccaataatcctgtcagtcaagatagtctaacaaaagcaggcataagtaaactcagactgctttgtgcttttaagtggcacacgacacgtgtgatcgtgacctcgtgtaaaccccgggggaaagtgggaccaatatttctgttggtgttttagagatgaggacactgagtagctaataaagttaaatggtcacgagctagttaataaagaagaggcaagaactttcatcttccatctctgaagtgtacttgccagtccactaccctgcctccctagagagaatttcggcggtcttaattgggaaaataagtccccacctcccgcaggagggctctgttattccaacaagaggggaagttcttcaagagctaatgaacttctcctgtacttctctcttcattcgccaggctttgaggccatttccctattcattaaagactaatgtttaaaaagtcaaattt

SEQ ID NO: 278555 - DNA, 1272 bp, Homo sapiens
  misc_feature (428)..(428): n is a, c, g, or t
  misc_feature (431)..(431): n is a, c, g, or t
  misc_feature (944)..(944): n is a, c, g, or t
  misc_feature (1272)..(1272): n is a, c, g, or t
cacagaaggacgtctgcctctgactcagtatgtcacatttaacaagaggccagagcttgtccaaaatggctgtccaaaaacgaccccacacttgcgttagaagatgatacctttttcagggacagttttctctcttggctcctgtcccgctggccctctgtctgcctgtgtccctgaccatggctccctgcagtaccctttaacgatttatcagcaagactgttgaacgcataactgcccaagatgcctgtccctccccctccagcacccccgccgcccccgacgtttgcactggccaatacagagaagcctaccttgaataagacagagcaggctgggagaaatgctctcctttctgatatcagcaaagggaagaaactaaagaagacggtcaccaatgacagaagtgcaccaatactggacaaacntanaggagctggtgctggaggcggggaggctggctccgccggcaggcagacggactaacggccgaaggacagtgagaaggcaggcagcaggtgacaacgataccgaagcgcgggacacacccatccaacaacagcaaaagatacgcaccacagcatagaaaagcccgaaagccacaaacaccacggcaccaaacaagggaactaaaggaatacatgagaaggaagacggaacacagcaaaagtgagacaacagcggagcgacgatcgaaactacagaaaaaccacaaaacaaccacacgaaagtggaaccaagagaacagaaaccagatgacacatacgaaaggcaaagagaaatacgaaaccagcaaaagacacacagacggaaacagagaagagaggaccacaaaaagtagaaagaaagagtagaccgcacagcagcagaaaaaaacaaacgacacaacacatagaaccaacgacaacccactagagcaagatagcaaaaaaggagacacacgnaaatcagaacagagagcacaagagacgcaaagcaagcagaagacaccccagccccgagaacaacacagacgcacgatcaccgcagggctacaaacagacccaagaagagaaaacgacacaagacccacagagaagacgcgaggagaaaacgaagcagagagcacaaaacgaaaaaacagaccagagcagagcaacacacacagaaccacagacaagcaccaacgacagacgaaaacgaggccaagaaacagcaagagacgaccaaccaaacacacaacacagcccaggacagcacggacacaacgaacagcagcacaaaaaacaaagn

SEQ ID NO: 278556 - DNA, 422 bp, Homo sapiens
aacttaggctaggtacgaggctcggtgtcaagtggctcctgtaaggcagcaaggtagcgtggccggcgcccgagctggggttgtgtccctgctgggctgccgttccagctggactgccgccatggaactcagcgccgaatacctccgcgagaagctgcagcgggacctggaggcggagcatgtggaggtggaggacacgaccctcaaccgttgctcctgtagcttccgagtcctggtggtgtcggccaagttcgaggggaaaccgctgcttcagagacacaggctggtgaacgcgtgcctagcagaagagctcccgcacatccatgcctttgaacagaaaaccctgaccccagaccagtgggcacgtgagcgacagaaatgagggactgggatctgcacagccattaaattataaatctgga

SEQ ID NO: 278557 - DNA, 548 bp, Homo sapiens
aagcagtggtaacaacgcagagtacgcgggaagcagtggtaacaacgcagagtacgcgggaagcagtggtaacaacgcagagtacgcgggaagcagtggtaacaacgcagagtacgcggaaagcagtggtaacaacgcagagtacgcggggccagaagtggctcctgtaaggcagcaaggtagcgtggccggcgcccgagctggggttgtgtccctgctgggctgccgttccagctggactgccgccatggaactcagcgccgaatacctccgcgagaagctgcagcgggacctggaggcggagcatgtggaggtggaggacacgaccctcaaccgttgctcctgtagcttccgagtcctggtggtgtcggccaagttcgaggggaaaccgctgcttcagagacacaggctggtgaacgcgtgcctagcagaagagctcccgcacatccatgcctttgaacagaaaaccctgaccccagaccagtgggcacgtgagcgacagaaatgagggactgggatctgcacagccattaaattataaatctgga

SEQ ID NO: 278558 - DNA, 372 bp, Homo sapiens
actagtaatactactagtgaattcactagtaatattactagtgaattcactagtaatctgagttgagccgccggacaaggggaaaagagctcggggggcgggttcggcaccattcatattcttccgctcggtaggaggtggaggacacgaccctcaaccgttgctcctgtagcttccgagtcctggtggtgtcggccaagttcgaggggaaaccgctgcttcagagacacaggctggtgaacgcgtgcctagcagaagagctcccgcacatccatgcctttgaacagaaaaccctgaccccagaccagtgggcacgtgagcgacagaaatgagggactgggatctgcacagccattaaattataaatctgga

SEQ ID NO: 278559 - DNA, 445 bp, Homo sapiens
  misc_feature (147)..(147): n is a, c, g, or t
tgtagttaagtttgacctcaattgactacaaagtttgtagttaaatttgactacaattggaaatgccaaaaactcactaataggggtgagtctttaattgtaatgactttgttttatccacattacatatttatgtatttcactgtnatgtcaacatgtctgcagaatcactgtatgtaacaaacagccatatttaagacatgcctggataaataaaattggtaggaatgttttcttgccattatatttaacttttcttctttttccttgacaaatcttgataagtttttttatattagttttattttctagaaaatgtcttatgaatttctcctatttgctctagcatgcttacagaaaatgtcagtgtttcttacagctcaaatttgtatagttgttttaaaatgcggtctctttcttcttcccctggtacttttttctttct

SEQ ID NO: 278560 - DNA, 481 bp, Homo sapiens
gggaagcttctctattaccctccttaccaccacagctccagccaagcttggagtgatctgcaaacccaatatgtgagtttagtgtatagaaaacacatgaatgaaaggcaaaaggggccaacattggtatttgggtttttttttttttgagctgtcactaggctcctgaccttccctctgaactccaccctgcagggcaggccaacagacaagctttctttctttctttttcttttttttatatgagatggagactcgctctctcgcccaggctgcaatgcagtagcacgatctccgctcactgtaacctccccctcctgggttcaagcgattcttctgcctcagcctcccgagtagctgggattacaggaggctgaggcaagagaatcacttgaacccaggaggcggaggtttcagtgagcccagatcacaccactgcactccagcctgggcaacagagtgagactctgtctcaaaaaaa

SEQ ID NO: 278561 - DNA, 467 bp, Homo sapiens
gggaagcttctctattaccctccttaccaccacagctccagccaagcttggagtgatctgcaaacccaatatgtgagtttagtgtatagaaaacacatgaatgaaaggcaaaaggggccaacattggtatttgggtttttttttttttgagctgtcactaggctcctgaccttccctctgaactccaccctgcagggcaggccaacagacaagctttctttctttctttttcttttttttatatgagatggagactcgctctctcgcccaggctgcaatgcagtagcacgatctccgctcactgtaacctccccctcctgggttcaagcgaaaaattagacaaaatcttaagtagtaatttagaaaatagaatgaatattaagaaaaaaaaagaaatagatattgaagaaaagtaaaagaaaagaaaaaaagaaatggaaaaaattaaaaaaaaaaagtatagatat

SEQ ID NO: 278562 - DNA, 4007 bp, Homo sapiens
  misc_feature (40)..(40): n is a, c, g, or t
  misc_feature (3709)..(3709): n is a, c, g, or t
aaaggctaggtaggaggctggggtgaattcggccgagggncggtccttctcaacaggcctgtgccccgcggggtcgcctcctctgggacgccttcctcccggcacagaaggcctccccctctcaccaggccctcgcccgctggtccgccaggccccgccttttttgcggcccccattgtgctgctggacccgacgagcagtgttgacagtgaaccccacgtagacgcggccccggtaccgggggttcaggcagtagagcaggtagacgccgaaaaagcgccctggcctcgccgcgacccccgcgggacccatcgggccttggggttcgggaaccacagcagggggttgattgccgtgacctagggtccagggagggctggatcgctagggctgcagggtgcttgcttcggaacaagctctcggggactatccggaggcagcctgcaggaagccgtagcgccggtacgtgcccctctcctgtctggaggcgggtgtagaagtccgaccgcggaagccagactgctgtccagtcggcgagcgcgtaccattcagcatcggctccgcccgagtcccaccttcctcaggctctgattggctgacacatggcaagcgcgaaaagcctggaccgctggaaagcccggctgcttgagggcggaagtactgcgttgacgtacgccttagtaagggcggaagtgagttttccagcggaagtggctcctgtaaggcagcaaggtagcgtggccggcgcccgagctggggttgtgtccctgctgggctgccgttccagctggactgccgccatggaactcagcgccgaatacctccgcgagaagctgcagcgggacctggaggcggagcatgtggaggtggaggacacgaccctcaaccgttgctcctgtagcttccgagtcctggtggtgtcggccaagttcgaggggaaaccgctgcttcagagacacaggtaaggccctgggagcaccttgcctagctcctgtaccacaaccccagccactccccctacccctgcaacctgactcccgcactccccctggcgtggctcagggaccttgaggatcccgccttcgtgacccctgcttcgagtatttcgatgtagaccctctctccaagtacgtgttcccacggcctggggactacaaccttggggacaccagtctcttgggtcaccctagcctcggggtgtgcgatcaccgctggccttttcctaaccccatctctcgccccaggctggtgaacgcgtgcctagcagaagagctcccgcacatccatgcctttgaacagaaaaccctgaccccagaccagtgggcacgtgagcgacagaaatgagggactgggatctgcacagccattaaattataaatctggaccagcttctgtgtcgatgtgtgtgtgggaggggtgctgaggccgagtctaggacctggcctctccctgccctgcctccgtccattgttttaccttggacacgtctctgtccccatctaggcctctatccctgcttgtaaaatgaaagttctaccgtaaaagtcccttccagggtctaccgagaaagccttctctctgcaactccgtttagacatctaggagtctgtactgccaccacctacccacctcctagagagctcagggttcctcctctctgctagccttcaagatgcagagatgagaaagtgatcggggtttcagggccctgaccagttgaacaaacctctccctgacattaccgcagtatcagaggcaccatatagaattccacatattccttgcaggttccccccggccttctcaggcccaagagggagtggtgcccaggtaggggctcatcaactcctggaatgctgatgttttcagacccactggagaaggttccagtggccccatagccctgggcttaatgtgtctacagctgcccccggaggaccatggaggttttaagaatagtgggtgtgggacggggataggggtgagattagagtaggaatataaggctgacctgagtcagaaaattggggcaggtgatgcccctgtatcagtcttcataacaggttagtagggttgctaggaccttgtttgttttatttgttttttgttgtttgagacagggtcttgctctgtcgcccaggctggagtgccgtggcgccatctcagctcattgcaacctctgcctcccaggttcaaaagattcttgtgcttcagcctcctgagtagctgggattacaggggtgcaccaccatgcccggctaatttttgtacttttagtagagacagggtttcaccatgttggccaggccagtctcaaactcctggcctcaagtgatctgcccgccttggtctcctaaagtgctggaattttaggcgtgagccattgtacctggcccagattgctaggactttgaacagaggtccctgagacctagggagggagcccaaataacctagttggggccagggctcgttgagagtgagaaattgcaagtttcagccatcacacactcttttcctgcgttttttgtttgtttgtttgtttgttttgagacagagtcttggctctgttgcccaggctggagtgcagtagcatgatcttggctcactacaacttccccctcccgggttcaagcgattctcctgcctcagcctccctagtagctgggattacaggcacacgccaccatgcccagctaatttttggggtttttttattgtttgtttgtttgtctgtttttgagacagagtttcactcttgttgcccaggctggagtgcaatggcacgatctcggctcaccacaacctccgcctcctgggttcaagcgattctcttgtctcagcctcccaagtagctgggattacagagagacggtatctcgccgtgttgctcaggcaggtctcaaactcctgggctcaaatgatcctgccgcctcagcctcccacagtgctgggattatagacgtgagtccccatgcccagcctccctcgttatttttatctttggacctgcagtttaaaagatgcctaccctgttctgtacagagtaatgagatgtgtgacggctgcaaaccaggtgtttttttctgaggctgtgttgacagctgctaatgagtgtgttggtgttttgctcggcagcttggatcctagcatgactatacattgtgacatggtcattacatatggattagaccaactggagaattgccagacttgtggtaccgattatatcatctcagtcttgaatttactcacgctgattgttgaacagataaatacgaaactgccatcatcatttgtagaaaaactgtttataccatcatctaaactactattcttgcgttatcataaagaaaaagaggttgttgctgtagcccatgctgtttatcaagcaatgctcagcttgaagaatattcctgttttggagactgcctataagttaatattgggagaaatgacttgtgccctaaacaacctcctgcacagtctgcaacttcctgaggcctgttctgaaataaaacatgaggcttttaagaatcatgtgttcaatgtagacaatgcaaaatttgtagttaaatttgacctcagtgccctgactacaattggaaatgccaaaaactcactaataggggtgagtctttaattgtaatgactttgttttatccacagttaagccttttctcattacatatttatgtatttcactgtnatgtcaacatgtctgcagaatcactgtatgtaacaaacagccatatttaagacatgcctggataaataaaattggtaggaatgttttcttgccattatatttaacttttcttctttttccttgacaaatcttgataagtttttttatattagttttattttctagaaaatgtcttatgaatttctcctatttgctctagcatgcttacagaaaatgtcagtgtttcttacagctcaaatttgtatagttgttttaaaatgcggtctctttcttcttcccctggtacttttttctttct

SEQ ID NO: 278563 - DNA, 1101 bp, Homo sapiens
  misc_feature (40)..(40): n is a, c, g, or t
aaaggctaggtaggaggctggggtgaattcggccgagggncggtccttctcaacaggcctgtgccccgcggggtcgcctcctctgggacgccttcctcccggcacagaaggcctccccctctcaccaggccctcgcccgctggtccgccaggccccgccttttttgcggcccccattgtgctgctggacccgacgagcagtgttgacagtgaaccccacgtagacgcggccccggtaccgggggttcaggcagtagagcaggtagacgccgaaaaagcgccctggcctcgccgcgacccccgcgggacccatcgggccttggggttcgggaaccacagcagggggttgattgccgtgacctagggtccagggagggctggatcgctagggctgcagggtgcttgcttcggaacaagctctcggggactatccggaggcagcctgcaggaagccgtagcgccggtacgtgcccctctcctgtctggaggcgggtgtagaagtccgaccgcggaagccagactgctgtccagtcggcgagcgcgtaccattcagcatcggctccgcccgagtcccaccttcctcaggctctgattggctgacacatggcaagcgcgaaaagcctggaccgctggaaagcccggctgcttgagggcggaagtactgcgttgacgtacgccttagtaagggcggaagtgagttttccagcggaagtggctcctgtaaggcagcaaggtagcgtggccggcgcccgagctggggttgtgtccctgctgggctgccgttccagctggactgccgccatggaactcagcgccgaatacctccgcgagaagctgcagcgggacctggaggcggagcatgtggaggtggaggacacgaccctcaaccgttgctcctgtagcttccgagtcctggtggtgtcggccaagttcgaggggaaaccgctgcttcagagacacaggctggtgaacgcgtgcctagcagaagagctcccgcacatccatgcctttgaacagaaaaccctgaccccagaccagtgggcacgtgagcgacagaaatgagggactgggatctgcacagccattaaattataaatctgga

SEQ ID NO: 278564 - DNA, 3073 bp, Homo sapiens
  misc_feature (40)..(40): n is a, c, g, or t
aaaggctaggtaggaggctggggtgaattcggccgagggncggtccttctcaacaggcctgtgccccgcggggtcgcctcctctgggacgccttcctcccggcacagaaggcctccccctctcaccaggccctcgcccgctggtccgccaggccccgccttttttgcggcccccattgtgctgctggacccgacgagcagtgttgacagtgaaccccacgtagacgcggccccggtaccgggggttcaggcagtagagcaggtagacgccgaaaaagcgccctggcctcgccgcgacccccgcgggacccatcgggccttggggttcgggaaccacagcagggggttgattgccgtgacctagggtccagggagggctggatcgctagggctgcagggtgcttgcttcggaacaagctctcggggactatccggaggcagcctgcaggaagccgtagcgccggtacgtgcccctctcctgtctggaggcgggtgtagaagtccgaccgcggaagccagactgctgtccagtcggcgagcgcgtaccattcagcatcggctccgcccgagtcccaccttcctcaggctctgattggctgacacatggcaagcgcgaaaagcctggaccgctggaaagcccggctgcttgagggcggaagtactgcgttgacgtacgccttagtaagggcggaagtgagttttccagcggaagtggctcctgtaaggcagcaaggtagcgtggccggcgcccgagctggggttgtgtccctgctgggctgccgttccagctggactgccgccatggaactcagcgccgaatacctccgcgagaagctgcagcgggacctggaggcggagcatgtggaggtggaggacacgaccctcaaccgttgctcctgtagcttccgagtcctggtggtgtcggccaagttcgaggggaaaccgctgcttcagagacacaggctggtgaacgcgtgcctagcagaagagctcccgcacatccatgcctttgaacagaaaaccctgaccccagaccagtgggcacgtgagcgacagaaatgagggactgggatctgcacagccattaaattataaatctggaccagcttctgtgtcgatgtgtgtgtgggaggggtgctgaggccgagtctaggacctggcctctccctgccctgcctccgtccattgttttaccttggacacgtctctgtccccatctaggcctctatccctgcttgtaaaatgaaagttctaccgtaaaagtcccttccagggtctaccgagaaagccttctctctgcaactccgtttagacatctaggagtctgtactgccaccacctacccacctcctagagagctcagggttcctcctctctgctagccttcaagatgcagagatgagaaagtgatcggggtttcagggccctgaccagttgaacaaacctctccctgacattaccgcagtatcagaggcaccatatagaattccacatattccttgcaggttccccccggccttctcaggcccaagagggagtggtgcccaggtaggggctcatcaactcctggaatgctgatgttttcagacccactggagaaggttccagtggccccatagccctgggcttaatgtgtctacagctgcccccggaggaccatggaggttttaagaatagtgggtgtgggacggggataggggtgagattagagtaggaatataaggctgacctgagtcagaaaattggggcaggtgatgcccctgtatcagtcttcataacaggttagtagggttgctaggaccttgtttgttttatttgttttttgttgtttgagacagggtcttgctctgtcgcccaggctggagtgccgtggcgccatctcagctcattgcaacctctgcctcccaggttcaaaagattcttgtgcttcagcctcctgagtagctgggattacaggggtgcaccaccatgcccggctaatttttgtacttttagtagagacagggtttcaccatgttggccaggccagtctcaaactcctggcctcaagtgatctgcccgccttggtctcctaaagtgctggaattttaggcgtgagccattgtacctggcccagattgctaggactttgaacagaggtccctgagacctagggagggagcccaaataacctagttggggccagggctcgttgagagtgagaaattgcaagtttcagccatcacacactcttttcctgcgttttttgtttgtttgtttgtttgttttgagacagagtcttggctctgttgcccaggctggagtgcagtagcatgatcttggctcactacaacttccccctcccgggttcaagcgattctcctgcctcagcctccctagtagctgggattacaggcacacgccaccatgcccagctaatttttggggtttttttattgtttgtttgtttgtctgtttttgagacagagtttcactcttgttgcccaggctggagtgcaatggcacgatctcggctcaccacaacctccgcctcctgggttcaagcgattctcttgtctcagcctcccaagtagctgggattacagagagacggtatctcgccgtgttgctcaggcaggtctcaaactcctgggctcaaatgatcctgccgcctcagcctcccacagtgctgggattatagacgtgagtccccatgcccagcctccctcgttatttttatctttggacctgcagtttaaaagatgcctaccctgtaagtgatggttggttcatttcctcacaagcaacagtgccagcagagtcacgtgcaacgtgatgttttggttgactaggaaaggcagatttttggtaaatttgggaattattgaggttctaagctagggccttaaatagttcagctgtgtcagctctgagaaggagctcggaaacggagagcagcctcctggcccacatcagcatggctggtttctacccacgaaggccctgttcctgtgatgtagtaagtcagggggcatcccacatcccctgccatgggtcagtcccctcagcgcggtggaggggaagctctagggctg

SEQ ID NO: 278565 - DNA, 2520 bp, Homo sapiens
aagcagtggtaacaacgcagagtacgcgggaagcagtggtaacaacgcagagtacgcgggaagcagtggtaacaacgcagagtacgcgggaagcagtggtaacaacgcagagtacgcggaaagcagtggtaacaacgcagagtacgcggggccagaagtggctcctgtaaggcagcaaggtagcgtggccggcgcccgagctggggttgtgtccctgctgggctgccgttccagctggactgccgccatggaactcagcgccgaatacctccgcgagaagctgcagcgggacctggaggcggagcatgtggaggtggaggacacgaccctcaaccgttgctcctgtagcttccgagtcctggtggtgtcggccaagttcgaggggaaaccgctgcttcagagacacaggctggtgaacgcgtgcctagcagaagagctcccgcacatccatgcctttgaacagaaaaccctgaccccagaccagtgggcacgtgagcgacagaaatgagggactgggatctgcacagccattaaattataaatctggaccagcttctgtgtcgatgtgtgtgtgggaggggtgctgaggccgagtctaggacctggcctctccctgccctgcctccgtccattgttttaccttggacacgtctctgtccccatctaggcctctatccctgcttgtaaaatgaaagttctaccgtaaaagtcccttccagggtctaccgagaaagccttctctctgcaactccgtttagacatctaggagtctgtactgccaccacctacccacctcctagagagctcagggttcctcctctctgctagccttcaagatgcagagatgagaaagtgatcggggtttcagggccctgaccagttgaacaaacctctccctgacattaccgcagtatcagaggcaccatatagaattccacatattccttgcaggttccccccggccttctcaggcccaagagggagtggtgcccaggtaggggctcatcaactcctggaatgctgatgttttcagacccactggagaaggttccagtggccccatagccctgggcttaatgtgtctacagctgcccccggaggaccatggaggttttaagaatagtgggtgtgggacggggataggggtgagattagagtaggaatataaggctgacctgagtcagaaaattggggcaggtgatgcccctgtatcagtcttcataacaggttagtagggttgctaggaccttgtttgttttatttgttttttgttgtttgagacagggtcttgctctgtcgcccaggctggagtgccgtggcgccatctcagctcattgcaacctctgcctcccaggttcaaaagattcttgtgcttcagcctcctgagtagctgggattacaggggtgcaccaccatgcccggctaatttttgtacttttagtagagacagggtttcaccatgttggccaggccagtctcaaactcctggcctcaagtgatctgcccgccttggtctcctaaagtgctggaattttaggcgtgagccattgtacctggcccagattgctaggactttgaacagaggtccctgagacctagggagggagcccaaataacctagttggggccagggctcgttgagagtgagaaattgcaagtttcagccatcacacactcttttcctgcgttttttgtttgtttgtttgtttgttttgagacagagtcttggctctgttgcccaggctggagtgcagtagcatgatcttggctcactacaacttccccctcccgggttcaagcgattctcctgcctcagcctccctagtagctgggattacaggcacacgccaccatgcccagctaatttttggggtttttttattgtttgtttgtttgtctgtttttgagacagagtttcactcttgttgcccaggctggagtgcaatggcacgatctcggctcaccacaacctccgcctcctgggttcaagcgattctcttgtctcagcctcccaagtagctgggattacagagagacggtatctcgccgtgttgctcaggcaggtctcaaactcctgggctcaaatgatcctgccgcctcagcctcccacagtgctgggattatagacgtgagtccccatgcccagcctccctcgttatttttatctttggacctgcagtttaaaagatgcctaccctgtaagtgatggttggttcatttcctcacaagcaacagtgccagcagagtcacgtgcaacgtgatgttttggttgactaggaaaggcagatttttggtaaatttgggaattattgaggttctaagctagggccttaaatagttcagctgtgtcagctctgagaaggagctcggaaacggagagcagcctcctggcccacatcagcatggctggtttctacccacgaaggccctgttcctgtgatgtagtaagtcagggggcatcccacatcccctgccatgggtcagtcccctcagcgcggtggaggggaagctctagggctg

SEQ ID NO: 278566 - DNA, 3073 bp, Homo sapiens
  misc_feature (40)..(40): n is a, c, g, or t
aaaggctaggtaggaggctggggtgaattcggccgagggncggtccttctcaacaggcctgtgccccgcggggtcgcctcctctgggacgccttcctcccggcacagaaggcctccccctctcaccaggccctcgcccgctggtccgccaggccccgccttttttgcggcccccattgtgctgctggacccgacgagcagtgttgacagtgaaccccacgtagacgcggccccggtaccgggggttcaggcagtagagcaggtagacgccgaaaaagcgccctggcctcgccgcgacccccgcgggacccatcgggccttggggttcgggaaccacagcagggggttgattgccgtgacctagggtccagggagggctggatcgctagggctgcagggtgcttgcttcggaacaagctctcggggactatccggaggcagcctgcaggaagccgtagcgccggtacgtgcccctctcctgtctggaggcgggtgtagaagtccgaccgcggaagccagactgctgtccagtcggcgagcgcgtaccattcagcatcggctccgcccgagtcccaccttcctcaggctctgattggctgacacatggcaagcgcgaaaagcctggaccgctggaaagcccggctgcttgagggcggaagtactgcgttgacgtacgccttagtaagggcggaagtgagttttccagcggaagtggctcctgtaaggcagcaaggtagcgtggccggcgcccgagctggggttgtgtccctgctgggctgccgttccagctggactgccgccatggaactcagcgccgaatacctccgcgagaagctgcagcgggacctggaggcggagcatgtggaggtggaggacacgaccctcaaccgttgctcctgtagcttccgagtcctggtggtgtcggccaagttcgaggggaaaccgctgcttcagagacacaggctggtgaacgcgtgcctagcagaagagctcccgcacatccatgcctttgaacagaaaaccctgaccccagaccagtgggcacgtgagcgacagaaatgagggactgggatctgcacagccattaaattataaatctggaccagcttctgtgtcgatgtgtgtgtgggaggggtgctgaggccgagtctaggacctggcctctccctgccctgcctccgtccattgttttaccttggacacgtctctgtccccatctaggcctctatccctgcttgtaaaatgaaagttctaccgtaaaagtcccttccagggtctaccgagaaagccttctctctgcaactccgtttagacatctaggagtctgtactgccaccacctacccacctcctagagagctcagggttcctcctctctgctagccttcaagatgcagagatgagaaagtgatcggggtttcagggccctgaccagttgaacaaacctctccctgacattaccgcagtatcagaggcaccatatagaattccacatattccttgcaggttccccccggccttctcaggcccaagagggagtggtgcccaggtaggggctcatcaactcctggaatgctgatgttttcagacccactggagaaggttccagtggccccatagccctgggcttaatgtgtctacagctgcccccggaggaccatggaggttttaagaatagtgggtgtgggacggggataggggtgagattagagtaggaatataaggctgacctgagtcagaaaattggggcaggtgatgcccctgtatcagtcttcataacaggttagtagggttgctaggaccttgtttgttttatttgttttttgttgtttgagacagggtcttgctctgtcgcccaggctggagtgccgtggcgccatctcagctcattgcaacctctgcctcccaggttcaaaagattcttgtgcttcagcctcctgagtagctgggattacaggggtgcaccaccatgcccggctaatttttgtacttttagtagagacagggtttcaccatgttggccaggccagtctcaaactcctggcctcaagtgatctgcccgccttggtctcctaaagtgctggaattttaggcgtgagccattgtacctggcccagattgctaggactttgaacagaggtccctgagacctagggagggagcccaaataacctagttggggccagggctcgttgagagtgagaaattgcaagtttcagccatcacacactcttttcctgcgttttttgtttgtttgtttgtttgttttgagacagagtcttggctctgttgcccaggctggagtgcagtagcatgatcttggctcactacaacttccccctcccgggttcaagcgattctcctgcctcagcctccctagtagctgggattacaggcacacgccaccatgcccagctaatttttggggtttttttattgtttgtttgtttgtctgtttttgagacagagtttcactcttgttgcccaggctggagtgcaatggcacgatctcggctcaccacaacctccgcctcctgggttcaagcgattctcttgtctcagcctcccaagtagctgggattacaggtatgtgctaccacgcccggctaatcttgtatttttaatagagacagggtttctccatgttgttcaggctggtcttgaactcccgacctcaggtgatccacccgcctcggcctccaaaagtgctgggattacaggcgtgtgccacttatgcccagctttcttttttgttttcttcccacacctctactgcccaagtagttttctatggcatactgaagaggtggggcctggaaatgacgccatgggtggtccctgcttgatatgaaccaaaccttactatggctaagacgcccatcccaaacagccctgtgtcctcccatctcaggatcacctgctaagttgggtatcaaaacctattcccacacccactccccacaaggcctgacagacctgttcctgccaggtctctcacagaggtcaggcccaggcagaacccacaggaagggctagagaggcagaagcactcactacacgggggaaggctctgaa

SEQ ID NO: 278567 - DNA, 1348 bp, Homo sapiens
  misc_feature (40)..(40): n is a, c, g, or t
  misc_feature (1124)..(1124): n is a, c, g, or t
aaaggctaggtaggaggctggggtgaattcggccgagggncggtccttctcaacaggcctgtgccccgcggggtcgcctcctctgggacgccttcctcccggcacagaaggcctccccctctcaccaggccctcgcccgctggtccgccaggccccgccttttttgcggcccccattgtgctgctggacccgacgagcagtgttgacagtgaaccccacgtagacgcggccccggtaccgggggttcaggcagtagagcaggtagacgccgaaaaagcgccctggcctcgccgcgacccccgcgggacccatcgggccttggggttcgggaaccacagcagggggttgattgccgtgacctagggtccagggagggctggatcgctagggctgcagggtgcttgcttcggaacaagctctcggggactatccggaggcagcctgcaggaagccgtagcgccggtacgtgcccctctcctgtctggaggcgggtgtagaagtccgaccgcggaagccagactgctgtccagtcggcgagcgcgtaccattcagcatcggctccgcccgagtcccaccttcctcaggctctgattggctgacacatggcaagcgcgaaaagcctggaccgctggaaagcccggctgcttgagggcggaagtactgcgttgacgtacgccttagtaagggcggaagtgagttttccagcggaagtggctcctgtaaggcagcaaggtagcgtggccggcgcccgagctggggttgtgtccctgctgggctgccgttccagctggactgccgccatggaactcagcgccgaatacctccgcgagaagctgcagcgggacctggaggcggagcatgtggaggtggaggacacgaccctcaaccgttgctcctgtagcttccgagtcctggtggtgtcggccaagttcgaggggaaaccgctgcttcagagacacaggctggtgaacgcgtgcctagcagaagagctcccgcacatccatgcctttgaacagaaaaccctgaccccagaccagtgggcacgtgagcgacagaaatgagggactgggatctgcacagccattaaattataaatctggaaaaaaaaaaaaaaaaaaaaaaanaaacaaaaaaaaaaaaaacacaaaaaaaacacacccgcgggcgcgcacctctgtcgggggggggggaaaaagggggaagaaaaggggccggggcaccaggcgagcgtacgcaggcacaggagatttgggacaaagagggcggaagaccacgggggaccccacaaaaaggagggggcgaaaaagtaggaaaacgcgccgggaacacaggggaaagagagcgagga

SEQ ID NO: 278568 - DNA, 1709 bp, Homo sapiens
  misc_feature (40)..(40): n is a, c, g, or t
  misc_feature (1411)..(1411): n is a, c, g, or t
aaaggctaggtaggaggctggggtgaattcggccgagggncggtccttctcaacaggcctgtgccccgcggggtcgcctcctctgggacgccttcctcccggcacagaaggcctccccctctcaccaggccctcgcccgctggtccgccaggccccgccttttttgcggcccccattgtgctgctggacccgacgagcagtgttgacagtgaaccccacgtagacgcggccccggtaccgggggttcaggcagtagagcaggtagacgccgaaaaagcgccctggcctcgccgcgacccccgcgggacccatcgggccttggggttcgggaaccacagcagggggttgattgccgtgacctagggtccagggagggctggatcgctagggctgcagggtgcttgcttcggaacaagctctcggggactatccggaggcagcctgcaggaagccgtagcgccggtacgtgcccctctcctgtctggaggcgggtgtagaagtccgaccgcggaagccagactgctgtccagtcggcgagcgcgtaccattcagcatcggctccgcccgagtcccaccttcctcaggctctgattggctgacacatggcaagcgcgaaaagcctggaccgctggaaagcccggctgcttgagggcggaagtactgcgttgacgtacgccttagtaagggcggaagtgagttttccagcggaagtggctcctgtaaggcagcaaggtagcgtggccggcgcccgagctggggttgtgtccctgctgggctgccgttccagctggactgccgccatggaactcagcgccgaatacctccgcgagaagctgcagcgggacctggaggcggagcatgtggaggtggaggacacgaccctcaaccgttgctcctgtagcttccgagtcctggtggtgtcggccaagttcgaggggaaaccgctgcttcagagacacagattgttgaacagataaatacgaaactgccatcatcatttgtagaaaaactgtttataccatcatctaaactactattcttgcgttatcataaagaaaaagaggttgttgctgtagcccatgctgtttatcaagcaatgctcagcttgaagaatattcctgttttggagactgcctataagttaatattgggagaaatgacttgtgccctaaacaacctcctgcacagtctgcaacttcctgaggcctgttctgaaataaaacatgaggcttttaagaatcatgtgttcaatgtagacaatgcaaaatttgtagttaaatttgacctcagtgccctgactacaattggaaatgccaaaaactcactaataggggtgagtctttaattgtaatgactttgttttatccacagttaagccttttctcattacatatttatgtatttcactgtnatgtcaacatgtctgcagaatcactgtatgtaacaaacagccatatttaagacatgcctggataaataaaattggtaggaatgttttcttgccattatatttaacttttcttctttttccttgacaaatcttgataagtttttttatattagttttattttctagaaaatgtcttatgaatttctcctatttgctctagcatgcttacagaaaatgtcagtgtttcttacagctcaaatttgtatagttgttttaaaatgcggtctctttcttcttcccctggtacttttttctttct

SEQ ID NO: 278569 - DNA, 2101 bp, Homo sapiens
  misc_feature (40)..(40): n is a, c, g, or t
  misc_feature (1803)..(1803): n is a, c, g, or t
aaaggctaggtaggaggctggggtgaattcggccgagggncggtccttctcaacaggcctgtgccccgcggggtcgcctcctctgggacgccttcctcccggcacagaaggcctccccctctcaccaggccctcgcccgctggtccgccaggccccgccttttttgcggcccccattgtgctgctggacccgacgagcagtgttgacagtgaaccccacgtagacgcggccccggtaccgggggttcaggcagtagagcaggtagacgccgaaaaagcgccctggcctcgccgcgacccccgcgggacccatcgggccttggggttcgggaaccacagcagggggttgattgccgtgacctagggtccagggagggctggatcgctagggctgcagggtgcttgcttcggaacaagctctcggggactatccggaggcagcctgcaggaagccgtagcgccggtacgtgcccctctcctgtctggaggcgggtgtagaagtccgaccgcggaagccagactgctgtccagtcggcgagcgcgtaccattcagcatcggctccgcccgagtcccaccttcctcaggctctgattggctgacacatggcaagcgcgaaaagcctggaccgctggaaagcccggctgcttgagggcggaagtactgcgttgacgtacgccttagtaagggcggaagtgagttttccagcggaagtggctcctgtaaggcagcaaggtagcgtggccggcgcccgagctggggttgtgtccctgctgggctgccgttccagctggactgccgccatggaactcagcgccgaatacctccgcgagaagctgcagcgggacctggaggcggagcatgtggaggtggaggacacgaccctcaaccgttgctcctgtagcttccgagtcctggtggtgtcggccaagttcgaggggaaaccgctgcttcagagacacagagagacggtatctcgccgtgttgctcaggcaggtctcaaactcctgggctcaaatgatcctgccgcctcagcctcccacagtgctgggattatagacgtgagtccccatgcccagcctccctcgttatttttatctttggacctgcagtttaaaagatgcctaccctgttctgtacagagtaatgagatgtgtgacggctgcaaaccaggtgtttttttctgaggctgtgttgacagctgctaatgagtgtgttggtgttttgctcggcagcttggatcctagcatgactatacattgtgacatggtcattacatatggattagaccaactggagaattgccagacttgtggtaccgattatatcatctcagtcttgaatttactcacgctgattgttgaacagataaatacgaaactgccatcatcatttgtagaaaaactgtttataccatcatctaaactactattcttgcgttatcataaagaaaaagaggttgttgctgtagcccatgctgtttatcaagcaatgctcagcttgaagaatattcctgttttggagactgcctataagttaatattgggagaaatgacttgtgccctaaacaacctcctgcacagtctgcaacttcctgaggcctgttctgaaataaaacatgaggcttttaagaatcatgtgttcaatgtagacaatgcaaaatttgtagttaaatttgacctcagtgccctgactacaattggaaatgccaaaaactcactaataggggtgagtctttaattgtaatgactttgttttatccacagttaagccttttctcattacatatttatgtatttcactgtnatgtcaacatgtctgcagaatcactgtatgtaacaaacagccatatttaagacatgcctggataaataaaattggtaggaatgttttcttgccattatatttaacttttcttctttttccttgacaaatcttgataagtttttttatattagttttattttctagaaaatgtcttatgaatttctcctatttgctctagcatgcttacagaaaatgtcagtgtttcttacagctcaaatttgtatagttgttttaaaatgcggtctctttcttcttcccctggtacttttttctttct

SEQ ID NO: 278570 - DNA, 1830 bp, Homo sapiens
  misc_feature (40)..(40): n is a, c, g, or t
  misc_feature (1532)..(1532): n is a, c, g, or t
aaaggctaggtaggaggctggggtgaattcggccgagggncggtccttctcaacaggcctgtgccccgcggggtcgcctcctctgggacgccttcctcccggcacagaaggcctccccctctcaccaggccctcgcccgctggtccgccaggccccgccttttttgcggcccccattgtgctgctggacccgacgagcagtgttgacagtgaaccccacgtagacgcggccccggtaccgggggttcaggcagtagagcaggtagacgccgaaaaagcgccctggcctcgccgcgacccccgcgggacccatcgggccttggggttcgggaaccacagcagggggttgattgccgtgacctagggtccagggagggctggatcgctagggctgcagggtgcttgcttcggaacaagctctcggggactatccggaggcagcctgcaggaagccgtagcgccggtacgtgcccctctcctgtctggaggcgggtgtagaagtccgaccgcggaagccagactgctgtccagtcggcgagcgcgtaccattcagcatcggctccgcccgagtcccaccttcctcaggctctgattggctgacacatggcaagcgcgaaaagcctggaccgctggaaagcccggctgcttgagggcggaagtactgcgttgacgtacgccttagtaagggcggaagtgagttttccagcggaagtggctcctgtaaggcagcaaggtagcgtggccggcgcccgagctggggttgtgtccctgctgggctgccgttccagctggactgccgccatggaactcagcgccgaatacctccgcgagaagctgcagcgggacctggaggcggagcatgtggaggtggaggacacgaccctcaaccgttgctcctgtagcttccgagtcctggtggtgtcggccaagttcgaggggaaaccgctgcttcagagacacagcttggatcctagcatgactatacattgtgacatggtcattacatatggattagaccaactggagaattgccagacttgtggtaccgattatatcatctcagtcttgaatttactcacgctgattgttgaacagataaatacgaaactgccatcatcatttgtagaaaaactgtttataccatcatctaaactactattcttgcgttatcataaagaaaaagaggttgttgctgtagcccatgctgtttatcaagcaatgctcagcttgaagaatattcctgttttggagactgcctataagttaatattgggagaaatgacttgtgccctaaacaacctcctgcacagtctgcaacttcctgaggcctgttctgaaataaaacatgaggcttttaagaatcatgtgttcaatgtagacaatgcaaaatttgtagttaaatttgacctcagtgccctgactacaattggaaatgccaaaaactcactaataggggtgagtctttaattgtaatgactttgttttatccacagttaagccttttctcattacatatttatgtatttcactgtnatgtcaacatgtctgcagaatcactgtatgtaacaaacagccatatttaagacatgcctggataaataaaattggtaggaatgttttcttgccattatatttaacttttcttctttttccttgacaaatcttgataagtttttttatattagttttattttctagaaaatgtcttatgaatttctcctatttgctctagcatgcttacagaaaatgtcagtgtttcttacagctcaaatttgtatagttgttttaaaatgcggtctctttcttcttcccctggtacttttttctttct

SEQ ID NO: 278571 - DNA, 2129 bp, Homo sapiens
  misc_feature (40)..(40): n is a, c, g, or t
  misc_feature (1831)..(1831): n is a, c, g, or t
aaaggctaggtaggaggctggggtgaattcggccgagggncggtccttctcaacaggcctgtgccccgcggggtcgcctcctctgggacgccttcctcccggcacagaaggcctccccctctcaccaggccctcgcccgctggtccgccaggccccgccttttttgcggcccccattgtgctgctggacccgacgagcagtgttgacagtgaaccccacgtagacgcggccccggtaccgggggttcaggcagtagagcaggtagacgccgaaaaagcgccctggcctcgccgcgacccccgcgggacccatcgggccttggggttcgggaaccacagcagggggttgattgccgtgacctagggtccagggagggctggatcgctagggctgcagggtgcttgcttcggaacaagctctcggggactatccggaggcagcctgcaggaagccgtagcgccggtacgtgcccctctcctgtctggaggcgggtgtagaagtccgaccgcggaagccagactgctgtccagtcggcgagcgcgtaccattcagcatcggctccgcccgagtcccaccttcctcaggctctgattggctgacacatggcaagcgcgaaaagcctggaccgctggaaagcccggctgcttgagggcggaagtactgcgttgacgtacgccttagtaagggcggaagtgagttttccagcggaagtggctcctgtaaggcagcaaggtagcgtggccggcgcccgagctggggttgtgtccctgctgggctgccgttccagctggactgccgccatggaactcagcgccgaatacctccgcgagaagctgcagcgggacctggaggcggagcatgtggaggtggaggacacgaccctcaaccgttgctcctgtagcttccgagtcctggtggtgtcggccaagttcgaggggaaaccgctgcttcagagacacaggctggagtgcaatggcacgatctcggctcaccacaacctccgcctcctgggttcaagcgattctcttgtctcagcctcccaagtagctgggattacagagagacggtatctcgccgtgttgctcaggcaggtctcaaactcctgggctcaaatgatcctgccgcctcagcctcccacagtgctgggattatagacgttctgtacagagtaatgagatgtgtgacggctgcaaaccaggtgtttttttctgaggctgtgttgacagctgctaatgagtgtgttggtgttttgctcggcagcttggatcctagcatgactatacattgtgacatggtcattacatatggattagaccaactggagaattgccagacttgtggtaccgattatatcatctcagtcttgaatttactcacgctgattgttgaacagataaatacgaaactgccatcatcatttgtagaaaaactgtttataccatcatctaaactactattcttgcgttatcataaagaaaaagaggttgttgctgtagcccatgctgtttatcaagcaatgctcagcttgaagaatattcctgttttggagactgcctataagttaatattgggagaaatgacttgtgccctaaacaacctcctgcacagtctgcaacttcctgaggcctgttctgaaataaaacatgaggcttttaagaatcatgtgttcaatgtagacaatgcaaaatttgtagttaaatttgacctcagtgccctgactacaattggaaatgccaaaaactcactaataggggtgagtctttaattgtaatgactttgttttatccacagttaagccttttctcattacatatttatgtatttcactgtnatgtcaacatgtctgcagaatcactgtatgtaacaaacagccatatttaagacatgcctggataaataaaattggtaggaatgttttcttgccattatatttaacttttcttctttttccttgacaaatcttgataagtttttttatattagttttattttctagaaaatgtcttatgaatttctcctatttgctctagcatgcttacagaaaatgtcagtgtttcttacagctcaaatttgtatagttgttttaaaatgcggtctctttcttcttcccctggtacttttttctttct

SEQ ID NO: 278572 - DNA, 1426 bp, Homo sapiens
  misc_feature (40)..(40): n is a, c, g, or t
aaaggctaggtaggaggctggggtgaattcggccgagggncggtccttctcaacaggcctgtgccccgcggggtcgcctcctctgggacgccttcctcccggcacagaaggcctccccctctcaccaggccctcgcccgctggtccgccaggccccgccttttttgcggcccccattgtgctgctggacccgacgagcagtgttgacagtgaaccccacgtagacgcggccccggtaccgggggttcaggcagtagagcaggtagacgccgaaaaagcgccctggcctcgccgcgacccccgcgggacccatcgggccttggggttcgggaaccacagcagggggttgattgccgtgacctagggtccagggagggctggatcgctagggctgcagggtgcttgcttcggaacaagctctcggggactatccggaggcagcctgcaggaagccgtagcgccggtacgtgcccctctcctgtctggaggcgggtgtagaagtccgaccgcggaagccagactgctgtccagtcggcgagcgcgtaccattcagcatcggctccgcccgagtcccaccttcctcaggctctgattggctgacacatggcaagcgcgaaaagcctggaccgctggaaagcccggctgcttgagggcggaagtactgcgttgacgtacgccttagtaagggcggaagtgagttttccagcggaagtggctcctgtaaggcagcaaggtagcgtggccggcgcccgagctggggttgtgtccctgctgggctgccgttccagctggactgccgccatggaactcagcgccgaatacctccgcgagaagctgcagcgggacctggaggcggagcatgtggaggtggaggacacgaccctcaaccgttgctcctgtagcttccgagtcctggtggtgtcggccaagttcgaggggaaaccgctgcttcagagacacaggttctgtacagagtaatgagatgtgtgacggctgcaaaccaggtgtttttttctgaggctgtgttgacagctgctaatgagtgtgttggtgttttgctcggcagcttggatcctagcatgactatacattgtgacatggtcattacatatggattagaccaactggagaattgccagacttgtggtaccgattatatcatctcagtcttgaatttactcacgctgattgttgaacagataaatacgaaactgccatcatcatttgtagaaaaactgtttataccatcatctaaactactattcttgcgttatcataaagaaaaagaggtgtgctgtagcccatgtgttatcaagcaagctcagtgagaatattctgttgggaatgctatagtatttggggaatggttgggcctaaaaattcggaagctggattctgggtgtttgaaaacatgaggttaaaacttg

SEQ ID NO: 278573 - DNA, 1384 bp, Homo sapiens
  misc_feature (40)..(40): n is a, c, g, or t
aaaggctaggtaggaggctggggtgaattcggccgagggncggtccttctcaacaggcctgtgccccgcggggtcgcctcctctgggacgccttcctcccggcacagaaggcctccccctctcaccaggccctcgcccgctggtccgccaggccccgccttttttgcggcccccattgtgctgctggacccgacgagcagtgttgacagtgaaccccacgtagacgcggccccggtaccgggggttcaggcagtagagcaggtagacgccgaaaaagcgccctggcctcgccgcgacccccgcgggacccatcgggccttggggttcgggaaccacagcagggggttgattgccgtgacctagggtccagggagggctggatcgctagggctgcagggtgcttgcttcggaacaagctctcggggactatccggaggcagcctgcaggaagccgtagcgccggtacgtgcccctctcctgtctggaggcgggtgtagaagtccgaccgcggaagccagactgctgtccagtcggcgagcgcgtaccattcagcatcggctccgcccgagtcccaccttcctcaggctctgattggctgacacatggcaagcgcgaaaagcctggaccgctggaaagcccggctgcttgagggcggaagtactgcgttgacgtacgccttagtaagggcggaagtgagttttccagcggaagtggctcctgtaaggcagcaaggtagcgtggccggcgcccgagctggggttgtgtccctgctgggctgccgttccagctggactgccgccatggaactcagcgccgaatacctccgcgagaagctgcagcgggacctggaggcggagcatgtggaggtggaggacacgaccctcaaccgttgctcctgtagcttccgagtcctggtggtgtcggccaagttcgaggggaaaccgctgcttcagagacacaggtaaggccctgggagcaccttgcctagctcctgtaccacaaccccagccactccccctacccctgcaacctgactcccgcactccccctggcgtggctcagggaccttgaggatcccgccttcgtgacccctgcttcgagtatttcgatgtagaccctctctccaagtacgtgttcccacggcctggggactacaaccttggggacaccagtctcttgggtcaccctagcctcggggtgtgcgatcaccgctggccttttcctaaccccatctctcgccccaggctggtgaacgcgtgcctagcagaagagctcccgcacatccatgcctttgaacagaaaaccctgaccccagaccagtgggcacgtgagcgacagaaatgagggactgggatctgcacagccattaaattataaatctgga

SEQ ID NO: 278574 - DNA, 3318 bp, Homo sapiens
  misc_feature (40)..(40): n is a, c, g, or t
aaaggctaggtaggaggctggggtgaattcggccgagggncggtccttctcaacaggcctgtgccccgcggggtcgcctcctctgggacgccttcctcccggcacagaaggcctccccctctcaccaggccctcgcccgctggtccgccaggccccgccttttttgcggcccccattgtgctgctggacccgacgagcagtgttgacagtgaaccccacgtagacgcggccccggtaccgggggttcaggcagtagagcaggtagacgccgaaaaagcgccctggcctcgccgcgacccccgcgggacccatcgggccttggggttcgggaaccacagcagggggttgattgccgtgacctagggtccagggagggctggatcgctagggctgcagggtgcttgcttcggaacaagctctcggggactatccggaggcagcctgcaggaagccgtagcgccggtacgtgcccctctcctgtctggaggcgggtgtagaagtccgaccgcggaagccagactgctgtccagtcggcgagcgcgtaccattcagcatcggctccgcccgagtcccaccttcctcaggctctgattggctgacacatggcaagcgcgaaaagcctggaccgctggaaagcccggctgcttgagggcggaagtactgcgttgacgtacgccttagtaagggcggaagtgagttttccagcggaagtggctcctgtaaggcagcaaggtagcgtggccggcgcccgagctggggttgtgtccctgctgggctgccgttccagctggactgccgccatggaactcagcgccgaatacctccgcgagaagctgcagcgggacctggaggcggagcatgtgcttccgagtcctggtggtgtcggccaagttcgaggggaaaccgctgcttcagagacacaggtaaggccctgggagcaccttgcctagctcctgtaccacaaccccagccactccccctacccctgcaacctgactcccgcactccccctggcgtggctcagggaccttgaggatcccgccttcgtgacccctgcttcgagtatttcgatgtagaccctctctccaagtacgtgttcccacggcctggggactacaaccttggggacaccagtctcttgggtcaccctagcctcggggtgtgcgatcaccgctggccttttcctaaccccatctctcgccccaggctggtgaacgcgtgcctagcagaagagctcccgcacatccatgcctttgaacagaaaaccctgaccccagaccagtgggcacgtgagcgacagaaatgagggactgggatctgcacagccattaaattataaatctggaccagcttctgtgtcgatgtgtgtgtgggaggggtgctgaggccgagtctaggacctggcctctccctgccctgcctccgtccattgttttaccttggacacgtctctgtccccatctaggcctctatccctgcttgtaaaatgaaagttctaccgtaaaagtcccttccagggtctaccgagaaagccttctctctgcaactccgtttagacatctaggagtctgtactgccaccacctacccacctcctagagagctcagggttcctcctctctgctagccttcaagatgcagagatgagaaagtgatcggggtttcagggccctgaccagttgaacaaacctctccctgacattaccgcagtatcagaggcaccatatagaattccacatattccttgcaggttccccccggccttctcaggcccaagagggagtggtgcccaggtaggggctcatcaactcctggaatgctgatgttttcagacccactggagaaggttccagtggccccatagccctgggcttaatgtgtctacagctgcccccggaggaccatggaggttttaagaatagtgggtgtgggacggggataggggtgagattagagtaggaatataaggctgacctgagtcagaaaattggggcaggtgatgcccctgtatcagtcttcataacaggttagtagggttgctaggaccttgtttgttttatttgttttttgttgtttgagacagggtcttgctctgtcgcccaggctggagtgccgtggcgccatctcagctcattgcaacctctgcctcccaggttcaaaagattcttgtgcttcagcctcctgagtagctgggattacaggggtgcaccaccatgcccggctaatttttgtacttttagtagagacagggtttcaccatgttggccaggccagtctcaaactcctggcctcaagtgatctgcccgccttggtctcctaaagtgctggaattttaggcgtgagccattgtacctggcccagattgctaggactttgaacagaggtccctgagacctagggagggagcccaaataacctagttggggccagggctcgttgagagtgagaaattgcaagtttcagccatcacacactcttttcctgcgttttttgtttgtttgtttgtttgttttgagacagagtcttggctctgttgcccaggctggagtgcagtagcatgatcttggctcactacaacttccccctcccgggttcaagcgattctcctgcctcagcctccctagtagctgggattacaggcacacgccaccatgcccagctaatttttggggtttttttattgtttgtttgtttgtctgtttttgagacagagtttcactcttgttgcccaggctggagtgcaatggcacgatctcggctcaccacaacctccgcctcctgggttcaagcgattctcttgtctcagcctcccaagtagctgggattacagagagacggtatctcgccgtgttgctcaggcaggtctcaaactcctgggctcaaatgatcctgccgcctcagcctcccacagtgctgggattatagacgtgagtccccatgcccagcctccctcgttatttttatctttggacctgcagtttaaaagatgcctaccctgtaagtgatggttggttcatttcctcacaagcaacagtgccagcagagtcacgtgcaacgtgatgttttggttgactaggaaaggcagatttttggtaaatttgggaattattgaggttctaagctagggccttaaatagttcagctgtgtcagctctgagaaggagctcggaaacggagagcagcctcctggcccacatcagcatggctggtttctacccacgaaggccctgttcctgtgatgtagtaagtcagggggcatcccacatcccctgccatgggtcagtcccctcagcgcggtggaggggaagctctagggctg

SEQ ID NO: 278575 - DNA, 3432 bp, Homo sapiens
  misc_feature (40)..(40): n is a, c, g, or t
aaaggctaggtaggaggctggggtgaattcggccgagggncggtccttctcaacaggcctgtgccccgcggggtcgcctcctctgggacgccttcctcccggcacagaaggcctccccctctcaccaggccctcgcccgctggtccgccaggccccgccttttttgcggcccccattgtgctgctggacccgacgagcagtgttgacagtgaaccccacgtagacgcggccccggtaccgggggttcaggcagtagagcaggtagacgccgaaaaagcgccctggcctcgccgcgacccccgcgggacccatcgggccttggggttcgggaaccacagcagggggttgattgccgtgacctagggtccagggagggctggatcgctagggctgcagggtgcttgcttcggaacaagctctcggggactatccggaggcagcctgcaggaagccgtagcgccggtacgtgcccctctcctgtctggaggcgggtgtagaagtccgaccgcggaagccagactgctgtccagtcggcgagcgcgtaccattcagcatcggctccgcccgagtcccaccttcctcaggctctgattggctgacacatggcaagcgcgaaaagcctggaccgctggaaagcccggctgcttgagggcggaagtactgcgttgacgtacgccttagtaagggcggaagtgagttttccagcggaagtggctcctgtaaggcagcaaggtagcgtggccggcgcccgagctggggttgtgtccctgctgggctgccgttccagctggactgccgccatggaactcagcgccgaatacctccgcgagaagctgcagcgggacctggaggcggagcatgtgtgagttgagccgccggacaaggggaaaagagctcggggggcgggttcggcaccattcatattcttccgctcggtaggaggtggaggacacgaccctcaaccgttgctcctgtagcttccgagtcctggtggtgtcggccaagttcgaggggaaaccgctgcttcagagacacaggtaaggccctgggagcaccttgcctagctcctgtaccacaaccccagccactccccctacccctgcaacctgactcccgcactccccctggcgtggctcagggaccttgaggatcccgccttcgtgacccctgcttcgagtatttcgatgtagaccctctctccaagtacgtgttcccacggcctggggactacaaccttggggacaccagtctcttgggtcaccctagcctcggggtgtgcgatcaccgctggccttttcctaaccccatctctcgccccaggctggtgaacgcgtgcctagcagaagagctcccgcacatccatgcctttgaacagaaaaccctgaccccagaccagtgggcacgtgagcgacagaaatgagggactgggatctgcacagccattaaattataaatctggaccagcttctgtgtcgatgtgtgtgtgggaggggtgctgaggccgagtctaggacctggcctctccctgccctgcctccgtccattgttttaccttggacacgtctctgtccccatctaggcctctatccctgcttgtaaaatgaaagttctaccgtaaaagtcccttccagggtctaccgagaaagccttctctctgcaactccgtttagacatctaggagtctgtactgccaccacctacccacctcctagagagctcagggttcctcctctctgctagccttcaagatgcagagatgagaaagtgatcggggtttcagggccctgaccagttgaacaaacctctccctgacattaccgcagtatcagaggcaccatatagaattccacatattccttgcaggttccccccggccttctcaggcccaagagggagtggtgcccaggtaggggctcatcaactcctggaatgctgatgttttcagacccactggagaaggttccagtggccccatagccctgggcttaatgtgtctacagctgcccccggaggaccatggaggttttaagaatagtgggtgtgggacggggataggggtgagattagagtaggaatataaggctgacctgagtcagaaaattggggcaggtgatgcccctgtatcagtcttcataacaggttagtagggttgctaggaccttgtttgttttatttgttttttgttgtttgagacagggtcttgctctgtcgcccaggctggagtgccgtggcgccatctcagctcattgcaacctctgcctcccaggttcaaaagattcttgtgcttcagcctcctgagtagctgggattacaggggtgcaccaccatgcccggctaatttttgtacttttagtagagacagggtttcaccatgttggccaggccagtctcaaactcctggcctcaagtgatctgcccgccttggtctcctaaagtgctggaattttaggcgtgagccattgtacctggcccagattgctaggactttgaacagaggtccctgagacctagggagggagcccaaataacctagttggggccagggctcgttgagagtgagaaattgcaagtttcagccatcacacactcttttcctgcgttttttgtttgtttgtttgtttgttttgagacagagtcttggctctgttgcccaggctggagtgcagtagcatgatcttggctcactacaacttccccctcccgggttcaagcgattctcctgcctcagcctccctagtagctgggattacaggcacacgccaccatgcccagctaatttttggggtttttttattgtttgtttgtttgtctgtttttgagacagagtttcactcttgttgcccaggctggagtgcaatggcacgatctcggctcaccacaacctccgcctcctgggttcaagcgattctcttgtctcagcctcccaagtagctgggattacagagagacggtatctcgccgtgttgctcaggcaggtctcaaactcctgggctcaaatgatcctgccgcctcagcctcccacagtgctgggattatagacgtgagtccccatgcccagcctccctcgttatttttatctttggacctgcagtttaaaagatgcctaccctgtaagtgatggttggttcatttcctcacaagcaacagtgccagcagagtcacgtgcaacgtgatgttttggttgactaggaaaggcagatttttggtaaatttgggaattattgaggttctaagctagggccttaaatagttcagctgtgtcagctctgagaaggagctcggaaacggagagcagcctcctggcccacatcagcatggctggtttctacccacgaaggccctgttcctgtgatgtagtaagtcagggggcatcccacatcccctgccatgggtcagtcccctcagcgcggtggaggggaagctctagggctg

SEQ ID NO: 278576 - DNA, 1510 bp, Homo sapiens
  misc_feature (40)..(40): n is a, c, g, or t
aaaggctaggtaggaggctggggtgaattcggccgagggncggtccttctcaacaggcctgtgccccgcggggtcgcctcctctgggacgccttcctcccggcacagaaggcctccccctctcaccaggccctcgcccgctggtccgccaggccccgccttttttgcggcccccattgtgctgctggacccgacgagcagtgttgacagtgaaccccacgtagacgcggccccggtaccgggggttcaggcagtagagcaggtagacgccgaaaaagcgccctggcctcgccgcgacccccgcgggacccatcgggccttggggttcgggaaccacagcagggggttgattgccgtgacctagggtccagggagggctggatcgctagggctgcagggtgcttgcttcggaacaagctctcggggactatccggaggcagcctgcaggaagccgtagcgccggtacgtgcccctctcctgtctggaggcgggtgtagaagtccgaccgcggaagccagactgctgtccagtcggcgagcgcgtaccattcagcatcggctccgcccgagtcccaccttcctcaggctctgattggctgacacatggcaagcgcgaaaagcctggaccgctggaaagcccggctgcttgagggcggaagtactgcgttgacgtacgccttagtaagggcggaagtgagttttccagcggaagtggctcctgtaaggcagcaaggtagcgtggccggcgcccgagctggggttgtgtccctgctgggctgccgttccagctggactgccgccatggaactcagcgccgaatacctccgcgagaagctgcagcgggacctggaggcggagcatgtgcttccgagtcctggtggtgtcggccaagttcgaggggaaaccgctgcttcagagacacaggctggagtgcaatggcacgatctcggctcaccacaacctccgcctcctgggttcaagcgattctcttgtctcagcctcccaagtagctgggattacaggtatgtgctaccacgcccggctaatcttgtatttttaatagagacagggtttctccatgttgttcaggctggtcttgaactcccgacctcaggtgatccacccgcctcggcctccaaaagtgctgggattacaggcgtgtgccacttatgcccagctttcttttttgttttcttcccacacctctactgcccaagtagttttctatggcatactgaagaggtggggcctggaaatgacgccatgggtggtccctgcttgatatgaaccaaaccttactatggctaagacgcccatcccaaacagccctgtgtcctcccatctcaggatcacctgctaagttgggtatcaaaacctattcccacacccactccccacaaggcctgacagacctgttcctgccaggtctctcacagaggtcaggcccaggcagaacccacaggaagggctagagaggcagaagcactcactacacgggggaaggctctgaa

SEQ ID NO: 278577 - DNA, 896 bp, Homo sapiens
gggaagcttctctattaccctccttaccaccacagctccagccaagcttggagtgatctgcaaacccaatatgtgagtttagtgtatagaaaacacatgaatgaaaggcaaaaggggccaacattggtatttgggtttttttttttttgagctgtcactaggctcctgaccttccctctgaactccaccctgcagggcaggccaacagacaagctttctttctttctttttcttttttttatatgagatggagactcgctctctcgcccaggctgcaatgcagtagcacgatctccgctcactgtaacctccccctcctgggttcaagcgattcttctgcctcagcctcccgagtagctgggattacaggtgcacaccaccacatccggttaatttttgtatttttaagagacggtatctcgccgtgttgctcaggcaggtctcaaactcctgggctcaaatgatcctgccgcctcagcctcccacagtgctgggattatagacgtgagtccccatgcccagcctccctcgttatttttatctttggacctgcagtttaaaagatgcctaccctgtaagtgatggttggttcatttcctcacaagcaacagtgccagcagagtcacgtgcaacgtgatgttttggttgactaggaaaggcagatttttggtaaatttgggaattattgaggttctaagctagggccttaaatagttcagctgtgtcagctctgagaaggagctcggaaacggagagcagcctcctggcccacatcagcatggctggtttctacccacgaaggccctgttcctgtgatgtagtaagtcagggggcatcccacatcccctgccatgggtcagtcccctcagcgcggtggaggggaagctctagggctg

SEQ ID NO: 278578 - DNA, 1063 bp, Homo sapiens
  misc_feature (40)..(40): n is a, c, g, or t
aaaggctaggtaggaggctggggtgaattcggccgagggncggtccttctcaacaggcctgtgccccgcggggtcgcctcctctgggacgccttcctcccggcacagaaggcctccccctctcaccaggccctcgcccgctggtccgccaggccccgccttttttgcggcccccattgtgctgctggacccgacgagcagtgttgacagtgaaccccacgtagacgcggccccggtaccgggggttcaggcagtagagcaggtagacgccgaaaaagcgccctggcctcgccgcgacccccgcgggacccatcgggccttggggttcgggaaccacagcagggggttgattgccgtgacctagggtccagggagggctggatcgctagggctgcagggtgcttgcttcggaacaagctctcggggactatccggaggcagcctgcaggaagccgtagcgccggtacgtgcccctctcctgtctggaggcgggtgtagaagtccgaccgcggaagccagactgctgtccagtcggcgagcgcgtaccattcagcatcggctccgcccgagtcccaccttcctcaggctctgattggctgacacatggcaagcgcgaaaagcctggaccgctggaaagcccggctgcttgagggcggaagtactgcgttgacgtacgccttagtaagggcggaagtgagttttccagcggaagtggctcctgtaaggcagcaaggtagcgtggccggcgcccgagctggggttgtgtccctgctgggctgccgttccagctggactgccgccatggaactcagcgccgaatacctccgcgagaagctgcagcgggacctggaggcggagcatgtgcttccgagtcctggtggtgtcggccaagttcgaggggaaaccgctgcttcagagacacaggctggtgaacgcgtgcctagcagaagagctcccgcacatccatgcctttgaacagaaaaccctgaccccagaccagtgggcacgtgagcgacagaaatgagggactgggatctgcacagccattaaattataaatctgga

SEQ ID NO: 278579 - DNA, 1087 bp, Homo sapiens
  misc_feature (40)..(40): n is a, c, g, or t
aaaggctaggtaggaggctggggtgaattcggccgagggncggtccttctcaacaggcctgtgccccgcggggtcgcctcctctgggacgccttcctcccggcacagaaggcctccccctctcaccaggccctcgcccgctggtccgccaggccccgccttttttgcggcccccattgtgctgctggacccgacgagcagtgttgacagtgaaccccacgtagacgcggccccggtaccgggggttcaggcagtagagcaggtagacgccgaaaaagcgccctggcctcgccgcgacccccgcgggacccatcgggccttggggttcgggaaccacagcagggggttgattgccgtgacctagggtccagggagggctggatcgctagggctgcagggtgcttgcttcggaacaagctctcggggactatccggaggcagcctgcaggaagccgtagcgccggtacgtgcccctctcctgtctggaggcgggtgtagaagtccgaccgcggaagccagactgctgtccagtcggcgagcgcgtaccattcagcatcggctccgcccgagtcccaccttcctcaggctctgattggctgacacatggcaagcgcgaaaagcctggaccgctggaaagcccggctgcttgagggcggaagtactgcgttgacgtacgccttagtaagggcggaagtgagttttccagcggaagtggctcctgtaaggcagcaaggtagcgtggccggcgcccgagctggggttgtgtccctgctgggctgccgttccagctggactgccgccatggaactcagcgccgaatacctccgcgagaagctgcagcgggacctggaggcggagcatgtgcttccgagtcctggtggtgtcggccaagttcgaggggaaaccgctgcttcagagacacaggctggtgaacgcgtgcctagcagaagagctcccgcacatccatgcctttgaacagaaaaccctgaccccagaccagtgggcacgtgagcgacagaaatgagggactgggatctgcacagccattaaattataaatctggaaaaaaaaaatatataaacccggcc

SEQ ID NO: 278580 - DNA, 1906 bp, Homo sapiens
  misc_feature (40)..(40): n is a, c, g, or t
  misc_feature (1608)..(1608): n is a, c, g, or t
aaaggctaggtaggaggctggggtgaattcggccgagggncggtccttctcaacaggcctgtgccccgcggggtcgcctcctctgggacgccttcctcccggcacagaaggcctccccctctcaccaggccctcgcccgctggtccgccaggccccgccttttttgcggcccccattgtgctgctggacccgacgagcagtgttgacagtgaaccccacgtagacgcggccccggtaccgggggttcaggcagtagagcaggtagacgccgaaaaagcgccctggcctcgccgcgacccccgcgggacccatcgggccttggggttcgggaaccacagcagggggttgattgccgtgacctagggtccagggagggctggatcgctagggctgcagggtgcttgcttcggaacaagctctcggggactatccggaggcagcctgcaggaagccgtagcgccggtacgtgcccctctcctgtctggaggcgggtgtagaagtccgaccgcggaagccagactgctgtccagtcggcgagcgcgtaccattcagcatcggctccgcccgagtcccaccttcctcaggctctgattggctgacacatggcaagcgcgaaaagcctggaccgctggaaagcccggctgcttgagggcggaagtactgcgttgacgtacgccttagtaagggcggaagtgagttttccagcggaagtggctcctgtaaggcagcaaggtagcgtggccggcgcccgagctggggttgtgtccctgctgggctgccgttccagctggactgccgccatggaactcagcgccgaatacctccgcgagaagctgcagcgggacctggaggcggagcatgtgtgagttgagccgccggacaaggggaaaagagctcggggggcgggttcggcaccattcatattcttccgctcggtaggaggtggaggacacgaccctcaaccgttgctcctgtagcttccgagtcctggtggtgtcggccaagttcgaggggaaaccgctgcttcagagacacagcttggatcctagcatgactatacattgtgacatggtcattacatatggattagaccaactggagaattgccagacttgtggtaccgattatatcatctcagtcttgaatttactcacgctgattgttgaacagataaatacgaaactgccatcatcatttgtagaaaaactgtttataccatcatctaaactactattcttgcgttatcataaagaaaaagaggttgttgctgtagcccatgctgtttatcaagcaatgctcagcttgaagaatattcctgttttggagactgcctataagttaatattgggagaaatgacttgtgccctaaacaacctcctgcacagtctgcaacttcctgaggcctgttctgaaataaaacatgaggcttttaagaatcatgtgttcaatgtagacaatgcaaaatttgtagttaaatttgacctcagtgccctgactacaattggaaatgccaaaaactcactaataggggtgagtctttaattgtaatgactttgttttatccacagttaagccttttctcattacatatttatgtatttcactgtnatgtcaacatgtctgcagaatcactgtatgtaacaaacagccatatttaagacatgcctggataaataaaattggtaggaatgttttcttgccattatatttaacttttcttctttttccttgacaaatcttgataagtttttttatattagttttattttctagaaaatgtcttatgaatttctcctatttgctctagcatgcttacagaaaatgtcagtgtttcttacagctcaaatttgtatagttgttttaaaatgcggtctctttcttcttcccctggtacttttttctttct

SEQ ID NO: 278581 - DNA, 969 bp, Homo sapiens
ccccagcagccgccccagccgcagccgcagccgcccggctcgtctgccaccaccccgggcggcggcagcggcggctcgctcagcgccatgccgccgcccagccccgactcagagaacggcttctaccccgggctgccgtcgtccatgaacccggccttcttccctagcttctcgcccgtgtcgccgcacggctgcactgggctcagcgttccgacgagcggcggcggcggcggcggcttcggcggccccttctcggctaccgctgtgccccctccgccgccgcccgccatgaatatacctcaacagcagcccccgccgcccgcggcgccgcagcagccgcagagccggaggtcgcccgtcagcccgcagctccagcagcagcaccaggcggcggccgccgccttcctgcagcagaggaactcctataaccaccaccagcctcttctgaaacagtctccctggagcaaccatcagagcagtggctggggcactggaagtatgtcctggggagcaatgcatggcagagatcatcgtagaaccggaaacatgggaatcccaggaactatgaatcagatatctccattgaagaaaccgttttctggtaatgtcatagcaccaccgaaatttactcgctcaactccatcactgactccaaaatcttggattgaagataatgtgttcagaacagacaacaatagtaatacactcttacccttacaggatcgaagtagaatgtatgacagtttgaatatgcactctttggaaaattcccttatcgatattatgagagcagagcatgatcctcttaagggtaggtgactttttaaaaaaatatatgtttatattatacaccaatttgcttatcttactagtttttatatgaaagtgaaacctaagtagcacctatatccaatataaaactctcttacacatttattaatgagaatctttgtttttatgaaatgccat

SEQ ID NO: 278582 - DNA, 258 bp, Homo sapiens
aaaataatattagggcttttttgcatctaatttaaatttatcttcactaattcaccgattattttttctaaatgtggcctaatacgttgattagactttttttttctttcagtatttttattattttcttgaagttcccttatggctattgcaagtgaggtttttgttttgttttgtttttttcttaaacctttagaggatggaatgaggatttaagatagagctttattttttgttttctttctttctttcgttggg

SEQ ID NO: 278583 - DNA, 2109 bp, Homo sapiens
ccccagcagccgccccagccgcagccgcagccgcccggctcgtctgccaccaccccgggcggcggcagcggcggctcgctcagcgccatgccgccgcccagccccgactcagagaacggcttctaccccgggctgccgtcgtccatgaacccggccttcttccctagcttctcgcccgtgtcgccgcacggctgcactgggctcagcgttccgacgagcggcggcggcggcggcggcttcggcggccccttctcggctaccgctgtgccccctccgccgccgcccgccatgaatatacctcaacagcagcccccgccgcccgcggcgccgcagcagccgcagagccggaggtcgcccgtcagcccgcagctccagcagcagcaccaggcggcggccgccgccttcctgcagcagaggaactcctataaccaccaccagcctcttctgaaacagtctccctggagcaaccatcagagcagtggctggggcactggaagtatgtcctggggagcaatgcatggcagagatcatcgtagaaccggaaacatgggaatcccaggaactatgaatcagatatctccattgaagaaaccgttttctggtaatgtcatagcaccaccgaaatttactcgctcaactccatcactgactccaaaatcttggattgaagataatgtgttcagaacagacaacaatagtaatacactcttacccttacaggtgagatctagtttgcagttgccagcttggggctcagattcactccaagatagttggtgcactgcagccggaacatccagaatagaccaggatcgaagtagaatgtatgacagtttgaatatgcactctttggaaaattcccttatcgatattatgagagcagagcatgatcctcttaagggtcgattgagctatccacatccaggaactgacaatctgttgatgttaaatggtcgttcttccctctttccaatagatgatggcttgcttgatgatggtcacagtgatcaagttggagttttaaattcacccacctgttattcagctcaccaaaatggagagcgaatagaacgcttctctcgaaaagtttttgttggtggtcttcctccagatattgatgaagatgaaataactgctagcttcagaagatttgggcctttggtagtagattggcctcataaagcagaaagcaagtcctattttccaccaaaaggctatgcatttcttctctttcaagaagagagctcagttcaggcactcattgatgcttgtattgaagaagatggaaaactctatctgtgtgtttctagccctactatcaaggacaaaccagttcaaatacgtccttggaatttaagtgatagtgattttgtaatggatggttctcagcctttggatccccgaaaaacaatttttgttggaggtgttcctaggccattaagggctgtggaacttgctatgatcatggaccggctgtatggtggagtttgttatgcaggaattgatacagatcctgagctaaaatacccaaaaggtgctgggcgagttgctttctccaatcagcagagctatattgctgccattagtgctcggtttgttcagcttcagcatggtgatattgataaacgtgtggaggtaaagccatatgtgctagatgaccagatgtgtgatgaatgccagggcgcacgctgtggtggaaaatttgctccctttttttgtgccaatgtcacttgcctgcagtattactgtgagttttgttgggcaaatatccactctcgtgctggacgtgagttccataagccattggtaaaggaaggtgctgatcgcccacgtcagatccacttccgctggaactaagaatagcaaactggcctctgtttaacaaggaaagaaagggtgcatgtggcttactgtgtctgaagatactgacatgcagaagaaataagtgcattcttctgcttttcaccccagctatcaatacatgcatctttatcagcagccaaaacactacaagcctcttgtttttcaccaaaaccctacatctcaggcttactaatttttgtgatattttcatgttcaaataaaatgtttttttgtattttcaaaaag

SEQ ID NO: 278584 - DNA, 2019 bp, Homo sapiens
ccccagcagccgccccagccgcagccgcagccgcccggctcgtctgccaccaccccgggcggcggcagcggcggctcgctcagcgccatgccgccgcccagccccgactcagagaacggcttctaccccgggctgccgtcgtccatgaacccggccttcttccctagcttctcgcccgtgtcgccgcacggctgcactgggctcagcgttccgacgagcggcggcggcggcggcggcttcggcggccccttctcggctaccgctgtgccccctccgccgccgcccgccatgaatatacctcaacagcagcccccgccgcccgcggcgccgcagcagccgcagagccggaggtcgcccgtcagcccgcagctccagcagcagcaccaggcggcggccgccgccttcctgcagcagaggaactcctataaccaccaccagcctcttctgaaacagtctccctggagcaaccatcagagcagtggctggggcactggaagtatgtcctggggagcaatgcatggcagagatcatcgtagaaccggaaacatgggaatcccaggaactatgaatcagatatctccattgaagaaaccgttttctggtaatgtcatagcaccaccgaaatttactcgctcaactccatcactgactccaaaatcttggattgaagataatgtgttcagaacagacaacaatagtaatacactcttacccttacaggatcgaagtagaatgtatgacagtttgaatatgcactctttggaaaattcccttatcgatattatgagagcagagcatgatcctcttaagggtcgattgagctatccacatccaggaactgacaatctgttgatgttaaatggtcgttcttccctctttccaatagatgatggcttgcttgatgatggtcacagtgatcaagttggagttttaaattcacccacctgttattcagctcaccaaaatggagagcgaatagaacgcttctctcgaaaagtttttgttggtggtcttcctccagatattgatgaagatgaaataactgctagcttcagaagatttgggcctttggtagtagattggcctcataaagcagaaagcaagtcctattttccaccaaaaggctatgcatttcttctctttcaagaagagagctcagttcaggcactcattgatgcttgtattgaagaagatggaaaactctatctgtgtgtttctagccctactatcaaggacaaaccagttcaaatacgtccttggaatttaagtgatagtgattttgtaatggatggttctcagcctttggatccccgaaaaacaatttttgttggaggtgttcctaggccattaagggctgtggaacttgctatgatcatggaccggctgtatggtggagtttgttatgcaggaattgatacagatcctgagctaaaatacccaaaaggtgctgggcgagttgctttctccaatcagcagagctatattgctgccattagtgctcggtttgttcagcttcagcatggtgatattgataaacgtgtggaggtaaagccatatgtgctagatgaccagatgtgtgatgaatgccagggcgcacgctgtggtggaaaatttgctccctttttttgtgccaatgtcacttgcctgcagtattactgtgagttttgttgggcaaatatccactctcgtgctggacgtgagttccataagccattggtaaaggaaggtgctgatcgcccacgtcagatccacttccgctggaactaagaatagcaaactggcctctgtttaacaaggaaagaaagggtgcatgtggcttactgtgtctgaagatactgacatgcagaagaaataagtgcattcttctgcttttcaccccagctatcaatacatgcatctttatcagcagccaaaacactacaagcctcttgtttttcaccaaaaccctacatctcaggcttactaatttttgtgatattttcatgttcaaataaaatgtttttttgtattttcaaaaag

SEQ ID NO: 278585 - DNA, 422 bp, Homo sapiens
ctttctttcgttgggtgggtatggggaagacaactgctcatttctgatgaaaacttctatgctattgaaggtgagatctagtttgcagttgccagcttggggctcagattcactccaagatagttggtgcactgcagccggaacatccagaatagaccaggtaggctgcacagtgtatactttttaggatttcggttaggagtttagtatttatattatgagtaggatttattatttactttcttattatacctattgaaacatatgttagaggacactgaagcaatttattttttaaggatcacctgctttgaactatttaatgtaagaaattttttattttcaaatttaagagtaatccttttataattctaaaacataataaactttttttggaaaaaggaattatatacacaagagca

SEQ ID NO: 278586 - DNA, 507 bp, Homo sapiens
agactcctctgcgggagaggagaatagctgtactctaagcagttcgcagggagcatctttcagcagctgaaacagctttgcggccttgctgtaatgaagatctgccagcacccggtgttgtttcctaaggtgttcatcaccaacctagaaccaaaccaaaacaagcaacaaatccttcacgagaaagaaagaaaacaactgtgtaagcagacatcagtgtaaaccttagcactgtctcttgatgagataagaggaggatggcagtgacaggagtgtggtggcgagccagtcacctgcagtcaaccacggctcattgctctcaccatgcctgttacatgaaggtatgtatgtataggaaaaagcactgaaaaactctccagtttcaggcatccactggggatcttggaacgcatcctccaaggataagtggggtctactgtacaacacttaagtataaccctcttcactattaaccaaatgatattaaaataagcaaagaaaaacaac

SEQ ID NO: 278587 - DNA, 468 bp, Homo sapiens
agactcctctgcgggagaggagaatagctgtactctaagcagttcgcagggagcatctttcagcagctgaaacagctttgcggccttgctgtaatgaagatctgccagcacccggtgttgtttcctaaggtgttcatcaccaacctagaaccaaaccaaaacaagcaacaaatccttcacgagaaagaaagaaaacaactgtgtaagcagacatcagtgtaaaccttagcactgtctcttgatgagataagaggaggatggcagtgacaggagtgtggtggcgagccagtcacctgcagtcaaccacggctcattgctctcaccatgcctgttacatgaagtttcaggcatccactggggatcttggaacgcatcctccaaggataagtggggtctactgtacaacacttaagtataaccctcttcactattaaccaaatgatattaaaataagcaaagaaaaacaac

SEQ ID NO: 278588 - DNA, 322 bp, Homo sapiens
aacctggcaccttatacggtcaccgcttgtgggattgaagcgatcgctttagcaaatctaagagtggccgcacaaaagcttattgcctgccagagagcttaaggtgccacacaaggaaagccacagtcaactgtgactcagtttccactgagaaaattctcctctgctttgaagtctgtcccctccccataacttaatcccttagcagaaactgcatgtctgttgcctccctcccgcacctttctgcacaccggcttcactccccggagagcacggctaccgacaaatcgcttccccttctgggttttggttgcttaggcgc

SEQ ID NO: 278589 - DNA, 787 bp, Homo sapiens
tcagaatgtcatcgacaagtttcaaaaatatctcgtccacattgaagttatccttggcacttgcttcacagaaccgcatcccagtgatctgctgtgcaaactgagaagaaacacacacctatttcctctgtgtggggcctcacagaccagcgtgcgagcatgagaatgaatttaaaggagcacgaagtcaaaaaagtgcaaacaaattaggaggatgtgactgagttatcactgtattgataatttctttgtaatttttaaaataagtaatttattaaaagaaacagtacctcaagcgctaagcacagtgtgtggcaaccgtgcctcccacgccctctcaccttttccccctgctgcctggtgatttctctgtccgtttcacagtccaacttatttccaactaagagaagctctgcatcttctgaagcatactgtggaattttaaaagaagccacatttcaaagatgggcatcgccatatactgacagcagaaatataaaccgatacagtatttttcgctaatttacatttgtccattcacttccactgtctttgaggttctaccagttcccaggcaggactgggcagcagtgcaaggcagggctcactgtgtcttagaaagaactagggcacaggcattaagaaccacaatgctcttggctgttgacccaacaattcccaagacctcttcctaaggaaatgattcaacatacaggcaaagctctacactcaaaatggttatcaactgaaaaacctacaagtcaaacaaaatggctcaagaatcaag

SEQ ID NO: 278590 - DNA, 631 bp, Homo sapiens
  misc_feature (48)..(48): n is a, c, g, or t
ggggctctagtgtatattcatggcccgttggctttacatttgcattantgatgatggtgcagtcagcctcagtttccaaagccggaaaaggatcctctagtagccacggtgtggcagctgctctgaaccaggacctggacccggacccaaagtgccatgtctttaatgttagctcccagcgatgccagatgggatcagcacagccctgcctctgctgctaattgttcctctaaagtaatcgccatgcgttctttgggcttcatctttaaaggaatgaagcaactgagattattctggaaaaccttttggcagttagtgaaattagagtacaactaagaacattttcagacctccactgtggatgacctgggtataatctcacaaatcgatgggactgcaaggattgtaaactgaaatgaacatgattatactctgttggaagagcctaagaggaaactgatgccatgagtttcagagagtaatgcttaaccccagttacacaggatgccgtcttgtgtttcctcttgtttagttacccactacagtgattttgtgatctgctaatgggttgccacccacaaccattgctttagcacttttacttcaaatcaatgaaggattgataaaagtt

SEQ ID NO: 278591 - DNA, 1014 bp, Homo sapiens
  misc_feature (48)..(48): n is a, c, g, or t
  misc_feature (785)..(785): n is a, c, g, or t
  misc_feature (787)..(787): n is a, c, g, or t
  misc_feature (793)..(793): n is a, c, g, or t
  misc_feature (797)..(797): n is a, c, g, or t
  misc_feature (808)..(809): n is a, c, g, or t
  misc_feature (812)..(812): n is a, c, g, or t
  misc_feature (814)..(814): n is a, c, g, or t
  misc_feature (818)..(820): n is a, c, g, or t
  misc_feature (856)..(856): n is a, c, g, or t
  misc_feature (858)..(858): n is a, c, g, or t
  misc_feature (861)..(861): n is a, c, g, or t
  misc_feature (878)..(879): n is a, c, g, or t
  misc_feature (884)..(884): n is a, c, g, or t
  misc_feature (899)..(899): n is a, c, g, or t
  misc_feature (904)..(904): n is a, c, g, or t
  misc_feature (906)..(906): n is a, c, g, or t
  misc_feature (916)..(916): n is a, c, g, or t
  misc_feature (922)..(923): n is a, c, g, or t
  misc_feature (933)..(934): n is a, c, g, or t
  misc_feature (940)..(940): n is a, c, g, or t
  misc_feature (942)..(942): n is a, c, g, or t
  misc_feature (946)..(946): n is a, c, g, or t
  misc_feature (952)..(952): n is a, c, g, or t
  misc_feature (959)..(959): n is a, c, g, or t
ggggctctagtgtatattcatggcccgttggctttacatttgcattantgatgatggtgcagtcagcctcagtttccaaagccggaaaaggatcctctagtagccacggtgtggcagctgctctgaaccaggacctggacccggacccaaagtgccatgtctttaatgttagctcccagcgatgccagatgggatcagcacagccctgcctctgctgctaattgttcctctaaagtaatcgccatgcgttctttgggcttcatctttaaaggaatgaagcaactgagattattctggaaaaccttttggcagttagtgaaattagagtacaactaagaacattttcagacctccactgtggatgacctgggtataatctcacaaatcgatgggactgcaaggattgtaaactgaaatgaacatgattatactctgttggaagagcctaagaggaaactgatgccatgagtttcagagagtaatgcttaaccccagttacacaggatgccgtcttgtgtttcctcttgtttagttacccactacagtgattttgtgatctgctaatgggttgccacccacaaccattgctttagcacttttacttcaaatcaatgaaggattgataaaagttctcctggtgtctccgcagagtgccttccaggaacagatctttgcatagaatatcagtggtttccttttttgtttcaaatagtggtcagaaaatacccagtgttgactcaccaaggcaatcagcttcctttttccctttttttgtttttttttgntntttttncaanttttatatctnngcntnattnnnttatttattttttgagacggagttccactctgtcgncnagntggagtgaatggtcaanntgggntcactggaacctcanctccngntcaagcaatntccggnncagccctganngggganangggngacctntaaaaangggttaccctttgcagaaggctaatcgaacggaagacgctcatccacggggatag

SEQ ID NO: 278592 - DNA, 427 bp, Homo sapiens
cccccccccccccccttcctttataaaaaagtaatcgccatgcgttctttgggcttcatctttaaaggaatgaagcaactgagattattctggaaaaccttttggcagttagtgaaattagagtacaactaagaacattttcagacctccactgtggatgacctgggtataatctcacaaatcgatgggactgcaaggattgtaaactgaaatgaacatgattatactctgttggaagagcctaagaggaaactgatgccatgagtttcagagagtaatgcttaaccccagttacacaggatgccgtcttgtgtttcctcttgtttagttacccactacagtgattttgtgatctgctaatgggttgccacccacaaccattgctttagcacttttacttcaaatcaatgaaggattgataaaagtt

SEQ ID NO: 278593 - DNA, 811 bp, Homo sapiens
gagtaatgctgctatgaaatgcatagtgcacgtagctgagtccctgctttcagttctttgggcatatactcaggagtggaatgctggatcctatcgtaattctgtttacttttttgaggaaccaccatgctgttgccgcagtatatgcaccattttacattcccaccagcaacacacaaaggttctgatatttccacatcctcaccaacacttgatttctttgttcttttttgttttagtagagacagggtttcaaccatgttgcccaggttggtctcaaactcctgagctcaggcaatccacccgccttggcctcccaaagtgctaggattacaggtgtgagccaccacacccagctattttttctttcgttttttaattttaaagttggggggggtctcaatttgttaccctggctggtctcgaactcccggacttaagcgatcctctggctccaagcccactaccagtctcaggtttctttactaaaagatcactacctttttttctcttatctgctgccatgtgagatgtggctttcaccttccgccatgattgtgaggccttcccagccacgtggaactgtaagtccaagtagagccctctttggtaggattacctagaccctatacacggattaacatagtcaaggattcatagacaaaaagatataaatatgcctagcatagctcagggagggattgacgggcagaaccaagggacgagaggatcacaacaacggtgggcaacccaaaacaacgcggggaggcacgagtcgaagcagagagaaacacaacgcgatgaagagata

SEQ ID NO: 278594 - DNA, 2803 bp, Homo sapiens
  misc_feature (231)..(231): n is a, c, g, or t
  misc_feature (234)..(234): n is a, c, g, or t
  misc_feature (250)..(250): n is a, c, g, or t
ggcgcctgaggctgccgggtagcccagcaggccgagggaggaagtagcgtggagccggtgccgagccggggcgaagctggatcccctagatatactgtcttcaagctcactgatattttcctctgcttgatccattgtgctgttgagagcctctagtaaatttttcagactgacagaccaaggatgcagctgctactaccggaggtgtgtggcaccttacctcagcaaggnatnaaccgagtggccatgntacggccggaggtcggccgcgtggctggaagacatggccactccagtcggtgttgagcacggcgagcagtctcaggcctttagtgatgatgattaaaggtggtggctgtggccttgaaaacagtcatgtgaaaactcatcaccttaaggtgttaagtgtaaggatcttcatgatgaaatttctgtaaatggtgcagtcagcctcagtttccaaagccggaaaaggatcctctagtagccacggtgtggcagctgctctgaaccaggacctggacccggacccaaagtgccatgtctttaatgttagctcccagcgatgccagatgggatcagcacagccctgcctctgctgctaattgttcctctaaagtaatcgccatgcgttctttgggcttcatctttaaaggaatgaagcaactgagattattctggaaaaccttttggcagttagtgaaattagagtacaactaagaacattttcagacctccactgtggatgacctgggtataatctcacaaatcgatgggactgcaaggattgtaaactgaaatgaacatgattatactctgttggaagagcctaagaggaaactgatgccatgagtttcagagagtaatgcttaaccccagttacacaggatgccgtcttgtgtttcctcttgtttagttacccactacagtgattttgtgatctgctaatgggttgccacccacaaccattgctttagcacttttacttcaaatcaatgaaggattgataaaagttctcctggtgtctccgcagagtgccttccaggaacagatctttgcatagaatatcagtggtttccttttttgtttcaaatagtggtcagaaaatacccagtgttgactcaccaaggcaatcagcttcctttttccctttttttgttttttttttaacattttatattttggctttattttattttattttattttataacattttatatttttgctttattttattttattttattttttgagacggagttccactctgtcgccaggctggagtgaagtggtacaatcttggctcactgcaacctccacctcccgggttcaagcaattctcctggctcagcctcctgagtgctgggactacaggcgcgtaccttctttagtagagactgggtttcaccatgttggccaggatggtctctatctcctgaccttgtgatctgcctgcctcagcttcccaaagtgctgagatgacaggtgtgagccatcagacccagcatttttttttttaatttaaatttaaattttttttcatttttttgagaggttttttttgtttgtttggttgttgttgttgttgttgttgttgttgtttttgagacagtcttgctctgtcacccaggctgggagtgcagtggcatgatctctgcaacctctacctcccaggttcaagcaattcttgtgcctcagcctcccaagtaactgggactacaggtgcacgctaccacacctggctgatttttttttgttttagtagagacagggtttcaaccatgttgcccaggttggtctcaaactcctgagctcaggcaatccacccgccttggcctcccaaagtgctaggattacaggtgtgagccaccacacccagctattttttctttcgttttttaattttaaagttggggggggtctcaatttgttaccctggctggtctcgaactcccggacttaagcgatcctctggctccaagcccactaccagtctcaggtttctttactaaaagatcactacctttttttctcttatctgctgccatgtgagatgtggctttcaccttccgccatgattgtgaggccttcccagccacgtggaactgtaagtccaataaacctcttttgtaaattaaaaaaaaatcactatttaagatactaggatggattgtgactgttgaggagtacttacatatcctacatttgactacattatttccaaaccaagtattccatccaaaggaacatactgctatcatagagaccaaggagggactgtttaaggttgccaaggtgaagcgagctgagaggctttgtcctcgtgccagtaactctgaaatctctcttaattcctgctgtccaggcagcagaatgccatggtttccccaagtaggtagctgctttagcagttaaagcccaaatgtctgttctgttgatcagaggtctctgaatttctgaagtggtgtttcgtttctggtgactgagttaatcctttacaatccctcttgtaaagtgtgctaatagaaagaatccacctttcaaagctgcagaaccagaccgtgccctaaattgaccaacgtagctgatgtgcctcaggaagtctcttgccagctgtccctgtgaagaccccctcctcccccccagctgctgccttgcacactgaagcatctcagactgtgcaaagccgtgtagtcatcaagacagtaaatcccagggcttggttaagtgctgtgtgataacttgtttggatgagacttaacttaaaaccacttacaataaacttgggaaactaccgtca

SEQ ID NO: 278595 - DNA, 2782 bp, Homo sapiens
  misc_feature (231)..(231): n is a, c, g, or t
  misc_feature (234)..(234): n is a, c, g, or t
  misc_feature (250)..(250): n is a, c, g, or t
  misc_feature (1565)..(1565): n is a, c, g, or t
  misc_feature (1574)..(1574): n is a, c, g, or t
  misc_feature (1587)..(1587): n is a, c, g, or t
ggcgcctgaggctgccgggtagcccagcaggccgagggaggaagtagcgtggagccggtgccgagccggggcgaagctggatcccctagatatactgtcttcaagctcactgatattttcctctgcttgatccattgtgctgttgagagcctctagtaaatttttcagactgacagaccaaggatgcagctgctactaccggaggtgtgtggcaccttacctcagcaaggnatnaaccgagtggccatgntacggccggaggtcggccgcgtggctggaagacatggccactccagtcggtgttgagcacggcgagcagtctcaggcctttagtgatgatgattaaaggtggtggctgtggccttgaaaacagtcatgtgaaaactcatcaccttaaggtgttaagtgtaaggatcttcatgatgaaatttctgtaaatggtgcagtcagcctcagtttccaaagccggaaaaggatcctctagtagccacggtgtggcagctgctctgaaccaggacctggacccggacccaaagtgccatgtctttaatgttagctcccagcgatgccagatgggatcagcacagccctgcctctgctgctaattgttcctctaaagtaatcgccatgcgttctttgggcttcatctttaaaggaatgaagcaactgagattattctggaaaaccttttggcagttagtgaaattagagtacaactaagaacattttcagacctccactgtggatgacctgggtataatctcacaaatcgatgggactgcaaggattgtaaactgaaatgaacatgattatactctgttggaagagcctaagaggaaactgatgccatgagtttcagagagtaatgcttaaccccagttacacaggatgccgtcttgtgtttcctcttgtttagttacccactacagtgattttgtgatctgctaatgggttgccacccacaaccattgctttagcacttttacttcaaatcaatgaaggattgataaaagttctcctggtgtctccgcagagtgccttccaggaacagatctttgcatagaatatcagtggtttccttttttgtttcaaatagtggtcagaaaatacccagtgttgactcaccaaggcaatcagcttcctttttccctttttttgttttttttttaacattttatattttggctttattttattttattttattttataacattttatatttttgctttattttattttattttattttttgagacggagttccactctgtcgccaggctggagtgaagtggtacaatcttggctcactgcaacctccacctcccgggttcaagcaattctcctggctcagcctcctgagtgctgggactacaggcgcgtaccttctttagtagagactgggtttcaccatgttggccaggatggtctctatctcctgaccttgtgatctgcctgcctcagcttcccaaagtgctgagatgacaggtgtgagccatcagacccagcatttttttttttaatttaaatttaaattttttttcatttttttgagaggtttggtnggttgtcgntgtgtcgtgtttngagacagtcttgctctgtcacccaggctgggagtgcagtggcatgatctctgcaacctctacctcccaggttcaagcaattcttgtgcctcagcctcccaagtaactgggactacaggtgcacgctaccacacctggctgatttttttttgttttagtagagacagggtttcaaccatgttgcccaggttggtctcaaactcctgagctcaggcaatccacccgccttggcctcccaaagtgctaggattacaggtgtgagccaccacacccagctattttttctttcgttttttaattttaaagttggggggggtctcaatttgttaccctggctggtctcgaactcccggacttaagcgatcctctggctccaagcccactaccagtctcaggtttctttactaaaagatcactacctttttttctcttatctgctgccatgtgagatgtggctttcaccttccgccatgattgtgaggccttcccagccacgtggaactgtaagtccaataaacctcttttgtaaattaaaaaaaaatcactatttaagatactaggatggattgtgactgttgaggagtacttacatatcctacatttgactacattatttccaaaccaagtattccatccaaaggaacatactgctatcatagagaccaaggagggactgtttaaggttgccaaggtgaagcgagctgagaggctttgtcctcgtgccagtaactctgaaatctctcttaattcctgctgtccaggcagcagaatgccatggtttccccaagtaggtagctgctttagcagttaaagcccaaatgtctgttctgttgatcagaggtctctgaatttctgaagtggtgtttcgtttctggtgactgagttaatcctttacaatccctcttgtaaagtgtgctaatagaaagaatccacctttcaaagctgcagaaccagaccgtgccctaaattgaccaacgtagctgatgtgcctcaggaagtctcttgccagctgtccctgtgaagaccccctcctcccccccagctgctgccttgcacactgaagcatctcagactgtgcaaagccgtgtagtcatcaagacagtaaatcccagggcttggttaagtgctgtgtgataacttgtttggatgagacttaacttaaaaccacttacaataaacttgggaaactaccgtca

SEQ ID NO: 278596 - DNA, 2704 bp, Homo sapiens
  misc_feature (231)..(231): n is a, c, g, or t
  misc_feature (234)..(234): n is a, c, g, or t
  misc_feature (250)..(250): n is a, c, g, or t
ggcgcctgaggctgccgggtagcccagcaggccgagggaggaagtagcgtggagccggtgccgagccggggcgaagctggatcccctagatatactgtcttcaagctcactgatattttcctctgcttgatccattgtgctgttgagagcctctagtaaatttttcagactgacagaccaaggatgcagctgctactaccggaggtgtgtggcaccttacctcagcaaggnatnaaccgagtggccatgntacggccggaggtcggccgcgtggctggaagacatggccactccagtcggtgttgagcacggcgagcagtctcaggcctttagtgatgatggtgcagtcagcctcagtttccaaagccggaaaaggatcctctagtagccacggtgtggcagctgctctgaaccaggacctggacccggacccaaagtgccatgtctttaatgttagctcccagcgatgccagatgggatcagcacagccctgcctctgctgctaattgttcctctaaagtaatcgccatgcgttctttgggcttcatctttaaaggaatgaagcaactgagattattctggaaaaccttttggcagttagtgaaattagagtacaactaagaacattttcagacctccactgtggatgacctgggtataatctcacaaatcgatgggactgcaaggattgtaaactgaaatgaacatgattatactctgttggaagagcctaagaggaaactgatgccatgagtttcagagagtaatgcttaaccccagttacacaggatgccgtcttgtgtttcctcttgtttagttacccactacagtgattttgtgatctgctaatgggttgccacccacaaccattgctttagcacttttacttcaaatcaatgaaggattgataaaagttctcctggtgtctccgcagagtgccttccaggaacagatctttgcatagaatatcagtggtttccttttttgtttcaaatagtggtcagaaaatacccagtgttgactcaccaaggcaatcagcttcctttttccctttttttgttttttttttaacattttatattttggctttattttattttattttattttataacattttatatttttgctttattttattttattttattttttgagacggagttccactctgtcgccaggctggagtgaagtggtacaatcttggctcactgcaacctccacctcccgggttcaagcaattctcctggctcagcctcctgagtgctgggactacaggcgcgtaccttctttagtagagactgggtttcaccatgttggccaggatggtctctatctcctgaccttgtgatctgcctgcctcagcttcccaaagtgctgagatgacaggtgtgagccatcagacccagcatttttttttttaatttaaatttaaattttttttcatttttttgagaggttttttttgtttgtttggttgttgttgttgttgttgttgttgttgtttttgagacagtcttgctctgtcacccaggctgggagtgcagtggcatgatctctgcaacctctacctcccaggttcaagcaattcttgtgcctcagcctcccaagtaactgggactacaggtgcacgctaccacacctggctgatttttttttgttttagtagagacagggtttcaaccatgttgcccaggttggtctcaaactcctgagctcaggcaatccacccgccttggcctcccaaagtgctaggattacaggtgtgagccaccacacccagctattttttctttcgttttttaattttaaagttggggggggtctcaatttgttaccctggctggtctcgaactcccggacttaagcgatcctctggctccaagcccactaccagtctcaggtttctttactaaaagatcactacctttttttctcttatctgctgccatgtgagatgtggctttcaccttccgccatgattgtgaggccttcccagccacgtggaactgtaagtccaataaacctcttttgtaaattaaaaaaaaatcactatttaagatactaggatggattgtgactgttgaggagtacttacatatcctacatttgactacattatttccaaaccaagtattccatccaaaggaacatactgctatcatagagaccaaggagggactgtttaaggttgccaaggtgaagcgagctgagaggctttgtcctcgtgccagtaactctgaaatctctcttaattcctgctgtccaggcagcagaatgccatggtttccccaagtaggtagctgctttagcagttaaagcccaaatgtctgttctgttgatcagaggtctctgaatttctgaagtggtgtttcgtttctggtgactgagttaatcctttacaatccctcttgtaaagtgtgctaatagaaagaatccacctttcaaagctgcagaaccagaccgtgccctaaattgaccaacgtagctgatgtgcctcaggaagtctcttgccagctgtccctgtgaagaccccctcctcccccccagctgctgccttgcacactgaagcatctcagactgtgcaaagccgtgtagtcatcaagacagtaaatcccagggcttggttaagtgctgtgtgataacttgtttggatgagacttaacttaaaaccacttacaataaacttgggaaactaccgtca

SEQ ID NO: 278597 - DNA, 2406 bp, Homo sapiens
  misc_feature (231)..(231): n is a, c, g, or t
  misc_feature (234)..(234): n is a, c, g, or t
  misc_feature (250)..(250): n is a, c, g, or t
ggcgcctgaggctgccgggtagcccagcaggccgagggaggaagtagcgtggagccggtgccgagccggggcgaagctggatcccctagatatactgtcttcaagctcactgatattttcctctgcttgatccattgtgctgttgagagcctctagtaaatttttcagactgacagaccaaggatgcagctgctactaccggaggtgtgtggcaccttacctcagcaaggnatnaaccgagtggccatgntacggccggaggtcggccgcgtggctggaagacatggccactccagtcggtgttgagcacggcgagcagtctcaggcctttagtgatgatgattaaaggtggtggctgtggccttgaaaacagtcatgtgaaaactcatcaccttaaggtgttaagtgtaaggatcttcatgatgaaatttctgtaaatggtgcagtcagcctcagtttccaaagccggaaaaggatcctctagtagccacggtgtggcagctgctctgaaccaggacctggacccggacccaaagtgccatgtctttaatgttagctcccagcgatgccagatgggatcagcacagccctgcctctgctgctaattgttcctctaaagtaatcgccatgcgttctttgggcttcatctttaaaggaatgaagcaactgagattattctggaaaaccttttggcagttagtgaaattagagtacaactaagaacattttcagacctccactgtggatgacctgggtataatctcacaaatcgatgggactgcaaggattgtaaactgaaatgaacatgattatactctgttggaagagcctaagaggaaactgatgccatgagtttcagagagtaatgcttaaccccagttacacaggatgccgtcttgtgtttcctcttgtttagttacccactacagtgattttgtgatctgctaatgggttgccacccacaaccattgctttagcacttttacttcaaatcaatgaaggattgataaaagttctcctggtgtctccgcagagtgccttccaggaacagatctttgcatagaatatcagtggtttccttttttgtttcaaatagtggtcagaaaatacccagtgttgactcaccaaggcaatcagcttcctttttccctttttttgttttttttttaacattttatattttggctttattttattttattttattttatgagacagtcttgctctgtcacccaggctgggagtgcagtggcatgatctctgcaacctctacctcccaggttcaagcaattcttgtgcctcagcctcccaagtaactgggactacaggtgcacgctaccacacctggctgatttttttttgttttagtagagacagggtttcaaccatgttgcccaggttggtctcaaactcctgagctcaggcaatccacccgccttggcctcccaaagtgctaggattacaggtgtgagccaccacacccagctattttttctttcgttttttaattttaaagttggggggggtctcaatttgttaccctggctggtctcgaactcccggacttaagcgatcctctggctccaagcccactaccagtctcaggtttctttactaaaagatcactacctttttttctcttatctgctgccatgtgagatgtggctttcaccttccgccatgattgtgaggccttcccagccacgtggaactgtaagtccaataaacctcttttgtaaattaaaaaaaaatcactatttaagatactaggatggattgtgactgttgaggagtacttacatatcctacatttgactacattatttccaaaccaagtattccatccaaaggaacatactgctatcatagagaccaaggagggactgtttaaggttgccaaggtgaagcgagctgagaggctttgtcctcgtgccagtaactctgaaatctctcttaattcctgctgtccaggcagcagaatgccatggtttccccaagtaggtagctgctttagcagttaaagcccaaatgtctgttctgttgatcagaggtctctgaatttctgaagtggtgtttcgtttctggtgactgagttaatcctttacaatccctcttgtaaagtgtgctaatagaaagaatccacctttcaaagctgcagaaccagaccgtgccctaaattgaccaacgtagctgatgtgcctcaggaagtctcttgccagctgtccctgtgaagaccccctcctcccccccagctgctgccttgcacactgaagcatctcagactgtgcaaagccgtgtagtcatcaagacagtaaatcccagggcttggttaagtgctgtgtgataacttgtttggatgagacttaacttaaaaccacttacaataaacttgggaaactaccgtca

SEQ ID NO: 278598 - DNA, 3041 bp, Homo sapiens
  misc_feature (231)..(231): n is a, c, g, or t
  misc_feature (234)..(234): n is a, c, g, or t
  misc_feature (250)..(250): n is a, c, g, or t
  misc_feature (2818)..(2819): n is a, c, g, or t
  misc_feature (2822)..(2822): n is a, c, g, or t
  misc_feature (2829)..(2829): n is a, c, g, or t
ggcgcctgaggctgccgggtagcccagcaggccgagggaggaagtagcgtggagccggtgccgagccggggcgaagctggatcccctagatatactgtcttcaagctcactgatattttcctctgcttgatccattgtgctgttgagagcctctagtaaatttttcagactgacagaccaaggatgcagctgctactaccggaggtgtgtggcaccttacctcagcaaggnatnaaccgagtggccatgntacggccggaggtcggccgcgtggctggaagacatggccactccagtcggtgttgagcacggcgagcagtctcaggcctttagtgatgatgattaaaggtggtggctgtggccttgaaaacagtcatgtgaaaactcatcaccttaaggtgttaagtgtaaggatcttcatgatgaaatttctgtaaatggtgcagtcagcctcagtttccaaagccggaaaaggatcctctagtagccacggtgtggcagctgctctgaaccaggacctggacccggacccaaagtgccatgtctttaatgttagctcccagcgatgccagatgggatcagcacagccctgcctctgctgctaattgttcctctaaagtaatcgccatgcgttctttgggcttcatctttaaaggaatgaagcaactgagattattctggaaaaccttttggcagttagtgaaattagagtacaactaagaacattttcagacctccactgtggatgacctgggtataatctcacaaatcgatgggactgcaaggattgtaaactgaaatgaacatgattatactctgttggaagagcctaagaggaaactgatgccatgagtttcagagagtaatgcttaaccccagttacacaggatgccgtcttgtgtttcctcttgtttagttacccactacagtgattttgtgatctgctaatgggttgccacccacaaccattgctttagcacttttacttcaaatcaatgaaggattgataaaagttctcctggtgtctccgcagagtgccttccaggaacagatctttgcatagaatatcagtggtttccttttttgtttcaaatagtggtcagaaaatacccagtgttgactcaccaaggcaatcagcttcctttttccctttttttgttttttttttaacattttatattttggctttattttattttattttattttataacattttatatttttgctttattttattttattttattttttgagacggagttccactctgtcgccaggctggagtgaagtggtacaatcttggctcactgcaacctccacctcccgggttcaagcaattctcctggctcagcctcctgagtgctgggactacaggcgcgtaccttctttagtagagactgggtttcaccatgttggccaggatggtctctatctcctgaccttgtgatctgcctgcctcagcttcccaaagtgctgagatgacaggtgtgagccatcagacccagcatttttttttttaatttaaatttaaattttttttcatttttttgagaggttttttttgtttgtttggttgttgttgttgttgttgttgttgttgtttttgagacagtcttgctctgtcacccaggctgggagtgcagtggcatgatctctgcaacctctacctcccaggttcaagcaattcttgtgcctcagcctcccaagtaactgggactacaggtgcacgctaccacacctggctgatttttttttgttttagtagagacagggtttcaaccatgttgcccaggttggtctcaaactcctgagctcaggcaatccacccgccttggcctcccaaagtgctaggattacaggtgtgagccaccacacccagctattttttctttcgttttttaattttaaagttggggggggtctcaatttgttaccctggctggtctcgaactcccggacttaagcgatcctctggctccaagcccactaccagtctcaggtttctttactaaaagatcactacctttttttctcttatctgctgccatgtgagatgtggctttcaccttccgccatgattgtgaggccttcccagccacgtggaactgtaagtccaataaacctcttttgtaaattaaaaaaaaatcactatttaagatactaggatggattgtgactgttgaggagtacttacatatcctacatttgactacattatttccaaaccaagtattccatccaaaggaacatactgctatcatagagaccaaggagggactgtttaaggttgccaaggtgaagcgagctgagaggctttgtcctcgtgccagtaactctgaaatctctcttaattcctgctgtccaggcagcagaatgccatggtttccccaagtaggtagctgctttagcagttaaagcccaaatgtctgttctgttgatcagaggtctctgaatttctgaagtggtgtttcgtttctggtgactgagttaatcctttacaatccctcttgtaaagtgtgctaatagaaagaatccacctttcaaagctgcagaaccagaccgtgccctaaattgaccaacgtagctgatgtgcctcaggaagtctcttgccagctgtccctgtgaagaccccctcctcccccccagctgctgccttgcacactgaagcatctcagactgtgcaaagccgtgtagtcatcaagacagtaaatcccagggcttggttaagtgctgtgtgataacttgtttggatgagacttaacttaaaaccacttacaataaacttgggaaactaccgtcaaaaaaaaaacaaaannacnaaacacnacaaacacaaacactggggtggggcgggactggagccccctggtgaggaaagctttttgtaaaaccacttcgcggtgggggcgcggcggcaggcccccacgactgcggaatggtgaacacggggcgtcacaagcagcgggttccccgagggggaaaacccccggggggcacgaaccacaaggcgcggcgcgtccccacgcaatcaaaacaag

SEQ ID NO: 278599 - DNA, 3457 bp, Homo sapiens
  misc_feature (231)..(231): n is a, c, g, or t
  misc_feature (234)..(234): n is a, c, g, or t
  misc_feature (250)..(250): n is a, c, g, or t
ggcgcctgaggctgccgggtagcccagcaggccgagggaggaagtagcgtggagccggtgccgagccggggcgaagctggatcccctagatatactgtcttcaagctcactgatattttcctctgcttgatccattgtgctgttgagagcctctagtaaatttttcagactgacagaccaaggatgcagctgctactaccggaggtgtgtggcaccttacctcagcaaggnatnaaccgagtggccatgntacggccggaggtcggccgcgtggctggaagacatggccactccagtcggtgttgagcacggcgagcagtctcaggcctttagtgatgatgattaaaggtggtggctgtggccttgaaaacagtcatgtgaaaactcatcaccttaaggtgttaagtgtaaggatcttcatgatgaaatttctgtaaatggtgcagtcagcctcagtttccaaagccggaaaaggatcctctagtagccacggtgtggcagctgctctgaaccaggacctggacccggacccaaagtgccatgtctttaatgttagctcccagcgatgccagatgggatcagcacagccctgcctctgctgctaattgttcctctaaagtaatcgccatgcgttctttgggcttcatctttaaaggaatgaagcaactgagattattctggaaaaccttttggcagttagtgaaattagagtacaactaagaacattttcagacctccactgtggatgacctgggtataatctcacaaatcgatgggactgcaaggattgtaaactgaaatgaacatgattatactctgttggaagagcctaagaggaaactgatgccatgagtttcagagagtaatgcttaaccccagttacacaggatgccgtcttgtgtttcctcttgtttagttacccactacagtgattttgtgatctgctaatgggttgccacccacaaccattgctttagcacttttacttcaaatcaatgaaggattgataaaagttctcctggtgtctccgcagagtgccttccaggaacagatctttgcatagaatatcagtggtttccttttttgtttcaaatagtggtcagaaaatacccagtgttgactcaccaaggcaatcagcttcctttttccctttttttgttttttttttaacattttatattttggctttattttattttattttattttataacattttatatttttgctttattttattttattttattttttgagacggagttccactctgtcgccaggctggagtgaagtggtacaatcttggctcactgcaacctccacctcccgggttcaagcaattctcctggctcagcctcctgagtgctgggactacaggcgcgtaccttctttagtagagactgggtttcaccatgttggccaggatggtctctatctcctgaccttgtgatctgcctgcctcagcttcccaaagtgctgagatgacaggtgtgagccatcagacccagcatttttttttttaatttaaatttaaattttttttcatttttttgagaggttttttttgtttgtttggttgttgttgttgttgttgttgttgttgtttttgagacagtcttgctctgtcacccaggctgggagtgcagtggcatgatctctgcaacctctacctcccaggttcaagcaattcttgtgcctcagcctcccaagtaactgggactacaggtgcacgctaccacacctggctgatttttttttgttttagtagagacagggtttcaaccatgttgcccaggttggtctcaaactcctgagctcaggcaatccacccgccttggcctcccaaagtgctaggattacaggtgtgagccaccacacccagctattttttctttcgttttttaattttaaagttggggggggtctcaatttgttaccctggctggtctcgaactcccggacttaagcgatcctctggctccaagcccactaccagtctcaggtttctttactaaaagatcactacctttttttctcttatctgctgccatgtgagatgtggctttcaccttccgccatgattgtgaggccttcccagccacgtggaactgtaagtccaataaacctcttttgtaaattaaaaaaaaatcactatttaagatactaggatggattgtgactgttgaggagtacttacatatcctacatttgactacattatttccaaaccaagtattccatccaaaggaacatactgctatcatagagaccaaggagggactgtttaaggttgccaaggtgaagcgagctgagaggctttgtcctcgtgccagtaactctgaaatctctcttaattcctgctgtccaggcagcagaatgccatggtttccccaagtaggtagctgctttagcagttaaagcccaaatgtctgttctgttgatcagaggtctctgaatttctgaagtggtgtttcgtttctggtgactgagttaatcctttacaatccctcttgtaaagtgtgctaatagaaagaatccacctttcaaagctgcagaaccagaccgtgccctaaattgaccaacgtagctgatgtgcctcaggaagtctcttgccagctgtccctgtgaagaccccctcctcccccccagctgctgccttgcacactgaagcatctcagactgtgcaaagccgtgtagtcatcaagacagtaaatcccagggcttggttaagtgctgtgtgataacttgtttggatgagacttaacttaaaaccacttacaataaacttgggaaactaccgtcagctgagttcaaatttactgacgccatgatatgaggatgaaggtttattacctggtgacatcatcctgttggtgacatcatcctgttggtgacaaggtggtgatacatctctaatgggacttccctcagtggcaggcaggctgccaagcaactaacccccatcaagtgccagaccctcccagtgttctgagagtcatctccatgctaaacagcctgcgttttatatgatttctctacccagccaaaaaaaaaaaaatggtccatcatgtacgcagttatctagtcttaagttatattctggcttttttctcccactttattatggagcagaagtaagcctatcatgttcttagaaaggctcttaagaggtgtcctggagtccttgaatcactttagcatctggggtaggatgtgccaccaggaggatttgggctggagcgtgtgtgtttgcctttgacctggactgctgtctgatcttgctgaacactccaccgacatttcctaaagttgctcagtgccaatccagcaaagcagtccattttcccttggccaagattgagatgtattgttttagatacagaagagttcttggatgagccaaggacaagctggggtgtcctatattgaacagacctcgatgaaaatcttgaattca

SEQ ID NO: 278600 - DNA, 3502 bp, Homo sapiens
  misc_feature (231)..(231): n is a, c, g, or t
  misc_feature (234)..(234): n is a, c, g, or t
  misc_feature (250)..(250): n is a, c, g, or t
ggcgcctgaggctgccgggtagcccagcaggccgagggaggaagtagcgtggagccggtgccgagccggggcgaagctggatcccctagatatactgtcttcaagctcactgatattttcctctgcttgatccattgtgctgttgagagcctctagtaaatttttcagactgacagaccaaggatgcagctgctactaccggaggtgtgtggcaccttacctcagcaaggnatnaaccgagtggccatgntacggccggaggtcggccgcgtggctggaagacatggccactccagtcggtgttgagcacggcgagcagtctcaggcctttagtgatgatggtaaggctgcctgggtgggaaaacggggtcttccttgacacgacactaacatacttggcttcccttcctcagagacgaagtggtgacgataatctcggtttctccctcatagggtggttaggagggttaaaagtactggatgagaaaatgctttccaaacgttgagaaaatgttactatgtgaagggagagagctcaagcccgtcctcggcgtcatagggccggcttctgcgggggagagcgcctaacaacctgggcagccccgtgcgcctccgccgcgcgtgtgctgagcgtcatgcccaggggtcttcggtgcccgcgcacgggcagactctgacgatggtggttcttaattcagcatcaggagtgttaacgtgtgaagacgtgattccgcttggagtgtcttgaggacggccccaatcggtagttcatatttagctttacagataggagtcaataggattgtaaacttctggaaagccgtagttttaacaacgagccttttttcctcccccagaggcctttctttgtttggcatctgcagagacggtgaaaagcagagctccaggttgaaggatcagagtaatagatggagcccttaacatgagtaagagtgggtgcaggcagggcctgagtggtcactagaaatgagaaagcacagttggtgccatcacatacattcacctcctgctttattctgaagttcaagtatgagaatacgtgttgacatacaagccagctatgattaaaggtggtggctgtggccttgaaaacagtcatgtgaaaactcatcaccttaaggtgttaagtgtaaggatcttcatgatgaaatttctgtaaatggtgcagtcagcctcagtttccaaagccggaaaaggatcctctagtagccacggtgtggcagctgctctgaaccaggacctggacccggacccaaagtgccatgtctttaatgttagctcccagcgatgccagatgggatcagcacagccctgcctctgctgctaattgttcctctaaagtaatcgccatgcgttctttgggcttcatctttaaaggaatgaagcaactgagattattctggaaaaccttttggcagttagtgaaattagagtacaactaagaacattttcagacctccactgtggatgacctgggtataatctcacaaatcgatgggactgcaaggattgtaaactgaaatgaacatgattatactctgttggaagagcctaagaggaaactgatgccatgagtttcagagagtaatgcttaaccccagttacacaggatgccgtcttgtgtttcctcttgtttagttacccactacagtgattttgtgatctgctaatgggttgccacccacaaccattgctttagcacttttacttcaaatcaatgaaggattgataaaagttctcctggtgtctccgcagagtgccttccaggaacagatctttgcatagaatatcagtggtttccttttttgtttcaaatagtggtcagaaaatacccagtgttgactcaccaaggcaatcagcttcctttttccctttttttgtttttttttaacattttatatttttgctttattttattttattttattttttgagacggagttccactctgtcgccaggctggagtgaagtggtacaatcttggctcactgcaacctccacctcccgggttcaagcaattctcctggctcagcctcctgagtgctgggactacaggcgcgtaccttctttagtagagactgggtttcaccatgttggccaggatggtctctatctcctgaccttgtgatctgcctgcctcagcttcccaaagtgctgagatgacaggtgtgagccatcagacccagcatttttttttttaatttaaatttaaattttttttcatttttttgagaggttttttttgtttgtttggttgttgttgttgttgttgttgttgttgtttttgagacagtcttgctctgtcacccaggctgggagtgcagtggcatgatctctgcaacctctacctcccaggttcaagcaattcttgtgcctcagcctcccaagtaactgggactacaggtgcacgctaccacacctggctgatttttttttgttttagtagagacagggtttcaaccatgttgcccaggttggtctcaaactcctgagctcaggcaatccacccgccttggcctcccaaagtgctaggattacaggtgtgagccaccacacccagctattttttctttcgttttttaattttaaagttggggggggtctcaatttgttaccctggctggtctcgaactcccggacttaagcgatcctctggctccaagcccactaccagtctcaggtttctttactaaaagatcactacctttttttctcttatctgctgccatgtgagatgtggctttcaccttccgccatgattgtgaggccttcccagccacgtggaactgtaagtccaataaacctcttttgtaaattaaaaaaaaatcactatttaagatactaggatggattgtgactgttgaggagtacttacatatcctacatttgactacattatttccaaaccaagtattccatccaaaggaacatactgctatcatagagaccaaggagggactgtttaaggttgccaaggtgaagcgagctgagaggctttgtcctcgtgccagtaactctgaaatctctcttaattcctgctgtccaggcagcagaatgccatggtttccccaagtaggtagctgctttagcagttaaagcccaaatgtctgttctgttgatcagaggtctctgaatttctgaagtggtgtttcgtttctggtgactgagttaatcctttacaatccctcttgtaaagtgtgctaatagaaagaatccacctttcaaagctgcagaaccagaccgtgccctaaattgaccaacgtagctgatgtgcctcaggaagtctcttgccagctgtccctgtgaagaccccctcctcccccccagctgctgccttgcacactgaagcatctcagactgtgcaaagccgtgtagtcatcaagacagtaaatcccagggcttggttaagtgctgtgtgataacttgtttggatgagacttaacttaaaaccacttacaataaacttgggaaactaccgtca

SEQ ID NO: 278601 - DNA, 1756 bp, Homo sapiens
aaaactaggctaggtacgaggccgggtggtggagtttttttttgtttttgttttttttcccctttttttttccctcagcatatcctgctgagagcccagtctagagcatcattcctctaaaacgtgaaaagcaaatgagtgattgtcctgctttctctagtcctttgattatggctctgaggatacaggctgtatgaggtggcaggaatgcacaagtacccaggatttgatttatgcccttattgtggaatgaaagtgcttgttacatatttcaagaaaatgaatgcgctcttagaaacagattggaatgtaggatgtatgccagcttgtggcaatgagaatgcttaatgactctgaccttgcctctgctccagggtcctgacatttaggggaaaccacggctgtttggtttctatgtgctttgttaaggacgccagggaggtctcctaagtttgtagcttagatcctgtctgaatgtcacgactggcatgtgagcaagaaagaaaccaagtggtgctggagagtggggtgcccagcttgtgttcccactggaatgccaggcttgaagtgcacacagattgcctttcttttctgttgaaaggggaggtgtgggccgggcgcggtggctcacgcctgtaatcccagcactttgggaggccgaggcgggtggatcatgaggtcaggagatcgagaccatcctggtaattttttgttttagtagagacagggtttcaaccatgttgcccaggttggtctcaaactcctgagctcaggcaatccacccgccttggcctcccaaagtgctaggattacaggtgtgagccaccacacccagctattttttctttcgttttttaattttaaagttggggggggtctcaatttgttaccctggctggtctcgaactcccggacttaagcgatcctctggctccaagcccactaccagtctcaggtttctttactaaaagatcactacctttttttctcttatctgctgccatgtgagatgtggctttcaccttccgccatgattgtgaggccttcccagccacgtggaactgtaagtccaataaacctcttttgtaaattaaaaaaaaatcactatttaagatactaggatggattgtgactgttgaggagtacttacatatcctacatttgactacattatttccaaaccaagtattccatccaaaggaacatactgctatcatagagaccaaggagggactgtttaaggttgccaaggtgaagcgagctgagaggctttgtcctcgtgccagtaactctgaaatctctcttaattcctgctgtccaggcagcagaatgccatggtttccccaagtaggtagctgctttagcagttaaagcccaaatgtctgttctgttgatcagaggtctctgaatttctgaagtggtgtttcgtttctggtgactgagttaatcctttacaatccctcttgtaaagtgtgctaatagaaagaatccacctttcaaagctgcagaaccagaccgtgccctaaattgaccaacgtagctgatgtgcctcaggaagtctcttgccagctgtccctgtgaagaccccctcctcccccccagctgctgccttgcacactgaagcatctcagactgtgcaaagccgtgtagtcatcaagacagtaaatcccagggcttggttaagtgctgtgtgataacttgtttggatgagacttaacttaaaaccacttacaataaacttgggaaactaccgtca

SEQ ID NO: 278602 - DNA, 1155 bp, Homo sapiens
  misc_feature (15)..(15): n is a, c, g, or t
  misc_feature (17)..(17): n is a, c, g, or t
  misc_feature (92)..(92): n is a, c, g, or t
  misc_feature (94)..(94): n is a, c, g, or t
  misc_feature (119)..(119): n is a, c, g, or t
  misc_feature (122)..(122): n is a, c, g, or t
  misc_feature (203)..(203): n is a, c, g, or t
ggcgcggcggccgcngngggtgctgggagccagcgcctgcctcgccgcgccctcgctgcctgccactccgtcttgtgccctgttctccgcancngtgcagaggcggcgggctggggagngangcggctgccagcacgaggttcccagcctgctgggaagcccctagacgcgcctgaggggccgggctacgagcggctgagaanatgatgcatcctgttgccagcagtaacccagctattttttctttcgttttttaattttaaagttggggggggtctcaatttgttaccctggctggtctcgaactcccggacttaagcgatcctctggctccaagcccactaccagtctcaggtttctttactaaaagatcactacctttttttctcttatctgctgccatgtgagatgtggctttcaccttccgccatgattgtgaggccttcccagccacgtggaactgtaagtccaataaacctcttttgtaaattaaaaaaaaatcactatttaagatactaggatggattgtgactgttgaggagtacttacatatcctacatttgactacattatttccaaaccaagtattccatccaaaggaacatactgctatcatagagaccaaggagggactgtttaaggttgccaaggtgaagcgagctgagaggctttgtcctcgtgccagtaactctgaaatctctcttaattcctgctgtccaggcagcagaatgccatggtttccccaagtaggtagctgctttagcagttaaagcccaaatgtctgttctgttgatcagaggtctctgaatttctgaagtggtgtttcgtttctggtgactgagttaatcctttacaatccctcttgtaaagtgtgctaatagaaagaatccacctttcaaagctgcagaaccagaccgtgccctaaattgaccaacgtagctgatgtgcctcaggaagtctcttgccagctgtccctgtgaagaccccctcctcccccccagctgctgccttgcacactgaagcatctcagactgtgcaaagccgtgtagtcatcaagacagtaaatcccagggcttggttaagtgctgtgtgataacttgtttggatgagacttaacttaaaaccacttacaataaacttgggaaactaccgtca

SEQ ID NO: 278603 - DNA, 1265 bp, Homo sapiens
  misc_feature (231)..(231): n is a, c, g, or t
  misc_feature (234)..(234): n is a, c, g, or t
  misc_feature (250)..(250): n is a, c, g, or t
ggcgcctgaggctgccgggtagcccagcaggccgagggaggaagtagcgtggagccggtgccgagccggggcgaagctggatcccctagatatactgtcttcaagctcactgatattttcctctgcttgatccattgtgctgttgagagcctctagtaaatttttcagactgacagaccaaggatgcagctgctactaccggaggtgtgtggcaccttacctcagcaaggnatnaaccgagtggccatgntacggccggaggtcggccgcgtggctggaagacatggccactccagtcggtgttgagcacggcgagcagtctcaggcctttagtgatgatgattaaaggtggtggctgtggccttgaaaacagtcatgtgaaaactcatcaccttaaggtgttaagtgtaaggatcttcatgatgaaatttctgtaaatggtgcagtcagcctcagtttccaaagccggaaaaggatcctctagtagccacggtgtggcagctgctctgaaccaggacctggacccggacccaaagtgccatgtctttaatgttagctcccagcgatgccagatgggatcagcacagccctgcctctgctgctaattgttcctctaaagtaatcgccatgcgttctttgggcttcatctttaaaggaatgaagcaactgagattattctggaaaaccttttggcagttagtgaaattagagtacaactaagaacattttcagacctccactgtggatgacctgggtataatctcacaaatcgatgggactgcaaggattgtaaactgaaatgaacatgattatactctgttggaagagcctaagaggaaactgatgccatgagtttcagagagtaatgcttaaccccagttacacaggatgccgtcttgtgtttcctcttgtttagttacccactacagtgattttgtgatctgctaatgggttgccacccacaaccattgctttagcacttttacttcaaatcaatgaaggattgataaaagttctcctggtgtctccgcagagtgccttccaggaacagatctttgcatagaatatcagtggtttccttttttgtttcaaatagtggtcagaaaatacccagtgttgactcaccaaggcaatcagcttcctttttccctttttttgtttttttttaacattttatatttttgctttattttattttattttatttattttattttattttatttatttttgaacgcctccactcattccccagcctggacata

SEQ ID NO: 278604 - DNA, 1398 bp, Homo sapiens
  misc_feature (231)..(231): n is a, c, g, or t
  misc_feature (234)..(234): n is a, c, g, or t
  misc_feature (250)..(250): n is a, c, g, or t
  misc_feature (1169)..(1169): n is a, c, g, or t
  misc_feature (1171)..(1171): n is a, c, g, or t
  misc_feature (1177)..(1177): n is a, c, g, or t
  misc_feature (1181)..(1181): n is a, c, g, or t
  misc_feature (1192)..(1193): n is a, c, g, or t
  misc_feature (1196)..(1196): n is a, c, g, or t
  misc_feature (1198)..(1198): n is a, c, g, or t
  misc_feature (1202)..(1204): n is a, c, g, or t
  misc_feature (1240)..(1240): n is a, c, g, or t
  misc_feature (1242)..(1242): n is a, c, g, or t
  misc_feature (1245)..(1245): n is a, c, g, or t
  misc_feature (1262)..(1263): n is a, c, g, or t
  misc_feature (1268)..(1268): n is a, c, g, or t
  misc_feature (1283)..(1283): n is a, c, g, or t
  misc_feature (1288)..(1288): n is a, c, g, or t
  misc_feature (1290)..(1290): n is a, c, g, or t
  misc_feature (1300)..(1300): n is a, c, g, or t
  misc_feature (1306)..(1307): n is a, c, g, or t
  misc_feature (1317)..(1318): n is a, c, g, or t
  misc_feature (1324)..(1324): n is a, c, g, or t
  misc_feature (1326)..(1326): n is a, c, g, or t
  misc_feature (1330)..(1330): n is a, c, g, or t
  misc_feature (1336)..(1336): n is a, c, g, or t
  misc_feature (1343)..(1343): n is a, c, g, or t
ggcgcctgaggctgccgggtagcccagcaggccgagggaggaagtagcgtggagccggtgccgagccggggcgaagctggatcccctagatatactgtcttcaagctcactgatattttcctctgcttgatccattgtgctgttgagagcctctagtaaatttttcagactgacagaccaaggatgcagctgctactaccggaggtgtgtggcaccttacctcagcaaggnatnaaccgagtggccatgntacggccggaggtcggccgcgtggctggaagacatggccactccagtcggtgttgagcacggcgagcagtctcaggcctttagtgatgatgattaaaggtggtggctgtggccttgaaaacagtcatgtgaaaactcatcaccttaaggtgttaagtgtaaggatcttcatgatgaaatttctgtaaatggtgcagtcagcctcagtttccaaagccggaaaaggatcctctagtagccacggtgtggcagctgctctgaaccaggacctggacccggacccaaagtgccatgtctttaatgttagctcccagcgatgccagatgggatcagcacagccctgcctctgctgctaattgttcctctaaagtaatcgccatgcgttctttgggcttcatctttaaaggaatgaagcaactgagattattctggaaaaccttttggcagttagtgaaattagagtacaactaagaacattttcagacctccactgtggatgacctgggtataatctcacaaatcgatgggactgcaaggattgtaaactgaaatgaacatgattatactctgttggaagagcctaagaggaaactgatgccatgagtttcagagagtaatgcttaaccccagttacacaggatgccgtcttgtgtttcctcttgtttagttacccactacagtgattttgtgatctgctaatgggttgccacccacaaccattgctttagcacttttacttcaaatcaatgaaggattgataaaagttctcctggtgtctccgcagagtgccttccaggaacagatctttgcatagaatatcagtggtttccttttttgtttcaaatagtggtcagaaaatacccagtgttgactcaccaaggcaatcagcttcctttttccctttttttgtttttttttgntntttttncaanttttatatctnngcntnattnnnttatttattttttgagacggagttccactctgtcgncnagntggagtgaatggtcaanntgggntcactggaacctcanctccngntcaagcaatntccggnncagccctganngggganangggngacctntaaaaangggttaccctttgcagaaggctaatcgaacggaagacgctcatccacggggatag

SEQ ID NO: 278605 - DNA, 1377 bp, Homo sapiens
aaaactaggctaggtacgaggccgggtggtggagtttttttttgtttttgttttttttcccctttttttttccctcagcatatcctgctgagagcccagtctagagcatcattcctctaaaacgtgaaaagcaaatgagtgattgtcctgctttctctagtcctttgattatggctctgaggatacaggctgtatgaggtggcaggaatgcacaagtacccaggatttgatttatgcccttattgtggaatgaaagtgcttgttacatatttcaagaaaatgaatgcgctcttagaaacagattggaatgtaggatgtatgccagcttgtggcaatgagaatgcttaatgactctgaccttgcctctgctccagggtcctgacatttaggggaaaccacggctgtttggtttctatgtgctttgttaaggacgccagggaggtctcctaagtttgtagcttagatcctgtctgaatgtcacgactggcatgtgagcaagaaagaaaccaagtggtgctggtctcgaactcccggacttaagcgatcctctggctccaagcccactaccagtctcaggtttctttactaaaagatcactacctttttttctcttatctgctgccatgtgagatgtggctttcaccttccgccatgattgtgaggccttcccagccacgtggaactgtaagtccaataaacctcttttgtaaattaaaaaaaaatcactatttaagatactaggatggattgtgactgttgaggagtacttacatatcctacatttgactacattatttccaaaccaagtattccatccaaaggaacatactgctatcatagagaccaaggagggactgtttaaggttgccaaggtgaagcgagctgagaggctttgtcctcgtgccagtaactctgaaatctctcttaattcctgctgtccaggcagcagaatgccatggtttccccaagtaggtagctgctttagcagttaaagcccaaatgtctgttctgttgatcagaggtctctgaatttctgaagtggtgtttcgtttctggtgactgagttaatcctttacaatccctcttgtaaagtgtgctaatagaaagaatccacctttcaaagctgcagaaccagaccgtgccctaaattgaccaacgtagctgatgtgcctcaggaagtctcttgccagctgtccctgtgaagaccccctcctcccccccagctgctgccttgcacactgaagcatctcagactgtgcaaagccgtgtagtcatcaagacagtaaatcccagggcttggttaagtgctgtgtgataacttgtttggatgagacttaacttaaaaccacttacaataaacttgggaaactaccgtca

SEQ ID NO: 278606 - DNA, 720 bp, Homo sapiens
atgatacgactcgagtcagtacccgggagtagtccaataaacctcttttgtaaattaaaaaaaaatcactatttaagatactaggatggattgtgactgttgaggagtacttacatatcctacatttgactacattatttccaaaccaagtattccatccaaaggaacatactgctatcatagagaccaaggagggactgtttaaggttgccaaggtgaagcgagctgagaggctttgtcctcgtgccagtaactctgaaatctctcttaattcctgctgtccaggcagcagaatgccatggtttccccaagtaggtagctgctttagcagttaaagcccaaatgtctgttctgttgatcagaggtctctgaatttctgaagtggtgtttcgtttctggtgactgagttaatcctttacaatccctcttgtaaagtgtgctaatagaaagaatccacctttcaaagctgcagaaccagaccgtgccctaaattgaccaacgtagctgatgtgcctcaggaagtctcttgccagctgtccctgtgaagaccccctcctcccccccagctgctgccttgcacactgaagcatctcagactgtgcaaagccgtgtagtcatcaagacagtaaatcccagggcttggttaagtgctgtgtgataacttgtttggatgagacttaacttaaaaccacttacaataaacttgggaaactaccgtca

SEQ ID NO: 278607 - DNA, 1015 bp, Homo sapiens
  misc_feature (231)..(231): n is a, c, g, or t
  misc_feature (234)..(234): n is a, c, g, or t
  misc_feature (250)..(250): n is a, c, g, or t
ggcgcctgaggctgccgggtagcccagcaggccgagggaggaagtagcgtggagccggtgccgagccggggcgaagctggatcccctagatatactgtcttcaagctcactgatattttcctctgcttgatccattgtgctgttgagagcctctagtaaatttttcagactgacagaccaaggatgcagctgctactaccggaggtgtgtggcaccttacctcagcaaggnatnaaccgagtggccatgntacggccggaggtcggccgcgtggctggaagacatggccactccagtcggtgttgagcacggcgagcagtctcaggcctttagtgatgatgattaaaggtggtggctgtggccttgaaaacagtcatgtgaaaactcatcaccttaaggtgttaagtgtaaggatcttcatgatgaaatttctgtaaatggtgcagtcagcctcagtttccaaagccggaaaaggatcctctagtagccacggtgtggcagctgctctgaaccaggacctggacccggacccaaagtgccatgtctttaatgttagctcccagcgatgccagatgggatcagcacagccctgcctctgctgctaattgttcctctaaagtaatcgccatgcgttctttgggcttcatctttaaaggaatgaagcaactgagattattctggaaaaccttttggcagttagtgaaattagagtacaactaagaacattttcagacctccactgtggatgacctgggtataatctcacaaatcgatgggactgcaaggattgtaaactgaaatgaacatgattatactctgttggaagagcctaagaggaaactgatgccatgagtttcagagagtaatgcttaaccccagttacacaggatgccgtcttgtgtttcctcttgtttagttacccactacagtgattttgtgatctgctaatgggttgccacccacaaccattgctttagcacttttacttcaaatcaatgaaggattgataaaagtt

SEQ ID NO: 278608 - DNA, 1303 bp, Homo sapiens
  misc_feature (231)..(231): n is a, c, g, or t
  misc_feature (234)..(234): n is a, c, g, or t
  misc_feature (250)..(250): n is a, c, g, or t
  misc_feature (1145)..(1145): n is a, c, g, or t
  misc_feature (1147)..(1147): n is a, c, g, or t
  misc_feature (1150)..(1150): n is a, c, g, or t
  misc_feature (1167)..(1168): n is a, c, g, or t
  misc_feature (1173)..(1173): n is a, c, g, or t
  misc_feature (1188)..(1188): n is a, c, g, or t
  misc_feature (1193)..(1193): n is a, c, g, or t
  misc_feature (1195)..(1195): n is a, c, g, or t
  misc_feature (1205)..(1205): n is a, c, g, or t
  misc_feature (1211)..(1212): n is a, c, g, or t
  misc_feature (1222)..(1223): n is a, c, g, or t
  misc_feature (1229)..(1229): n is a, c, g, or t
  misc_feature (1231)..(1231): n is a, c, g, or t
  misc_feature (1235)..(1235): n is a, c, g, or t
  misc_feature (1241)..(1241): n is a, c, g, or t
  misc_feature (1248)..(1248): n is a, c, g, or t
ggcgcctgaggctgccgggtagcccagcaggccgagggaggaagtagcgtggagccggtgccgagccggggcgaagctggatcccctagatatactgtcttcaagctcactgatattttcctctgcttgatccattgtgctgttgagagcctctagtaaatttttcagactgacagaccaaggatgcagctgctactaccggaggtgtgtggcaccttacctcagcaaggnatnaaccgagtggccatgntacggccggaggtcggccgcgtggctggaagacatggccactccagtcggtgttgagcacggcgagcagtctcaggcctttagtgatgatggtgcagtcagcctcagtttccaaagccggaaaaggatcctctagtagccacggtgtggcagctgctctgaaccaggacctggacccggacccaaagtgccatgtctttaatgttagctcccagcgatgccagatgggatcagcacagccctgcctctgctgctaattgttcctctaaagtaatcgccatgcgttctttgggcttcatctttaaaggaatgaagcaactgagattattctggaaaaccttttggcagttagtgaaattagagtacaactaagaacattttcagacctccactgtggatgacctgggtataatctcacaaatcgatgggactgcaaggattgtaaactgaaatgaacatgattatactctgttggaagagcctaagaggaaactgatgccatgagtttcagagagtaatgcttaaccccagttacacaggatgccgtcttgtgtttcctcttgtttagttacccactacagtgattttgtgatctgctaatgggttgccacccacaaccattgctttagcacttttacttcaaatcaatgaaggattgataaaagttctcctggtgtctccgcagagtgccttccaggaacagatctttgcatagaatatcagtggtttccttttttgtttcaaatagtggtcagaaaatacccagtgttgactcaccaaggcaatcagcttcctttttccctttttttgttttttttttaacattttatattttggctttattttattttattttattttattttattttttgagacggagttccactctgtcgncnagntggagtgaatggtcaanntgggntcactggaacctcanctccngntcaagcaatntccggnncagccctganngggganangggngacctntaaaaangggttaccctttgcagaaggctaatcgaacggaagacgctcatccacggggatag

SEQ ID NO: 278609 - DNA, 1042 bp, Homo sapiens
  misc_feature (231)..(231): n is a, c, g, or t
  misc_feature (234)..(234): n is a, c, g, or t
  misc_feature (250)..(250): n is a, c, g, or t
ggcgcctgaggctgccgggtagcccagcaggccgagggaggaagtagcgtggagccggtgccgagccggggcgaagctggatcccctagatatactgtcttcaagctcactgatattttcctctgcttgatccattgtgctgttgagagcctctagtaaatttttcagactgacagaccaaggatgcagctgctactaccggaggtgtgtggcaccttacctcagcaaggnatnaaccgagtggccatgntacggccggaggtcggccgcgtggctggaagacatggccactccagtcggtgttgagcacggcgagcagtctcaggcctttagtgatgatgattaaaggtggtggctgtggccttgaaaacagtcatgtgaaaactcatcaccttaaggtgttaagtgtaaggatcttcatgatgaaatttctgtaaatggtgcagtcagcctcagtttccaaagccggaaaaggatcctctagtagccacggtgtggcagctgctctgaaccaggacctggacccggacccaaagtgccatgtctttaatgttagctcccagcgatgccagatgggatcagcacagccctgcctctgctgctaattgttcctctaaagtaatcgccatgcgttctttgggcttcatctttaaaggaatgaagcaactgagattattctggaaaaccttttggcagttagtgaaattagagtacaactaagaacattttcagacctccactgtggatgacctgggtataatctcacaaatcgatgggactgcaaggattgtaaactgaaatgaacatgattatactctgttggaagagcctaagaggaaactgatgccatgagtttcagagagtaatgcttaaccccagttacacaggatgccgtcttgtgtttcctcttgtttagttacccactacagtgattttgtgatctgctaatgggttgccacccacaaccattgctttagcacttttacttcaaatcaatgaaggattgataaaagttaaaaaaaaaaaaggggggcggaaaaaa

SEQ ID NO: 278610 - DNA, 1093 bp, Homo sapiens
aaaactaggctaggtacgaggccgggtggtggagtttttttttgtttttgttttttttcccctttttttttccctcagcatatcctgctgagagcccagtctagagcatcattcctctaaaacgtgaaaagcaaatgagtgattgtcctgctttctctagtcctttgattatggctctgaggatacaggctgtatgaggtggcaggaatgcacaagtacccaggatttgatttatgcccttattgtggaatgaaagtgcttgttacatatttcaagaaaatgaatgcgctcttagaaacagattggaatgtaggatgtatgccagcttgtggcaatgagaatgcttaatgactctgaccttgcctctgctccagggtcctgacatttaggggaaaccacggctgtttggtttctatgtgctttgttaaggacgccagggaggtctcctaagtttgtagcttagatcctgtctgaatgtcacgactggcatgtgagcaagaaagaaaccaagtggtgctggagagtggggtgcccagcttgtgttcccactggaatgccaggcttgaagtgcacacagattgcctttcttttctgttgaaaggggaggtgtgggccgggcgcggtggctcacgcctgtaatcccagcactttgggaggccgaggcgggtggatcatgaggtcaggagatcgagaccatcctggtaattttttgttttagtagagacagggtttcaaccatgttgcccaggttggtctcaaactcctgagctcaggcaatccacccgccttggcctcccaaagtgctaggattacaggtgtgagccaccacacccagctattttttctttcgttttttaattttaaagttggggggggtctcaatttgttaccctggctggtctcgaactcccggacttaagcgatcctctggctccaagcccactaccagtctcaggtttctttactaaaagatcactacctttttttctcttatctgctgccatgtgagatgtggctttcaccttccgccatgattgtgaggccttcccagccacgtggaactgtaagtccaataaacctcttttgtaaatta

SEQ ID NO: 278611 - DNA, 436 bp, Homo sapiens
aggacctggacccggacccaaagtgccatgtctttaatgtgagtaagtagacgaactggtaaacaggcttggtttggtttgggggagtggtaatcttttttgcttcccctgctctggacttaaagcaatgggggcagggagactttagtagcattttgttgctaggtgtctgcaataagagacgaaactgaactgctttgccggaaacaagtgaaatgattgctttcctgtttgtaagatttgtttacatctttcgtatccgtaagaagtcccacaagcctatgatggttagttatccctgtctgaaaatctggactgagggaaataatctattctgaggcttaagggtttggctccatggtttttttttgtttttgttttttttcccctttttttttccctcagcatatcctgctgagagcccagtctagagcat

SEQ ID NO: 278612 - DNA, 2759 bp, Homo sapiens
  misc_feature (231)..(231): n is a, c, g, or t
  misc_feature (234)..(234): n is a, c, g, or t
  misc_feature (250)..(250): n is a, c, g, or t
ggcgcctgaggctgccgggtagcccagcaggccgagggaggaagtagcgtggagccggtgccgagccggggcgaagctggatcccctagatatactgtcttcaagctcactgatattttcctctgcttgatccattgtgctgttgagagcctctagtaaatttttcagactgacagaccaaggatgcagctgctactaccggaggtgtgtggcaccttacctcagcaaggnatnaaccgagtggccatgntacggccggaggtcggccgcgtggctggaagacatggccactccagtcggtgttgagcacggcgagcagtctcaggcctttagtgatgatgattaaaggtggtggctgtggccttgaaaacagtcatgtgaaaactcatcaccttaaggtgttaagtgtaaggatcttcatgatgaaatttctgtaaatggtgcagtcagcctcagtttccaaagccggaaaaggatcctctagtagccacggtgtggcagctgctctgaaccaggacctggacccggacccaaagtgccatgtctttaatgttagctcccagcgatgccagatgggatcagcacagccctgcctctgctgctaattgttcctctaaagtaatcgccatgcgttctttgggcttcatctttaaaggaatgaagcaactgagattattctggaaaaccttttggcagttagtgaaattagagtacaactaagaacattttcagacctccactgtggatgacctgggtataatctcacaaatcgatgggactgcaaggattgtaaactgaaatgaacatgattatactctgttggaagagcctaagaggaaactgatgccatgagtttcagagagtaatgcttaaccccagttacacaggatgccgtcttgtgtttcctcttgtttagttacccactacagtgattttgtgatctgctaatgggttgccacccacaaccattgctttagcacttttacttcaaatcaatgaaggattgataaaagttctcctggtgtctccgcagagtgccttccaggaacagatctttgcatagaatatcagtggtttccttttttgtttcaaatagtggtcagaaaatacccagtgttgactcaccaaggcaatcagcttcctttttccctttttttgtttttttttaacattttatatttttgctttattttattttattttattttttgagacggagttccactctgtcgccaggctggagtgaagtggtacaatcttggctcactgcaacctccacctcccgggttcaagcaattctcctggctcagcctcctgagtgctgggactacaggcgcgtaccttctttagtagagactgggtttcaccatgttggccaggatggtctctatctcctgaccttgtgatctgcctgcctcagcttcccaaagtgctgagatgacaggtgtgagccatcagacccagcatttttttttttaatttaaatttaaattttttttcatttttttgagaggttttttttgtttgtttggttgttgttgttgttgttgttgttgttgtttttgagacagtcttgctctgtcacccaggctgggagtgcagtggcatgatctctgcaacctctacctcccaggttcaagcaattcttgtgcctcagcctcccaagtaactgggactacaggtgcacgctaccacacctggctgatttttttttgttttagtagagacagggtttcaaccatgttgcccaggttggtctcaaactcctgagctcaggcaatccacccgccttggcctcccaaagtgctaggattacaggtgtgagccaccacacccagctattttttctttcgttttttaattttaaagttggggggggtctcaatttgttaccctggctggtctcgaactcccggacttaagcgatcctctggctccaagcccactaccagtctcaggtttctttactaaaagatcactacctttttttctcttatctgctgccatgtgagatgtggctttcaccttccgccatgattgtgaggccttcccagccacgtggaactgtaagtccaataaacctcttttgtaaattaaaaaaaaatcactatttaagatactaggatggattgtgactgttgaggagtacttacatatcctacatttgactacattatttccaaaccaagtattccatccaaaggaacatactgctatcatagagaccaaggagggactgtttaaggttgccaaggtgaagcgagctgagaggctttgtcctcgtgccagtaactctgaaatctctcttaattcctgctgtccaggcagcagaatgccatggtttccccaagtaggtagctgctttagcagttaaagcccaaatgtctgttctgttgatcagaggtctctgaatttctgaagtggtgtttcgtttctggtgactgagttaatcctttacaatccctcttgtaaagtgtgctaatagaaagaatccacctttcaaagctgcagaaccagaccgtgccctaaattgaccaacgtagctgatgtgcctcaggaagtctcttgccagctgtccctgtgaagaccccctcctcccccccagctgctgccttgcacactgaagcatctcagactgtgcaaagccgtgtagtcatcaagacagtaaatcccagggcttggttaagtgctgtgtgataacttgtttggatgagacttaacttaaaaccacttacaataaacttgggaaactaccgtca

SEQ ID NO: 278613 - DNA, 2660 bp, Homo sapiens
  misc_feature (231)..(231): n is a, c, g, or t
  misc_feature (234)..(234): n is a, c, g, or t
  misc_feature (250)..(250): n is a, c, g, or t
ggcgcctgaggctgccgggtagcccagcaggccgagggaggaagtagcgtggagccggtgccgagccggggcgaagctggatcccctagatatactgtcttcaagctcactgatattttcctctgcttgatccattgtgctgttgagagcctctagtaaatttttcagactgacagaccaaggatgcagctgctactaccggaggtgtgtggcaccttacctcagcaaggnatnaaccgagtggccatgntacggccggaggtcggccgcgtggctggaagacatggccactccagtcggtgttgagcacggcgagcagtctcaggcctttagtgatgatggtgcagtcagcctcagtttccaaagccggaaaaggatcctctagtagccacggtgtggcagctgctctgaaccaggacctggacccggacccaaagtgccatgtctttaatgttagctcccagcgatgccagatgggatcagcacagccctgcctctgctgctaattgttcctctaaagtaatcgccatgcgttctttgggcttcatctttaaaggaatgaagcaactgagattattctggaaaaccttttggcagttagtgaaattagagtacaactaagaacattttcagacctccactgtggatgacctgggtataatctcacaaatcgatgggactgcaaggattgtaaactgaaatgaacatgattatactctgttggaagagcctaagaggaaactgatgccatgagtttcagagagtaatgcttaaccccagttacacaggatgccgtcttgtgtttcctcttgtttagttacccactacagtgattttgtgatctgctaatgggttgccacccacaaccattgctttagcacttttacttcaaatcaatgaaggattgataaaagttctcctggtgtctccgcagagtgccttccaggaacagatctttgcatagaatatcagtggtttccttttttgtttcaaatagtggtcagaaaatacccagtgttgactcaccaaggcaatcagcttcctttttccctttttttgtttttttttaacattttatatttttgctttattttattttattttattttttgagacggagttccactctgtcgccaggctggagtgaagtggtacaatcttggctcactgcaacctccacctcccgggttcaagcaattctcctggctcagcctcctgagtgctgggactacaggcgcgtaccttctttagtagagactgggtttcaccatgttggccaggatggtctctatctcctgaccttgtgatctgcctgcctcagcttcccaaagtgctgagatgacaggtgtgagccatcagacccagcatttttttttttaatttaaatttaaattttttttcatttttttgagaggttttttttgtttgtttggttgttgttgttgttgttgttgttgttgtttttgagacagtcttgctctgtcacccaggctgggagtgcagtggcatgatctctgcaacctctacctcccaggttcaagcaattcttgtgcctcagcctcccaagtaactgggactacaggtgcacgctaccacacctggctgatttttttttgttttagtagagacagggtttcaaccatgttgcccaggttggtctcaaactcctgagctcaggcaatccacccgccttggcctcccaaagtgctaggattacaggtgtgagccaccacacccagctattttttctttcgttttttaattttaaagttggggggggtctcaatttgttaccctggctggtctcgaactcccggacttaagcgatcctctggctccaagcccactaccagtctcaggtttctttactaaaagatcactacctttttttctcttatctgctgccatgtgagatgtggctttcaccttccgccatgattgtgaggccttcccagccacgtggaactgtaagtccaataaacctcttttgtaaattaaaaaaaaatcactatttaagatactaggatggattgtgactgttgaggagtacttacatatcctacatttgactacattatttccaaaccaagtattccatccaaaggaacatactgctatcatagagaccaaggagggactgtttaaggttgccaaggtgaagcgagctgagaggctttgtcctcgtgccagtaactctgaaatctctcttaattcctgctgtccaggcagcagaatgccatggtttccccaagtaggtagctgctttagcagttaaagcccaaatgtctgttctgttgatcagaggtctctgaatttctgaagtggtgtttcgtttctggtgactgagttaatcctttacaatccctcttgtaaagtgtgctaatagaaagaatccacctttcaaagctgcagaaccagaccgtgccctaaattgaccaacgtagctgatgtgcctcaggaagtctcttgccagctgtccctgtgaagaccccctcctcccccccagctgctgccttgcacactgaagcatctcagactgtgcaaagccgtgtagtcatcaagacagtaaatcccagggcttggttaagtgctgtgtgataacttgtttggatgagacttaacttaaaaccacttacaataaacttgggaaactaccgtca

SEQ ID NO: 278614 - DNA, 3847 bp, Homo sapiens
  misc_feature (231)..(231): n is a, c, g, or t
  misc_feature (234)..(234): n is a, c, g, or t
  misc_feature (250)..(250): n is a, c, g, or t
ggcgcctgaggctgccgggtagcccagcaggccgagggaggaagtagcgtggagccggtgccgagccggggcgaagctggatcccctagatatactgtcttcaagctcactgatattttcctctgcttgatccattgtgctgttgagagcctctagtaaatttttcagactgacagaccaaggatgcagctgctactaccggaggtgtgtggcaccttacctcagcaaggnatnaaccgagtggccatgntacggccggaggtcggccgcgtggctggaagacatggccactccagtcggtgttgagcacggcgagcagtctcaggcctttagtgatgatggtaaggctgcctgggtgggaaaacggggtcttccttgacacgacactaacatacttggcttcccttcctcagagacgaagtggtgacgataatctcggtttctccctcatagggtggttaggagggttaaaagtactggatgagaaaatgctttccaaacgttgagaaaatgttactatgtgaagggagagagctcaagcccgtcctcggcgtcatagggccggcttctgcgggggagagcgcctaacaacctgggcagccccgtgcgcctccgccgcgcgtgtgctgagcgtcatgcccaggggtcttcggtgcccgcgcacgggcagactctgacgatggtggttcttaattcagcatcaggagtgttaacgtgtgaagacgtgattccgcttggagtgtcttgaggacggccccaatcggtagttcatatttagctttacagataggagtcaataggattgtaaacttctggaaagccgtagttttaacaacgagccttttttcctcccccagaggcctttctttgtttggcatctgcagagacggtgaaaagcagagctccaggttgaaggatcagagtaatagatggagcccttaacatgagtaagagtgggtgcaggcagggcctgagtggtcactagaaatgagaaagcacagttggtgccatcacatacattcacctcctgctttattctgaagttcaagtatgagaatacgtgttgacatacaagccagctatggtaagaaattactcaaaattcagaatgctaattattttaatgataaaaatgagtagcgtctttgcccgtgtgatttggggccactaggtgtcattgtaaccagcgtggatcctcgttagggcatgcagggatgaaagagacatggcaaatgaattttggatcgctaggatttaggaatctttgttattggctgagctgaggatgatttaaagttatccctgtctgaaatggtatcttttgtgaggaggtctgacttgctgaggctcagctgtttaatacaaatctggagaataaaccttaaggtggtttctgttagaatgaagcctgttatccttctcttttatgattaaaggtggtggctgtggccttgaaaacagtcatgtgaaaactcatcaccttaaggtgttaagtgtaaggatcttcatgatgaaatttctgtaaatggtgcagtcagcctcagtttccaaagccggaaaaggatcctctagtagccacggtgtggcagctgctctgaaccaggacctggacccggacccaaagtgccatgtctttaatgttagctcccagcgatgccagatgggatcagcacagccctgcctctgctgctaattgttcctctaaagtaatcgccatgcgttctttgggcttcatctttaaaggaatgaagcaactgagattattctggaaaaccttttggcagttagtgaaattagagtacaactaagaacattttcagacctccactgtggatgacctgggtataatctcacaaatcgatgggactgcaaggattgtaaactgaaatgaacatgattatactctgttggaagagcctaagaggaaactgatgccatgagtttcagagagtaatgcttaaccccagttacacaggatgccgtcttgtgtttcctcttgtttagttacccactacagtgattttgtgatctgctaatgggttgccacccacaaccattgctttagcacttttacttcaaatcaatgaaggattgataaaagttctcctggtgtctccgcagagtgccttccaggaacagatctttgcatagaatatcagtggtttccttttttgtttcaaatagtggtcagaaaatacccagtgttgactcaccaaggcaatcagcttcctttttccctttttttgtttttttttaacattttatatttttgctttattttattttattttattttttgagacggagttccactctgtcgccaggctggagtgaagtggtacaatcttggctcactgcaacctccacctcccgggttcaagcaattctcctggctcagcctcctgagtgctgggactacaggcgcgtaccttctttagtagagactgggtttcaccatgttggccaggatggtctctatctcctgaccttgtgatctgcctgcctcagcttcccaaagtgctgagatgacaggtgtgagccatcagacccagcatttttttttttaatttaaatttaaattttttttcatttttttgagaggttttttttgtttgtttggttgttgttgttgttgttgttgttgttgtttttgagacagtcttgctctgtcacccaggctgggagtgcagtggcatgatctctgcaacctctacctcccaggttcaagcaattcttgtgcctcagcctcccaagtaactgggactacaggtgcacgctaccacacctggctgatttttttttgttttagtagagacagggtttcaaccatgttgcccaggttggtctcaaactcctgagctcaggcaatccacccgccttggcctcccaaagtgctaggattacaggtgtgagccaccacacccagctattttttctttcgttttttaattttaaagttggggggggtctcaatttgttaccctggctggtctcgaactcccggacttaagcgatcctctggctccaagcccactaccagtctcaggtttctttactaaaagatcactacctttttttctcttatctgctgccatgtgagatgtggctttcaccttccgccatgattgtgaggccttcccagccacgtggaactgtaagtccaataaacctcttttgtaaattaaaaaaaaatcactatttaagatactaggatggattgtgactgttgaggagtacttacatatcctacatttgactacattatttccaaaccaagtattccatccaaaggaacatactgctatcatagagaccaaggagggactgtttaaggttgccaaggtgaagcgagctgagaggctttgtcctcgtgccagtaactctgaaatctctcttaattcctgctgtccaggcagcagaatgccatggtttccccaagtaggtagctgctttagcagttaaagcccaaatgtctgttctgttgatcagaggtctctgaatttctgaagtggtgtttcgtttctggtgactgagttaatcctttacaatccctcttgtaaagtgtgctaatagaaagaatccacctttcaaagctgcagaaccagaccgtgccctaaattgaccaacgtagctgatgtgcctcaggaagtctcttgccagctgtccctgtgaagaccccctcctcccccccagctgctgccttgcacactgaagcatctcagactgtgcaaagccgtgtagtcatcaagacagtaaatcccagggcttggttaagtgctgtgtgataacttgtttggatgagacttaacttaaaaccacttacaataaacttgggaaactaccgtca

SEQ ID NO: 278615 - DNA, 3127 bp, Homo sapiens
  misc_feature (231)..(231): n is a, c, g, or t
  misc_feature (234)..(234): n is a, c, g, or t
  misc_feature (250)..(250): n is a, c, g, or t
  misc_feature (2815)..(2815): n is a, c, g, or t
  misc_feature (2829)..(2829): n is a, c, g, or t
  misc_feature (2840)..(2840): n is a, c, g, or t
  misc_feature (2849)..(2849): n is a, c, g, or t
ggcgcctgaggctgccgggtagcccagcaggccgagggaggaagtagcgtggagccggtgccgagccggggcgaagctggatcccctagatatactgtcttcaagctcactgatattttcctctgcttgatccattgtgctgttgagagcctctagtaaatttttcagactgacagaccaaggatgcagctgctactaccggaggtgtgtggcaccttacctcagcaaggnatnaaccgagtggccatgntacggccggaggtcggccgcgtggctggaagacatggccactccagtcggtgttgagcacggcgagcagtctcaggcctttagtgatgatgattaaaggtggtggctgtggccttgaaaacagtcatgtgaaaactcatcaccttaaggtgttaagtgtaaggatcttcatgatgaaatttctgtaaatggtgcagtcagcctcagtttccaaagccggaaaaggatcctctagtagccacggtgtggcagctgctctgaaccaggacctggacccggacccaaagtgccatgtctttaatgttagctcccagcgatgccagatgggatcagcacagccctgcctctgctgctaattgttcctctaaagtaatcgccatgcgttctttgggcttcatctttaaaggaatgaagcaactgagattattctggaaaaccttttggcagttagtgaaattagagtacaactaagaacattttcagacctccactgtggatgacctgggtataatctcacaaatcgatgggactgcaaggattgtaaactgaaatgaacatgattatactctgttggaagagcctaagaggaaactgatgccatgagtttcagagagtaatgcttaaccccagttacacaggatgccgtcttgtgtttcctcttgtttagttacccactacagtgattttgtgatctgctaatgggttgccacccacaaccattgctttagcacttttacttcaaatcaatgaaggattgataaaagttctcctggtgtctccgcagagtgccttccaggaacagatctttgcatagaatatcagtggtttccttttttgtttcaaatagtggtcagaaaatacccagtgttgactcaccaaggcaatcagcttcctttttccctttttttgttttttttttaacattttatattttggctttattttattttattttattttataacattttatatttttgctttattttattttattttattttttgagacggagttccactctgtcgccaggctggagtgaagtggtacaatcttggctcactgcaacctccacctcccgggttcaagcaattctcctggctcagcctcctgagtgctgggactacaggcgcgtaccttctttagtagagactgggtttcaccatgttggccaggatggtctctatctcctgaccttgtgatctgcctgcctcagcttcccaaagtgctgagatgacaggtgtgagccatcagacccagcatttttttttttaatttaaatttaaattttttttcatttttttgagaggttttttttgtttgtttggttgttgttgttgttgttgttgttgttgtttttgagacagtcttgctctgtcacccaggctgggagtgcagtggcatgatctctgcaacctctacctcccaggttcaagcaattcttgtgcctcagcctcccaagtaactgggactacaggtgcacgctaccacacctggctgatttttttttgttttagtagagacagggtttcaaccatgttgcccaggttggtctcaaactcctgagctcaggcaatccacccgccttggcctcccaaagtgctaggattacaggtgtgagccaccacacccagctattttttctttcgttttttaattttaaagttggggggggtctcaatttgttaccctggctggtctcgaactcccggacttaagcgatcctctggctccaagcccactaccagtctcaggtttctttactaaaagatcactacctttttttctcttatctgctgccatgtgagatgtggctttcaccttccgccatgattgtgaggccttcccagccacgtggaactgtaagtccaataaacctcttttgtaaattaaaaaaaaatcactatttaagatactaggatggattgtgactgttgaggagtacttacatatcctacatttgactacattatttccaaaccaagtattccatccaaaggaacatactgctatcatagagaccaaggagggactgtttaaggttgccaaggtgaagcgagctgagaggctttgtcctcgtgccagtaactctgaaatctctcttaattcctgctgtccaggcagcagaatgccatggtttccccaagtaggtagctgctttagcagttaaagcccaaatgtctgttctgttgatcagaggtctctgaatttctgaagtggtgtttcgtttctggtgactgagttaatcctttacaatccctcttgtaaagtgtgctaatagaaagaatccacctttcaaagctgcagaaccagaccgtgccctaaattgaccaacgtagctgatgtgcctcaggaagtctcttgccagctgtccctgtgaagaccccctcctcccccccagctgctgccttgcacactgaagcatctcagactgtgcaaagccgtgtagtcatcaagacagtaaatcccagggcttggttaagtgctgtgtgataacttgtttggatgagacttaacttaaaaccacttacaataaacttgggaaactaccgtcaaaaaaaaaaaanaaaaaaaaaaaaanaaaaaaaaaanaaaaaaaanaaaaaaaaaaaaaaaaaaaaaaaggggggggcgccggtaatagatgtctctctccagcgagggggccccacatgtttacgcacgtaacccccaacactgcttttttcgtctcaaacaagggggcgccccactattagaggggggctcatctacatcctgagcacacgagccggtgccgctccttataaacaagcccccgtactacgggcgacaaacacgcccctacgcgtcgatatcttggtgacaacagcccgctctgtggggcggtagcacacacg

SEQ ID NO: 278616 - DNA, 2987 bp, Homo sapiens
  misc_feature (231)..(231): n is a, c, g, or t
  misc_feature (234)..(234): n is a, c, g, or t
  misc_feature (250)..(250): n is a, c, g, or t
ggcgcctgaggctgccgggtagcccagcaggccgagggaggaagtagcgtggagccggtgccgagccggggcgaagctggatcccctagatatactgtcttcaagctcactgatattttcctctgcttgatccattgtgctgttgagagcctctagtaaatttttcagactgacagaccaaggatgcagctgctactaccggaggtgtgtggcaccttacctcagcaaggnatnaaccgagtggccatgntacggccggaggtcggccgcgtggctggaagacatggccactccagtcggtgttgagcacggcgagcagtctcaggcctttagtgatgatgattaaaggtggtggctgtggccttgaaaacagtcatgtgaaaactcatcaccttaaggtgttaagtgtaaggatcttcatgatgaaatttctgtaaatggtgcagtcagcctcagtttccaaagccggaaaaggatcctctagtagccacggtgtggcagctgctctgaaccaggacctggacccggacccaaagtgccatgtctttaatgttagctcccagcgatgccagatgggatcagcacagccctgcctctgctgctaattgttcctctaaagtaatcgccatgcgttctttgggcttcatctttaaaggaatgaagcaactgagattattctggaaaaccttttggcagttagtgaaattagagtacaactaagaacattttcagacctccactgtggatgacctgggtataatctcacaaatcgatgggactgcaaggattgtaaactgaaatgaacatgattatactctgttggaagagcctaagaggaaactgatgccatgagtttcagagagtaatgcttaaccccagttacacaggatgccgtcttgtgtttcctcttgtttagttacccactacagtgattttgtgatctgctaatgggttgccacccacaaccattgctttagcacttttacttcaaatcaatgaaggattgataaaagttctcctggtgtctccgcagagtgccttccaggaacagatctttgcatagaatatcagtggtttccttttttgtttcaaatagtggtcagaaaatacccagtgttgactcaccaaggcaatcagcttcctttttccctttttttgttttttttttaacattttatattttggctttattttattttattttattttataacattttatatttttgctttattttattttattttattttttgagacggagttccactctgtcgccaggctggagtgaagtggtacaatcttggctcactgcaacctccacctcccgggttcaagcaattctcctggctcagcctcctgagtgctgggactacaggcgcgtaccttctttagtagagactgggtttcaccatgttggccaggatggtctctatctcctgaccttgtgatctgcctgcctcagcttcccaaagtgctgagatgacaggtgtgagccatcagacccagcatttttttttttaatttaaatttaaattttttttcatttttttgagaggttttttttgtttgtttggttgttgttgttgttgttgttgttgttgtttttgagacagtcttgctctgtcacccaggctgggagtgcagtggcatgatctctgcaacctctacctcccaggttcaagcaattcttgtgcctcagcctcccaagtaactgggactacaggtgcacgctaccacacctggctgatttttttttgttttagtagagacagggtttcaaccatgttgcccaggttggtctcaaactcctgagctcaggcaatccacccgccttggcctcccaaagtgctaggattacaggtgtgagccaccacacccagctattttttctttcgttttttaattttaaagttggggggggtctcaatttgttaccctggctggtctcgaactcccggacttaagcgatcctctggctccaagcccactaccagtctcaggtttctttactaaaagatcactacctttttttctcttatctgctgccatgtgagatgtggctttcaccttccgccatgattgtgaggccttcccagccacgtggaactgtaagtccaataaacctcttttgtaaattaaaaaaaaatcactatttaagatactaggatggattgtgactgttgaggagtacttacatatcctacatttgactacattatttccaaaccaagtattccatccaaaggaacatactgctatcatagagaccaaggagggactgtttaaggttgccaaggtgaagcgagctgagaggctttgtcctcgtgccagtaactctgaaatctctcttaattcctgctgtccaggcagcagaatgccatggtttccccaagtaggtagctgctttagcagttaaagcccaaatgtctgttctgttgatcagaggtctctgaatttctgaagtggtgtttcgtttctggtgactgagttaatcctttacaatccctcttgtaaagtgtgctaatagaaagaatccacctttcaaagctgcagaaccagaccgtgccctaaattgaccaacgtagctgatgtgcctcaggaagtctcttgccagctgtccctgtgaagaccccctcctcccccccagctgctgccttgcacactgaagcatctcagactgtgcaaagccgtgtagtcatcaagacagtaaatcccagggcttggttaagtcgctgtgtagataaccttgtttggattgagactttaagcttaaaagcactttaacaagtaaactgtgggaaaactaccgtcgaaaataaaaaaaagaataaaaaaaaaaaaaatcagggggattatatggggggggggaaaaaaaggattaagaaaaggacatggaaaaggtattaatggaacacgtttttagaaaaggggaaaatggggggcccataaggggaaataattaaaaaaaggactgtatggagtgga

SEQ ID NO: 278617 - DNA, 3315 bp, Homo sapiens
  misc_feature (231)..(231): n is a, c, g, or t
  misc_feature (234)..(234): n is a, c, g, or t
  misc_feature (250)..(250): n is a, c, g, or t
ggcgcctgaggctgccgggtagcccagcaggccgagggaggaagtagcgtggagccggtgccgagccggggcgaagctggatcccctagatatactgtcttcaagctcactgatattttcctctgcttgatccattgtgctgttgagagcctctagtaaatttttcagactgacagaccaaggatgcagctgctactaccggaggtgtgtggcaccttacctcagcaaggnatnaaccgagtggccatgntacggccggaggtcggccgcgtggctggaagacatggccactccagtcggtgttgagcacggcgagcagtctcaggcctttagtgatgatgattaaaggtggtggctgtggccttgaaaacagtcatgtgaaaactcatcaccttaaggtgttaagtgtaaggatcttcatgatgaaatttctgtaaatggtgcagtcagcctcagtttccaaagccggaaaaggatcctctagtagccacggtgtggcagctgctctgaaccaggacctggacccggacccaaagtgccatgtctttaatgttagctcccagcgatgccagatgggatcagcacagccctgcctctgctgctaattgttcctctaaagtaatcgccatgcgttctttgggcttcatctttaaaggaatgaagcaactgagattattctggaaaaccttttggcagttagtgaaattagagtacaactaagaacattttcagacctccactgtggatgacctgggtataatctcacaaatcgatgggactgcaaggattgtaaactgaaatgaacatgattatactctgttggaagagcctaagaggaaactgatgccatgagtttcagagagtaatgcttaaccccagttacacaggatgccgtcttgtgtttcctcttgtttagttacccactacagtgattttgtgatctgctaatgggttgccacccacaaccattgctttagcacttttacttcaaatcaatgaaggattgataaaagttctcctggtgtctccgcagagtgccttccaggaacagatctttgcatagaatatcagtggtttccttttttgtttcaaatagtggtcagaaaatacccagtgttgactcaccaaggcaatcagcttcctttttccctttttttgttttttttttaacattttatattttggctttattttattttattttattttataacattttatatttttgctttattttattttattttattttttgagacggagttccactctgtcgccaggctggagtgaagtggtacaatcttggctcactgcaacctccacctcccgggttcaagcaattctcctggctcagcctcctgagtgctgggactacaggcgcgtaccttctttagtagagactgggtttcaccatgttggccaggatggtctctatctcctgaccttgtgatctgcctgcctcagcttcccaaagtgctgagatgacaggtgtgagccatcagacccagcatttttttttttaatttaaatttaaattttttttcatttttttgagaggttttttttgtttgtttggttgttgttgttgttgttgttgttgttgtttttgagacagtcttgctctgtcacccaggctgggagtgcagtggcatgatctctgcaacctctacctcccaggttcaagcaattcttgtgcctcagcctcccaagtaactgggactacaggtgcacgctaccacacctggctgatttttttttgttttagtagagacagggtttcaaccatgttgcccaggttggtctcaaactcctgagctcaggcaatccacccgccttggcctcccaaagtgctaggattacaggtgtgagccaccacacccagctattttttctttcgttttttaattttaaagttggggggggtctcaatttgttaccctggctggtctcgaactcccggacttaagcgatcctctggctccaagcccactaccagtctcaggtttctttactaaaagatcactacctttttttctcttatctgctgccatgtgagatgtggctttcaccttccgccatgattgtgaggccttcccagccacgtggaactgtaagtccaataaacctcttttgtaaattaaaaaaaaatcactatttaagatactaggatggattgtgactgttgaggagtacttacatatcctacatttgactacattatttccaaaccaagtattccatccaaaggaacatactgctatcatagagaccaaggagggactgtttaaggttgccaaggtgaagcgagctgagaggctttgtcctcgtgccagtaactctgaaatctctcttaattcctgctgtccaggcagcagaatgccatggtttccccaagtaggtagctgctttagcagttaaagcccaaatgtctgttctgttgatcagaggtctctgaatttctgaagtggtgtttcgtttctggtgactgagttaatcctttacaatccctcttgtaaagtgtgctaatagaaagaatccacctttcaaagctgcagaaccagaccgtgccctaaattgaccaacgtagctgatgtgcctcaggaagtctcttgccagctgtccctgtgaagaccccctcctcccccccagctgctgccttgcacactgaagcatctcagactgtgcaaagccgtgtagtcatcaagacagtaaatcccagggcttggttaaaaaaaaaaaaaaaaaaaaaaaaaaaaaaaaaaaaaaaaaaaaaaccaagaaaaacaaaacagaggacagccaaccggcaaacaagcacgccacggaagacggtgcacagcccacacgacacccgacccaaggccaaaggaacacggcagcgcgcaaccaggaccgagtacatgtaacgaacaacgagcggacggacagccgacagagaggcgcgagagatacaaacaattgatccaggcaacactgggcaaagagaacacccatacgaccaggcagactcacaaaggccagcttcacaacagagtacaagacacgtcggcagacacataacaaacacgacgtaggaagaaacagcagcaccacttcgctagatgcagcgcgaagccaggctgtcgcgcacgaccgccgcacactaatatcacctgcgccaataaacactacgaactcccagcgccacccccacctactgcccgtagcgcgacgaagcaaacaccgtcgcagccagcagcagacaccgactcgcatgcgcaccgcaaccaggcgcgacccaccacaccacggtagaccaaacgcgaaccgaagctc

SEQ ID NO: 278618 - DNA, 2293 bp, Homo sapiens
  misc_feature (231)..(231): n is a, c, g, or t
  misc_feature (234)..(234): n is a, c, g, or t
  misc_feature (250)..(250): n is a, c, g, or t
ggcgcctgaggctgccgggtagcccagcaggccgagggaggaagtagcgtggagccggtgccgagccggggcgaagctggatcccctagatatactgtcttcaagctcactgatattttcctctgcttgatccattgtgctgttgagagcctctagtaaatttttcagactgacagaccaaggatgcagctgctactaccggaggtgtgtggcaccttacctcagcaaggnatnaaccgagtggccatgntacggccggaggtcggccgcgtggctggaagacatggccactccagtcggtgttgagcacggcgagcagtctcaggcctttagtgatgatgattaaaggtggtggctgtggccttgaaaacagtcatgtgaaaactcatcaccttaaggtgttaagtgtaaggatcttcatgatgaaatttctgtaaatggtgcagtcagcctcagtttccaaagccggaaaaggatcctctagtagccacggtgtggcagctgctctgaaccaggacctggacccggacccaaagtgccatgtctttaatgttagctcccagcgatgccagatgggatcagcacagccctgcctctgctgctaattgttcctctaaagtaatcgccatgcgttctttgggcttcatctttaaaggaatgaagcaactgagattattctggaaaaccttttggcagttagtgaaattagagtacaactaagaacattttcagacctccactgtggatgacctgggtataatctcacaaatcgatgggactgcaaggattgtaaactgaaatgaacatgattatactctgttggaagagcctaagaggaaactgatgccatgagtttcagagagtaatgcttaaccccagttacacaggatgccgtcttgtgtttcctcttgtttagttacccactacagtgaccttgtgatctgcctgcctcagcttcccaaagtgctgagatgacaggtgtgagccatcagacccagcatttttttttttaatttaaatttaaattttttttcatttttttgagaggttttttttgtttgtttggttgttgttgttgttgttgttgttgttgtttttgagacagtcttgctctgtcacccaggctgggagtgcagtggcatgatctctgcaacctctacctcccaggttcaagcaattcttgtgcctcagcctcccaagtaactgggactacaggtgcacgctaccacacctggctgatttttttttgttttagtagagacagggtttcaaccatgttgcccaggttggtctcaaactcctgagctcaggcaatccacccgccttggcctcccaaagtgctaggattacaggtgtgagccaccacacccagctattttttctttcgttttttaattttaaagttggggggggtctcaatttgttaccctggctggtctcgaactcccggacttaagcgatcctctggctccaagcccactaccagtctcaggtttctttactaaaagatcactacctttttttctcttatctgctgccatgtgagatgtggctttcaccttccgccatgattgtgaggccttcccagccacgtggaactgtaagtccaataaacctcttttgtaaattaaaaaaaaatcactatttaagatactaggatggattgtgactgttgaggagtacttacatatcctacatttgactacattatttccaaaccaagtattccatccaaaggaacatactgctatcatagagaccaaggagggactgtttaaggttgccaaggtgaagcgagctgagaggctttgtcctcgtgccagtaactctgaaatctctcttaattcctgctgtccaggcagcagaatgccatggtttccccaagtaggtagctgctttagcagttaaagcccaaatgtctgttctgttgatcagaggtctctgaatttctgaagtggtgtttcgtttctggtgactgagttaatcctttacaatccctcttgtaaagtgtgctaatagaaagaatccacctttcaaagctgcagaaccagaccgtgccctaaattgaccaacgtagctgatgtgcctcaggaagtctcttgccagctgtccctgtgaagaccccctcctcccccccagctgctgccttgcacactgaagcatctcagactgtgcaaagccgtgtagtcatcaagacagtaaatcccagggcttggttaagtgctgtgtgataacttgtttggatgagacttaacttaaaaccacttacaataaacttgggaaactaccgtca

SEQ ID NO: 278619 - DNA, 1752 bp, Homo sapiens
  misc_feature (231)..(231): n is a, c, g, or t
  misc_feature (234)..(234): n is a, c, g, or t
  misc_feature (250)..(250): n is a, c, g, or t
ggcgcctgaggctgccgggtagcccagcaggccgagggaggaagtagcgtggagccggtgccgagccggggcgaagctggatcccctagatatactgtcttcaagctcactgatattttcctctgcttgatccattgtgctgttgagagcctctagtaaatttttcagactgacagaccaaggatgcagctgctactaccggaggtgtgtggcaccttacctcagcaaggnatnaaccgagtggccatgntacggccggaggtcggccgcgtggctggaagacatggccactccagtcggtgttgagcacggcgagcagtctcaggcctttagtgatgactttagtagagactgggtttcaccatgttggccaggatggtctctatctcctgaccttgtgatctgcctgcctcagcttcccaaagtgctgagatgacaggtgtgagccatcagacccagcatttttttttttaatttaaatttaaattttttttcatttttttgagaggtttttttggtgttggtttggtggtggtgtggtggtggtggtggttttggagacagtcttgctctgtcacccaggctgggagtgcagtggcatgatctctgcaacctctacctcccaggttcaagcaattcttgtgcctcagcctcccaagtaactgggactacaggtgcacgctaccacacctggctgatttttttttgttttagtagagacagggtttcaaccatgttgcccaggttggtctcaaactcctgagctcaggcaatccacccgccttggcctcccaaagtgctaggattacaggtgtgagccaccacacccagctattttttctttcgttttttaattttaaagttggggggggtctcaatttgttaccctggctggtctcgaactcccggacttaagcgatcctctggctccaagcccactaccagtctcaggtttctttactaaaagatcactacctttttttctcttatctgctgccatgtgagatgtggctttcaccttccgccatgattgtgaggccttcccagccacgtggaactgtaagtccaataaacctcttttgtaaattaaaaaaaaatcactatttaagatactaggatggattgtgactgttgaggagtacttacatatcctacatttgactacattatttccaaaccaagtattccatccaaaggaacatactgctatcatagagaccaaggagggactgtttaaggttgccaaggtgaagcgagctgagaggctttgtcctcgtgccagtaactctgaaatctctcttaattcctgctgtccaggcagcagaatgccatggtttccccaagtaggtagctgctttagcagttaaagcccaaatgtctgttctgttgatcagaggtctctgaatttctgaagtggtgtttcgtttctggtgactgagttaatcctttacaatccctcttgtaaagtgtgctaatagaaagaatccacctttcaaagctgcagaaccagaccgtgccctaaattgaccaacgtagctgatgtgcctcaggaagtctcttgccagctgtccctgtgaagaccccctcctcccccccagctgctgccttgcacactgaagcatctcagactgtgcaaagccgtgtagtcatcaagacagtaaatcccagggcttggttaagtgctgtgtgataacttgtttggatgagacttaacttaaaaccacttacaataaacttgggaaactaccgtca

SEQ ID NO: 278620 - DNA, 2140 bp, Homo sapiens
  misc_feature (231)..(231): n is a, c, g, or t
  misc_feature (234)..(234): n is a, c, g, or t
  misc_feature (250)..(250): n is a, c, g, or t
ggcgcctgaggctgccgggtagcccagcaggccgagggaggaagtagcgtggagccggtgccgagccggggcgaagctggatcccctagatatactgtcttcaagctcactgatattttcctctgcttgatccattgtgctgttgagagcctctagtaaatttttcagactgacagaccaaggatgcagctgctactaccggaggtgtgtggcaccttacctcagcaaggnatnaaccgagtggccatgntacggccggaggtcggccgcgtggctggaagacatggccactccagtcggtgttgagcacggcgagcagtctcaggcctttagtgatgatgattaaaggtggtggctgtggccttgaaaacagtcatgtgaaaactcatcaccttaaggtgttaagtgtaaggatcttcatgatgaaatttctgtaaatggtgcagtcagcctcagtttccaaagccggaaaaggatcctctagtagccacggtgtggcagctgctctgaaccaggacctggacccggacccaaagtgccatgtctttaatgttagctcccagcgatgccagatgggatcagcacagccctgcctctgctgctaattgttcctctaaagtaatcgccatgcgttctttgggcttcatctttaaaggaatgaagcaactgagattattctggaaaaccttttggcagttagtgaaattagagtacaactaagaacattttcagacctccactgtggatgacctgggtataatctcacaaatcgatgggactgcaaggattgtaaactgaaatgaacatgattatactctgttggaagagcctaagaggaaactgatgccatgagtttcagagagtaatgcttaaccccagttacacaggatgccgtcttgtgtttcctcttgtttagttacccactacagtgattttgtgatctgctaatgggttgccacccacaaccattgctttagcacttttacttcaaatcaatgaaggattgataaaagttctcctggtgtctccgcagagtgccttccaggaacagatctttgcatagaatatcagtggtttccttttttgtttcaaatagtggtcagaaaatacccagtgttgactcaccaaggcaatcagcttcctttttccctttttttgttttttttttaacattttatattttggctttattttattttattttattttataacattttatatttttgctttattttattttattttattttttgagacggagttccactctgtcgccaggctggagtgaagtggtacaatcttggctcactgcaacctccacctcccgggttcaagcaattctcctggctcagcctcctgagtgctgggactacaggcgcgtaccttctttagtagagactgggtttcaccatgttggccaggatggtctctatctcctgaccttgtgatctgcctgcctcagcttcccaaagtgctgagatgacaggtgtgagccatcagacccagcatttttttttttaatttaaatttaaattttttttcatttttttgagaggttttttttgtttgtttggttgttgttgttgttgttgttgttgttgtttttgagacagtcttgctctgtcacccaggctgggagtgcagtggcatgatctctgcaacctctacctcccaggttcaagcaattcttgtgcctcagcctcccaagtaactgggactacaggtgcacgctaccacacctggctgatttttttttgttttagtagagacagggtttcaaccatgttgcccaggttggtctcaaactcctgagctcaggcaatccacccgccttggcctcccaaagtgctaggattacaggtgtgagccaccacacccagctattttttctttcgttttttaattttaaagttggggggggtctcaatttgttaccctggctggtctcgaactcccggacttaagcgatcctctggctccaagcccactaccagtctcaggtttctttactaaaagatcactacctttttttctcttatctgctgccatgtgagatgtggctttcaccttccgccatgattgtgaggccttcccagccacgtggaactgtaagtccaataaacctcttttgtaaatta

SEQ ID NO: 278621 - DNA, 1644 bp, Homo sapiens
  misc_feature (231)..(231): n is a, c, g, or t
  misc_feature (234)..(234): n is a, c, g, or t
  misc_feature (250)..(250): n is a, c, g, or t
ggcgcctgaggctgccgggtagcccagcaggccgagggaggaagtagcgtggagccggtgccgagccggggcgaagctggatcccctagatatactgtcttcaagctcactgatattttcctctgcttgatccattgtgctgttgagagcctctagtaaatttttcagactgacagaccaaggatgcagctgctactaccggaggtgtgtggcaccttacctcagcaaggnatnaaccgagtggccatgntacggccggaggtcggccgcgtggctggaagacatggccactccagtcggtgttgagcacggcgagcagtctcaggcctttagtgatgatggtgcagtcagcctcagtttccaaagccggaaaaggatcctctagtagccacggtgtggcagctgctctgaaccaggacctggacccggacccaaagtgccatgtctttaatgttagctcccagcgatgccagatgggatcagcacagccctgcctctgctgctaattgttcctctaaagtaatcgccatgcgttctttgggcttcatctttaaaggaatgaagcaactgagattattctggaaaaccttttggcagttagtgaaattagagtacaactaagaacattttcagacctccactgtggatgacctgggtataatctcacaaatcgatgggactgcaaggattgtaaactgaaatgaacatgattatactctgttggaagagcctaagaggaaactgatgccatgagtttcagagagtaatgcttaaccccagttacacaggatgccgtcttgtgtttcctcttgtttagttacccactacagctaccagtctcaggtttctttactaaaagatcactacctttttttctcttatctgctgccatgtgagatgtggctttcaccttccgccatgattgtgaggccttcccagccacgtggaactgtaagtccaataaacctcttttgtaaattaaaaaaaaatcactatttaagatactaggatggattgtgactgttgaggagtacttacatatcctacatttgactacattatttccaaaccaagtattccatccaaaggaacatactgctatcatagagaccaaggagggactgtttaaggttgccaaggtgaagcgagctgagaggctttgtcctcgtgccagtaactctgaaatctctcttaattcctgctgtccaggcagcagaatgccatggtttccccaagtaggtagctgctttagcagttaaagcccaaatgtctgttctgttgatcagaggtctctgaatttctgaagtggtgtttcgtttctggtgactgagttaatcctttacaatccctcttgtaaagtgtgctaatagaaagaatccacctttcaaagctgcagaaccagaccgtgccctaaattgaccaacgtagctgatgtgcctcaggaagtctcttgccagctgtccctgtgaagaccccctcctcccccccagctgctgccttgcacactgaagcatctcagactgtgcaaagccgtgtagtcatcaagacagtaaatcccagggcttggttaagtgctgtgtgataacttgtttggatgagacttaacttaaaaccacttacaataaacttgggaaactaccgtca

SEQ ID NO: 278622 - DNA, 916 bp, Homo sapiens
  misc_feature (231)..(231): n is a, c, g, or t
  misc_feature (234)..(234): n is a, c, g, or t
  misc_feature (250)..(250): n is a, c, g, or t
ggcgcctgaggctgccgggtagcccagcaggccgagggaggaagtagcgtggagccggtgccgagccggggcgaagctggatcccctagatatactgtcttcaagctcactgatattttcctctgcttgatccattgtgctgttgagagcctctagtaaatttttcagactgacagaccaaggatgcagctgctactaccggaggtgtgtggcaccttacctcagcaaggnatnaaccgagtggccatgntacggccggaggtcggccgcgtggctggaagacatggccactccagtcggtgttgagcacggcgagcagtctcaggcctttagtgatgatggtgcagtcagcctcagtttccaaagccggaaaaggatcctctagtagccacggtgtggcagctgctctgaaccaggacctggacccggacccaaagtgccatgtctttaatgttagctcccagcgatgccagatgggatcagcacagccctgcctctgctgctaattgttcctctaaagtaatcgccatgcgttctttgggcttcatctttaaaggaatgaagcaactgagattattctggaaaaccttttggcagttagtgaaattagagtacaactaagaacattttcagacctccactgtggatgacctgggtataatctcacaaatcgatgggactgcaaggattgtaaactgaaatgaacatgattatactctgttggaagagcctaagaggaaactgatgccatgagtttcagagagtaatgcttaaccccagttacacaggatgccgtcttgtgtttcctcttgtttagttacccactacagtgattttgtgatctgctaatgggttgccacccacaaccattgctttagcacttttacttcaaatcaatgaaggattgataaaagtt

SEQ ID NO: 278623 - DNA, 1146 bp, Homo sapiens
  misc_feature (231)..(231): n is a, c, g, or t
  misc_feature (234)..(234): n is a, c, g, or t
  misc_feature (250)..(250): n is a, c, g, or t
ggcgcctgaggctgccgggtagcccagcaggccgagggaggaagtagcgtggagccggtgccgagccggggcgaagctggatcccctagatatactgtcttcaagctcactgatattttcctctgcttgatccattgtgctgttgagagcctctagtaaatttttcagactgacagaccaaggatgcagctgctactaccggaggtgtgtggcaccttacctcagcaaggnatnaaccgagtggccatgntacggccggaggtcggccgcgtggctggaagacatggccactccagtcggtgttgagcacggcgagcagtctcaggcctttagtgatgatggtgcagtcagcctcagtttccaaagccggaaaaggatcctctagtagccacggtgtggcagctgctctgaaccaggacctggacccggacccaaagtgccatgtctttaatgttagctcccagcgatgccagatgggatcagcacagccctgcctctgctgctaattgttcctctaaagtaatcgccatgcgttctttgggcttcatctttaaaggaatgaagcaactgagattattctggaaaaccttttggcagttagtgaaattagagtacaactaagaacattttcagacctccactgtggatgacctgggtataatctcacaaatcgatgggactgcaaggattgtaaactgaaatgaacatgattatactctgtaaaaaaacacaagaacaaaaaagaaaaaagaaaaagaaaaataggaaaaaaaaaaagaaacggggggggcattattggggggggggggaaaaagggtataagaaggggggggggtaaaggtgtgttcggcggccccctttttttgtcacaagggggggaaaagggggggccccagaagggagggcactaaaggttcagaagaagcggatttagctttttttttgggtggaaaaaatgataacacaaagaggtcaacgatcataaaaaagggagcagagaggaaaaaaagaggagggaaacaaaagtgaacaagaaattacaaagcacgaagttcatttattagagtttgatagattgatgtagtgaaaagtaaatagagatgaagaagagaagaatgatatgtggaaacagagtaagtgtctttg

SEQ ID NO: 278624 - DNA, 762 bp, Homo sapiens
aatgctgtgcagctagttttcttcatgaagttctaaattactcactgcttcttttcttggtattattatcttaactttttttagagcttatccttctaaactttaaaaaataaacatgaatattcaaaaataagtataattaaatgctcttatgctaaatatttgtacttaaattattttaattattattttgtaacatacttccctttcccttatttaataatacgtctttccagattaaaatatggagatctacataattttgaatgagtgtataatttcccattgcttgtttgctccataatgtttctttatttatttatttattttgagacagagtcgcttgaacctgggaggcggagcttgcagtgagccgagatcgcaccactgcactccagcctgggcaacagagtgagactgtctcaaaaaaaaaaaaaaaaaaaaaaaaaaaaaaatttactgggtatctgtttcactttgtaggtcatcagaagattgagagaaagaggagaaccaatcagactatttggagagactgattatgatgcttttcaacgtttaaggaaaatagagatcctcacaccagaagttaacaagagtctcactccgtcacctacgctggaatgcggtggcataatcatggctcatggcagctgcaacctcctgggcttaagcagtcctcccacctcagcctctcaagtagctgggattacaggcgctttttgttcattttaaaaataaacttgtctttttgtaaatgga

SEQ ID NO: 278625 - DNA, 1533 bp, Homo sapiens
tctctctcatcccagcttccgccggaagcggctcctgtcagttgttctcaggtgtttgggcttgttgttccgtatactcagtgggttcgcggccgccggcccagtgaggctgggttcgaggagctggagcgggaaactggagcttaaattctggcggcgagatggacattctgaaatcagagatccttcggaagcggcagctggtggaggacaggaacctgctggtggaaaataaaaaatatttcaagcgtagtgagctcgccaaaaaagaagaggaagcatattttgaaagatgtggctacaagatacagccaaaagaggaggaccagaaaccattaacttcatcgaatccagtgttagaacttgaactggcagaggaaaaattacctatgacgctttctaggcaagaggtcatcagaagattgagagaaagaggagaaccaatcagactatttggagagactgattatgatgcttttcaacgtttaaggaaaatagagatcctcacaccagaagttaacaagggattgaggaatgatttgaaagcagccttggataagattgatcagcagtacctcaatgaaatcgtcggcggtcaggagcctggagaggaagacacacagaatgatctgaaagttcatgaggaaaacaccacaattgaagagttagaggcgcttggagagtccttagggaaaggcgatgatcataaggacatggacatcatcaccaaattcctgaagtttcttcttggcgtttgggctaaagaattgaatgccagagaagattatgtgaaacgcagtgtgcagggtaaactgaacagtgcgacccagaaacagaccgagtcctacctaagaccactttttagaaagctacggaaaaggaatcttcctgctgatattaaagaatcaataacggatattattaaattcatgttgcagagagaatacgtgaaggcaaatgatgcttatcttcagatggccattggaaatgcgccttggcccatcggtgtcactatggttggtatccatgccagaactggcagagaaaagattttttccaagcatgttgcacatgttttaaatgacgaaactcagcggaaatatattcagggattgaagaggttaatgaccatttgccagaaacactttcctacagacccatccaaatgtgtggagtacaatgcactgtgagatctgtgtatggtgtgttaataacaataagaaacttagggaagcaggctgtggacttctggaattaccaacaggaatgaggaaagaagaaaactggagtttccagtctctgagttctacctgatgtaactcttgattggttttaagaactttgttggccttcatttcatatctgactgcaagctgatttttctttcttgctttcattttaattagtccaaaattaagttttaaagatttttcctcacaatttaaatccatagacaacagaagggggtttaaaatgacctttttttcagttgacccgaaagttgtggttagatgattaaaaagaaacatttga

SEQ ID NO: 278626 - DNA, 1514 bp, Homo sapiens
  misc_feature (330)..(330): n is a, c, g, or t
tctctctcatcccagcttccgccggaagcggctcctgtcagttgttctcaggtgtttgggcttgttgttccgtatactcagtgggttcgcggccgccggcccagtgaggctgggttcgaggagctggagcgggaaactggagcttaaattctggcggcgagatggacattctgaaatcagagatccttcggaagcggcagctggtggaggacaggaacctgctggtggcaaatgatgcttatcttcagatggccattggaaatgcgccttggcccatcggtgtcactatgtgaagttgacacaaaattaaccatcacagctgccttcctntgggcctcatgttatatgagaacagtattgggtgtacacttaaagcgttctgggaatatgaatcccttctgcaccctggaatcaccagtccagccatgcatggagctggggaaagcaggccctgaattgtctagagagacttggtggaggaagccacggcccgccttgtccctgcgggtcccggccaggtgtgtgtgtgccccagctcgactctcggtggtctccaggctgcagcagaaggaataccttgggccctgtgctaatcacgagtctttcctgttcggagcagtgaggcctgagaccctcaacagtgctgtgtgtacagaaggcccccagaatccacacaaaggggccgcctgaaacctagagcatttgtgaaggaggaaaatggaaggaacaactggatgttgtaaatgtttctcatctggccttaaaatccatgaaagctggaaaatcacaaggcatctgtgcatatactggtggattttaatgagagtcctgtgtttggagcaccagaaataaaccagcttcagaagcaaagatctgaacgtctatgacactctttcgagctgacacagtgaagaacatagaaggagaactcacccagtctgccagggtcacagaatgatcatactcaagatcttcctggggagtcaatggcaaatttcactgggctattttacagatgaagaaggaacataaagaaggttctgggaccccgaagtccacggaacacccaccattacctgatctttggagcttgtcatttggccagtggaccctaataaacgtccacggggatgtggggatagaatgccggagcctggctcgctagggcatccaggttcttccttcctctttgccctgctgtctccaggcaccaagaatctcctacagttccccaaagatgaaccccccattatctcaggtcactctgtttcccccgatctttaccaaattcctgactcagagttcctcccatttgcttctgactctcattttattcttacctctcattttattcttatgatgtttaccatttctcttctcctcagtgtccctctctgagtggtaagagtatgttaataagccagtgctgagaccggagcacgaggcaactgctcaatgttggtcattgtcactgttattaaatgtaacttaagggaatgagtggtttcttcctt

SEQ ID NO: 278627 - DNA, 1172 bp, Homo sapiens
gctgtatgcaaacatgtcaagctatcaaagggagctgcctttcggtttcattaattttgttgtgtgcagcttccactgaaggcttcagggcacctgatctcttttgtgtgttgagaaagagcaagtgcttggccaggacacagccctttttcttgcaccctgagacatcctaagacactggctgtttcacctgccccagtgtatttgctgtcttcatcagctctctttctccccctgacattcttgcctggcattttgagtcagcctgagtataatccaaaccgaaatgaaatgctgtctggaaatcttaccaaagaagcacagtcccacttcgtgcttccatctccccacatcccaaggaccaccgcctactttaagagaacacagacaattcacctctataaaggcacagccaggaaaaggagtaggcagaggtgacagcagatcatggggcttctcttgaaaggaagacacctcccagtgatgaaccctcatcatccatttactgacatatccttatgtcaccaggatctgaacgtctatgacactctttcgagctgacacagtgaagaacatagaaggagaactcacccagtctgccagggtcacagaatgatcatactcaagatcttcctggggagtcaatggcaaatttcactgggctattttacagatgaagaaggaacataaagaaggttctgggaccccgaagtccacggaacacccaccattacctgatctttggagcttgtcatttggccagtggaccctaataaacgtccacggggatgtggggatagaatgccggagcctggctcgctagggcatccaggttcttccttcctctttgccctgctgtctccaggcaccaagaatctcctacagttccccaaagatgaaccccccattatctcaggtcactctgtttcccccgatctttaccaaattcctgactcagagttcctcccatttgcttctgactctcattttattcttacctctcattttattcttatgatgtttaccatttctcttctcctcagtgtccctctctgagtggtaagagtatgttaataagccagtgctgagaccggagcacgaggcaactgctcaatgttggtcattgtcactgttattaaatgtaacttaagggaatgagtggtttcttcctt

SEQ ID NO: 278628 - DNA, 1931 bp, Homo sapiens
ttttttttttaagtattttaggtaggtatcaccatttaggttgggtagaagtaattcttaaatcttaagaagcaatcatagatatgtggaagccaatagtcattactagggatcatgattcggaaaaacagcctctcttcaatgatcctgaatgagccctttgaattcctctcctgcaactgatctccccatggggagtggtgagggatgggtgacaggaagggaccctaacccaaagtagttcagagcgggtgagttttaggagcatttcggtaccaaacacagcttcacgattgagaatcatcagtcatccccagctttctatttcatttgctaacctctctaggaacaactggatgttgtaaatgtttctcatctggccttaaaatccatgaaagctggaaaatcacaaggcatctgtgcatatactggtggattttaatgagagtcctgtgtttggagcaccagaaataaaccagcttcagaagcaaagtaagaaaaggcccttgattatgacactggccatgggtattactatatgtaggtggtatgtggatgattctgggacacctgtcctgcaaactttgtctccaccctaagctgacttttgacattgtgcctgactgaaaaacttctaatgggagaggtggttgggccttgcaggggtcctatgtttttcttagggggacagtctctccctaactccacgtggtcctggtggtgctctccaccatggcgccatcctcactcccgtgggggccaggggacaaggaacccaacggggccgggccaatgagagtcccccgatcaaaatccctggttcaaaggtggccacgtgcctgagcagctttgaaaccacaaggatgtcatttcctcctgagaactaggttaacaggaggaggaagcagagctagagatggaaggagacccagccagcccgggctccagtgacatcggctggtacacgcttttgtttgcttacgcttgttgaactgagtttttcatatgtaactaacgaatactggcacatgtaagtagtttcttaaactgttgatgaaatttttgtttctaacacaaacatgatctgggtctgtttgggataaaacttccctaaggggtttcatgagatcttaggaacacttagccagtgtttcccaaagtagtcctgtgagttgctctgaggggaaaaaaagcttccatggataaataaatttgaggattctgcctttcagaggcctgaaatgtaaatgtatatgaaacatatattaaaggttctgagaagtcctggattagtttgccacagaacttctggaacagtatcacctattaacatccacagaacacactttgaaaaatactcttaaatgggctaatattatgaaatgtagttgactctcttgtatgttggatcctaaacagtttctggttgaaactattaaagttgagtcataattgtgacaacataatctgcttcagagggactaaaagtgcactatgtattgatcataaaggctcaagaaagaccattgagttcaaagcagtgatgtttggatcaggcagtagatgaggttaagggttcctgtggtggtttatttggtatgtgaagagcctaactgttggctggcccatggtgttctcctgtggttcattatggaggcttctgggtcacagaacccacatatgagagggcatcgggaggatctggatgatggggtgggagatgctggattggtggtttggttctcaggtggctcctagaggagccgcagtatggaaaccactggcctgctcctgcctctgagaaaatgaagctggaggaaaagatgtaaagatgtattttttccaaacttgcgatgttttatacagaatctttcttagtgcttccacatagttattgaagtacgtaaggtatttttaaagctataaatgtt

SEQ ID NO: 278629 - DNA, 339 bp, Homo sapiens
tctctctcatcccagcttccgccggaagcggctcctgtcagttgttctcaggtgtttgggcttgttgttccgtatactcagtgggttcgcggccgccggcccagtgaggctgggttcgaggagctggagcgggaaactggagcttaaattctggcggcgagatggacattctgaaatcagagatccttcggaagcggcagctggtggaggacaggaacctgctggtggtgaggaccctgcggtcgtgggggtcgggatgtaagagtgagagtatgtgatggtctgaagctacatgcacagaattcccatcagctgtatcatggctagttctatgtttac

SEQ ID NO: 278630 - DNA, 1724 bp, Homo sapiens
tctctctcatcccagcttccgccggaagcggctcctgtcagttgttctcaggtgtttgggcttgttgttccgtatactcagtgggttcgcggccgccggcccagtgaggctgggttcgaggagctggagcgggaaactggagcttaaattctggcggcgagatggacattctgaaatcagagatccttcggaagcggcagctggtggaggacaggaacctgctggtggaaaataaaaaatatttcaagcgtagtgagctcgccaaaaaagaagaggaagcatattttgaaagatgtggctacaagatacagccaaaagaggaggaccagaaaccattaacttcatcgaatccagtgttagaacttgaactggcagaggaaaaattacctatgacgctttctaggcaagaggtcatcagaagattgagagaaagaggagaaccaatcagactatttggagagactgattatgatgcttttcaacgtttaaggaaaatagagatcctcacaccagaagttaacaagggattgaggaatgatttgaaagcagccttggataagattgatcagcagtacctcaatgaaatcgtcggcggtcaggagcctggagaggaagacacacagaatgatctgaaagttcatgaggaaaacaccacaattgaagagttagaggcgcttggagagtccttagggaaaggcgatgatcataaggacatggacatcatcaccaaattcctgaagtttcttcttggcgtttgggctaaagaattgaatgccagagaagattatgtgaaacgcagtgtgcagggtaaactgaacagtgcgacccagaaacagaccgagtcctacctaagaccactttttagaaagctacggaaaaggaatcttcctgctgatattaaagaatcaataacggatattattaaattcatgttgcagagagaatacgtgaaggcaaatgatgcttatcttcagatggccattggaaatgcgccttggcccatcggtgtcactatggttggtatccatgccagaactggcagagaaaagattttttccaagcatgttgcacatgttttaaatgacgaaactcagcggaaatatattcagggattgaagaggttaatgaccatttgccagaaacactttcctacagacccatccaaatgtgtggagtacaatgcactgtgagatctgtgtatggtgtgttaataacaataagaaacttagggaagcaggctgtggacttctggaattaccaacaggaatgaggaaagaagaaaactggagtttccagtctctgagttctacctgatgtaactcttgattggttttaagaactttgttggccttcatttcatatctgactgcaagctgatttttctttcttgctttcattttaattagtccaaaattaagttttaaagatttttcctcacaatttaaatccatagacaacagaagggggtttaaaatgacctttttttcagttgacccgaaagttgtggttagatgattaaaaagaaacatttgaggatggacttaattatttcagtaaaatattataatttgcctattgtcttttatgtaatatttatataaaatatttttatatatttcaaaaacatgggaccattgaatgaaactttatagtccttaaatgttgctgaacttttgctgtcttgcaatagaatttgaatgtaaatattattactggtaaaaaaa

SEQ ID NO: 278631 - DNA, 1630 bp, Homo sapiens
tctctctcatcccagcttccgccggaagcggctcctgtcagttgttctcaggtgtttgggcttgttgttccgtatactcagtgggttcgcggccgccggcccagtgaggctgggttcgaggagctggagcgggaaactggagcttaaattctggcggcgagatggacattctgaaatcagagatccttcggaagcggcagctggtggaggacaggaacctgctggtggaaaataaaaaatatttcaagcgtagtgagctcgccaaaaaagaagaggaagcatattttgaaagatgtggctacaagatacagccaaaagaggaggaccagaaaccattaacttcatcgaatccagtgttagaacttgaactggcagaggaaaaattacctatgacgctttctaggcaagaggtcatcagaagattgagagaaagaggagaaccaatcagactatttggagagactgattatgatgcttttcaacgtttaaggaaaatagagatcctcacaccagaagttaacaagggattgaggaatgatttgaaagcagccttggataagattgatcagcagtacctcaatgaaatcgtcggcggtcaggagcctggagaggaagacacacagaatgatctgaaagttcatgaggaaaacaccacaattgaagagttagaggcgcttggagagtccttagggaaaggcgatgatcataaggacatggacatcatcaccaaattcctgaagtttcttcttggcgtttgggctaaagaattgaatgccagagaagattatgtgaaacgcagtgtgcagggtaaactgaacagtgcgacccagaaacagaccgagtcctacctaagaccactttttagaaagctacggaaaaggaatcttcctgctgatattaaagaatcaataacggatattattaaattcatgttgcagagagaatacgtgaaggcaaatgatgcttatcttcagatggccattggaaatgcgccttggcccatcggtgtcactatggttggtatccatgccagaactggcagagaaaagattttttccaagcatgttgcacatgttttaaatgacgaaactcagcggaaatatattcagggattgaagaggttaatgaccatttgccagaaacactttcctacagacccatccaaatgtgtggagtacaatgcactgtgagatctgtgtatggtgtgttaataacaataagaaacttagggaagcaggctgtggacttctggaattaccaacaggaatgaggaaagaagaaaactggagtttccagtctctgagttctacctgatgtaactcttgattggttttaagaactttgttggccttcatttcatatctgactgcaagctgatttttctttcttgctttcattttaattagtccaaaattaagttttaaagatttttcctcacaatttaaatccatagacaacagaagggggtttaaaatgacctttttttcagttgacccgaaagttgtggttagatgattaaaaagaaacatttgaggatggacttaattatttcagtaaaatattataatttgcaaaaagacaaaaaacaaaacaaaacaaacaaaagaacatgtgtgtgtgcgcgcgcgcg

SEQ ID NO: 278632 - DNA, 1583 bp, Homo sapiens
tctctctcatcccagcttccgccggaagcggctcctgtcagttgttctcaggtgtttgggcttgttgttccgtatactcagtgggttcgcggccgccggcccagtgaggctgggttcgaggagctggagcgggaaactggagcttaaattctggcggcgagatggacattctgaaatcagagatccttcggaagcggcagctggtggaggacaggaacctgctggtggaaaataaaaaatatttcaagcgtagtgagctcgccaaaaaagaagaggaagcatattttgaaagatgtggctacaagatacagccaaaagaggaggaccagaaaccattaacttcatcgaatccagtgttagaacttgaactggcagaggaaaaattacctatgacgctttctaggcaagaggtcatcagaagattgagagaaagaggagaaccaatcagactatttggagagactgattatgatgcttttcaacgtttaaggaaaatagagatcctcacaccagaagttaacaagggattgaggaatgatttgaaagcagccttggataagattgatcagcagtacctcaatgaaatcgtcggcggtcaggagcctggagaggaagacacacagaatgatctgaaagttcatgaggaaaacaccacaattgaagagttagaggcgcttggagagtccttagggaaaggcgatgatcataaggacatggacatcatcaccaaattcctgaagaatcttcctgctgatattaaagaatcaataacggatattattaaattcatgttgcagagagaatacgtgaaggcaaatgatgcttatcttcagatggccattggaaatgcgccttggcccatcggtgtcactatggttggtatccatgccagaactggcagagaaaagattttttccaagcatgttgcacatgttttaaatgacgaaactcagcggaaatatattcagggattgaagaggttaatgaccatttgccagaaacactttcctacagacccatccaaatgtgtggagtacaatgcactgtgagatctgtgtatggtgtgttaataacaataagaaacttagggaagcaggctgtggacttctggaattaccaacaggaatgaggaaagaagaaaactggagtttccagtctctgagttctacctgatgtaactcttgattggttttaagaactttgttggccttcatttcatatctgactgcaagctgatttttctttcttgctttcattttaattagtccaaaattaagttttaaagatttttcctcacaatttaaatccatagacaacagaagggggtttaaaatgacctttttttcagttgacccgaaagttgtggttagatgattaaaaagaaacatttgaggatggacttaattatttcagtaaaatattataatttgcctattgtcttttatgtaatatttatataaaatatttttatatatttcaaaaacatgggaccattgaatgaaactttatagtccttaaatgttgctgaacttttgctgtcttgcaatagaatttgaatgtaaatattattactggtaaaaaaa

SEQ ID NO: 278633 - DNA, 2240 bp, Homo sapiens
  misc_feature (1056)..(1056): n is a, c, g, or t
tctctctcatcccagcttccgccggaagcggctcctgtcagttgttctcaggtgtttgggcttgttgttccgtatactcagtgggttcgcggccgccggcccagtgaggctgggttcgaggagctggagcgggaaactggagcttaaattctggcggcgagatggacattctgaaatcagagatccttcggaagcggcagctggtggaggacaggaacctgctggtggaaaataaaaaatatttcaagcgtagtgagctcgccaaaaaagaagaggaagcatattttgaaagatgtggctacaagatacagccaaaagaggaggaccagaaaccattaacttcatcgaatccagtgttagaacttgaactggcagaggaaaaattacctatgacgctttctaggcaagaggtcatcagaagattgagagaaagaggagaaccaatcagactatttggagagactgattatgatgcttttcaacgtttaaggaaaatagagatcctcacaccagaagttaacaagggattgaggaatgatttgaaagcagccttggataagattgatcagcagtacctcaatgaaatcgtcggcggtcaggagcctggagaggaagacacacagaatgatctgaaagttcatgaggaaaacaccacaattgaagagttagaggcgcttggagagtccttagggaaaggcgatgatcataaggacatggacatcatcaccaaattcctgaagtttcttcttggcgtttgggctaaagaattgaatgccagagaagattatgtgaaacgcagtgtgcagggtaaactgaacagtgcgacccagaaacagaccgagtcctacctaagaccactttttagaaagctacggaaaaggaatcttcctgctgatattaaagaatcaataacggatattattaaattcatgttgcagagagaatacgtgaaggcaaatgatgcttatcttcagatggccattggaaatgcgccttggcccatcggtgtcactatgtgaagttgacacaaaattaaccatcacagctgccttcctntgggcctcatgttatatgagaacagtattgggtgtacacttaaagcgttctgggaatatgaatcccttctgcaccctggaatcaccagtccagccatgcatggagctggggaaagcaggccctgaattgtctagagagacttggtggaggaagccacggcccgccttgtccctgcgggtcccggccaggtgtgtgtgtgccccagctcgactctcggtggtctccaggctgcagcagaaggaataccttgggccctgtgctaatcacgagtctttcctgttcggagcagtgaggcctgagaccctcaacagtgctgtgtgtacagaaggcccccagaatccacacaaaggggccgcctgaaacctagagcatttgtgaaggaggaaaatggaaggaacaactggatgttgtaaatgtttctcatctggccttaaaatccatgaaagctggaaaatcacaaggcatctgtgcatatactggtggattttaatgagagtcctgtgtttggagcaccagaaataaaccagcttcagaagcaaagatctgaacgtctatgacactctttcgagctgacacagtgaagaacatagaaggagaactcacccagtctgccagggtcacagaatgatcatactcaagatcttcctggggagtcaatggcaaatttcactgggctattttacagatgaagaaggaacataaagaaggttctgggaccccgaagtccacggaacacccaccattacctgatctttggagcttgtcatttggccagtggaccctaataaacgtccacggggatgtggggatagaatgccggagcctggctcgctagggcatccaggttcttccttcctctttgccctgctgtctccaggcaccaagaatctcctacagttccccaaagatgaaccccccattatctcaggtcactctgtttcccccgatctttaccaaattcctgactcagagttcctcccatttgcttctgactctcattttattcttacctctcattttattcttatgatgtttaccatttctcttctcctcagtgtccctctctgagtggtaagagtatgttaataagccagtgctgagaccggagcacgaggcaactgctcaatgttggtcattgtcactgttattaaatgtaacttaagggaatgagtggtttcttcctt

SEQ ID NO: 278634 - DNA, 1845 bp, Homo sapiens
tctctctcatcccagcttccgccggaagcggctcctgtcagttgttctcaggtgtttgggcttgttgttccgtatactcagtgggttcgcggccgccggcccagtgaggctgggttcgaggagctggagcgggaaactggagcttaaattctggcggcgagatggacattctgaaatcagagatccttcggaagcggcagctggtggaggacaggaacctgctggtgaggaactcgattgaggaccagaggtccagtcacaagtaacaagccactagccaggtgcttcaggaagaccgccctcttgcctctgtggaatccagtgaggatgatcagaacgttccccggggaaaataaaaaatatttcaagcgtagtgagctcgccaaaaaagaagaggaagcatattttgaaagatgtggctacaagatacagccaaaagaggaggaccagaaaccattaacttcatcgaatccagtgttagaacttgaactggcagaggaaaaattacctatgacgctttctaggcaagaggtcatcagaagattgagagaaagaggagaaccaatcagactatttggagagactgattatgatgcttttcaacgtttaaggaaaatagagatcctcacaccagaagttaacaagggattgaggaatgatttgaaagcagccttggataagattgatcagcagtacctcaatgaaatcgtcggcggtcaggagcctggagaggaagacacacagaatgatctgaaagttcatgaggaaaacaccacaattgaagagttagaggcgcttggagagtccttagggaaaggcgatgatcataaggacatggacatcatcaccaaattcctgaagtttcttcttggcgtttgggctaaagaattgaatgccagagaagattatgtgaaacgcagtgtgcagggtaaactgaacagtgcgacccagaaacagaccgagtcctacctaagaccactttttagaaagctacggaaaaggaatcttcctgctgatattaaagaatcaataacggatattattaaattcatgttgcagagagaatacgtgaaggcaaatgatgcttatcttcagatggccattggaaatgcgccttggcccatcggtgtcactatggttggtatccatgccagaactggcagagaaaagattttttccaagcatgttgcacatgttttaaatgacgaaactcagcggaaatatattcagggattgaagaggttaatgaccatttgccagaaacactttcctacagacccatccaaatgtgtggagtacaatgcactgtgagatctgtgtatggtgtgttaataacaataagaaacttagggaagcaggctgtggacttctggaattaccaacaggaatgaggaaagaagaaaactggagtttccagtctctgagttctacctgatgtaactcttgattggttttaagaactttgttggccttcatttcatatctgactgcaagctgatttttctttcttgctttcattttaattagtccaaaattaagttttaaagatttttcctcacaatttaaatccatagacaacagaagggggtttaaaatgacctttttttcagttgacccgaaagttgtggttagatgattaaaaagaaacatttgaggatggacttaattatttcagtaaaatattataatttgcctattgtcttttatgtaatatttatataaaatatttttatatatttcaaaaacatgggaccattgaatgaaactttatagtccttaaatgttgctgaacttttgctgtcttgcaatagaatttgaatgtaaatattattactggtaaaaaaa

SEQ ID NO: 278635 - DNA, 1872 bp, Homo sapiens
tctctctcatcccagcttccgccggaagcggctcctgtcagttgttctcaggtgtttgggcttgttgttccgtatactcagtgggttcgcggccgccggcccagtgaggctgggttcgaggagctggagcgggaaactggagcttaaattctggcggcgagatggacattctgaaatcagagatccttcggaagcggcagctggtggaggacaggaacctgctggtgaggaactcgattgaggaccagaggtccagtcacaagtaacaagccactagccaggtgcttcaggaagaccgccctcttgcctctgtggaatccagtgaggatgatcagaacgttccccggggaaaataaaaaatatttcaagcgtagtgagctcgccaaaaaagaagaggaagcatattttgaaagatgtggctacaagcctataaatgagaagccatctggagagatacagccaaaagaggaggaccagaaaccattaacttcatcgaatccagtgttagaacttgaactggcagaggaaaaattacctatgacgctttctaggcaagaggtcatcagaagattgagagaaagaggagaaccaatcagactatttggagagactgattatgatgcttttcaacgtttaaggaaaatagagatcctcacaccagaagttaacaagggattgaggaatgatttgaaagcagccttggataagattgatcagcagtacctcaatgaaatcgtcggcggtcaggagcctggagaggaagacacacagaatgatctgaaagttcatgaggaaaacaccacaattgaagagttagaggcgcttggagagtccttagggaaaggcgatgatcataaggacatggacatcatcaccaaattcctgaagtttcttcttggcgtttgggctaaagaattgaatgccagagaagattatgtgaaacgcagtgtgcagggtaaactgaacagtgcgacccagaaacagaccgagtcctacctaagaccactttttagaaagctacggaaaaggaatcttcctgctgatattaaagaatcaataacggatattattaaattcatgttgcagagagaatacgtgaaggcaaatgatgcttatcttcagatggccattggaaatgcgccttggcccatcggtgtcactatggttggtatccatgccagaactggcagagaaaagattttttccaagcatgttgcacatgttttaaatgacgaaactcagcggaaatatattcagggattgaagaggttaatgaccatttgccagaaacactttcctacagacccatccaaatgtgtggagtacaatgcactgtgagatctgtgtatggtgtgttaataacaataagaaacttagggaagcaggctgtggacttctggaattaccaacaggaatgaggaaagaagaaaactggagtttccagtctctgagttctacctgatgtaactcttgattggttttaagaactttgttggccttcatttcatatctgactgcaagctgatttttctttcttgctttcattttaattagtccaaaattaagttttaaagatttttcctcacaatttaaatccatagacaacagaagggggtttaaaatgacctttttttcagttgacccgaaagttgtggttagatgattaaaaagaaacatttgaggatggacttaattatttcagtaaaatattataatttgcctattgtcttttatgtaatatttatataaaatatttttatatatttcaaaaacatgggaccattgaatgaaactttatagtccttaaatgttgctgaacttttgctgtcttgcaatagaatttgaatgtaaatattattactggtaaaaaaa

SEQ ID NO: 278636 - DNA, 1670 bp, Homo sapiens
tctctctcatcccagcttccgccggaagcggctcctgtcagttgttctcaggtgtttgggcttgttgttccgtatactcagtgggttcgcggccgccggcccagtgaggctgggttcgaggagctggagcgggaaactggagcttaaattctggcggcgagatggacattctgaaatcagagatccttcggaagcggcagctggtggaggacaggaacctgctggtggaaaataaaaaatatttcaagcgtagtgagctcgccaaaaaagaagaggaagcatattttgaaagatgtggctacaagatacagccaaaagaggaggaccagaaaccattaacttcatcgaatccagtgttagaacttgaactggcagaggaaaaattacctatgacgctttctaggcaagaggtcatcagaagattgagagaaagaggagaaccaatcagactatttggagagactgattatgatgcttttcaacgtttaaggacagccttggataagattgatcagcagtacctcaatgaaatcgtcggcggtcaggagcctggagaggaagacacacagaatgatctgaaagttcatgaggaaaacaccacaattgaagagttagaggcgcttggagagtccttagggaaaggcgatgatcataaggacatggacatcatcaccaaattcctgaagtttcttcttggcgtttgggctaaagaattgaatgccagagaagattatgtgaaacgcagtgtgcagggtaaactgaacagtgcgacccagaaacagaccgagtcctacctaagaccactttttagaaagctacggaaaaggaatcttcctgctgatattaaagaatcaataacggatattattaaattcatgttgcagagagaatacgtgaaggcaaatgatgcttatcttcagatggccattggaaatgcgccttggcccatcggtgtcactatggttggtatccatgccagaactggcagagaaaagattttttccaagcatgttgcacatgttttaaatgacgaaactcagcggaaatatattcagggattgaagaggttaatgaccatttgccagaaacactttcctacagacccatccaaatgtgtggagtacaatgcactgtgagatctgtgtatggtgtgttaataacaataagaaacttagggaagcaggctgtggacttctggaattaccaacaggaatgaggaaagaagaaaactggagtttccagtctctgagttctacctgatgtaactcttgattggttttaagaactttgttggccttcatttcatatctgactgcaagctgatttttctttcttgctttcattttaattagtccaaaattaagttttaaagatttttcctcacaatttaaatccatagacaacagaagggggtttaaaatgacctttttttcagttgacccgaaagttgtggttagatgattaaaaagaaacatttgaggatggacttaattatttcagtaaaatattataatttgcctattgtcttttatgtaatatttatataaaatatttttatatatttcaaaaacatgggaccattgaatgaaactttatagtccttaaatgttgctgaacttttgctgtcttgcaatagaatttgaatgtaaatattattactggtaaaaaaa

SEQ ID NO: 278637 - DNA, 1538 bp, Homo sapiens
  misc_feature (1056)..(1056): n is a, c, g, or t
tctctctcatcccagcttccgccggaagcggctcctgtcagttgttctcaggtgtttgggcttgttgttccgtatactcagtgggttcgcggccgccggcccagtgaggctgggttcgaggagctggagcgggaaactggagcttaaattctggcggcgagatggacattctgaaatcagagatccttcggaagcggcagctggtggaggacaggaacctgctggtggaaaataaaaaatatttcaagcgtagtgagctcgccaaaaaagaagaggaagcatattttgaaagatgtggctacaagatacagccaaaagaggaggaccagaaaccattaacttcatcgaatccagtgttagaacttgaactggcagaggaaaaattacctatgacgctttctaggcaagaggtcatcagaagattgagagaaagaggagaaccaatcagactatttggagagactgattatgatgcttttcaacgtttaaggaaaatagagatcctcacaccagaagttaacaagggattgaggaatgatttgaaagcagccttggataagattgatcagcagtacctcaatgaaatcgtcggcggtcaggagcctggagaggaagacacacagaatgatctgaaagttcatgaggaaaacaccacaattgaagagttagaggcgcttggagagtccttagggaaaggcgatgatcataaggacatggacatcatcaccaaattcctgaagtttcttcttggcgtttgggctaaagaattgaatgccagagaagattatgtgaaacgcagtgtgcagggtaaactgaacagtgcgacccagaaacagaccgagtcctacctaagaccactttttagaaagctacggaaaaggaatcttcctgctgatattaaagaatcaataacggatattattaaattcatgttgcagagagaatacgtgaaggcaaatgatgcttatcttcagatggccattggaaatgcgccttggcccatcggtgtcactatgtgaagttgacacaaaattaaccatcacagctgccttcctntgggcctcatgttatatgagaacagtattgggtgtacacttaaagcgttctgggaatatgaatcccttctgcaccctggaatcaccagtccagccatgcatggagctggggaaagcaggccctgaattgtctagagagacttggtggaggaagccacggcccgccttgtccctgcgggtcccggccaggtgtgtgtgtgccccagctcgactctcggtggtctccaggctgcagcagaaggaataccttggtatttgtttcattttagtgtccatccttacccttctggtctggtagagcctatggttattcttggattccacatacatgaaaagcgaagatttttctttgtttttatgcttaagctaacttcagttctgctttcccacaaaactacccccaccctggctcctgtccctggctgtcaatgcctttccaataggaagtcattagagtgagaaaaaaattccacccccacccca

SEQ ID NO: 278638 - DNA, 3035 bp, Homo sapiens
  misc_feature (1056)..(1056): n is a, c, g, or t
tctctctcatcccagcttccgccggaagcggctcctgtcagttgttctcaggtgtttgggcttgttgttccgtatactcagtgggttcgcggccgccggcccagtgaggctgggttcgaggagctggagcgggaaactggagcttaaattctggcggcgagatggacattctgaaatcagagatccttcggaagcggcagctggtggaggacaggaacctgctggtggaaaataaaaaatatttcaagcgtagtgagctcgccaaaaaagaagaggaagcatattttgaaagatgtggctacaagatacagccaaaagaggaggaccagaaaccattaacttcatcgaatccagtgttagaacttgaactggcagaggaaaaattacctatgacgctttctaggcaagaggtcatcagaagattgagagaaagaggagaaccaatcagactatttggagagactgattatgatgcttttcaacgtttaaggaaaatagagatcctcacaccagaagttaacaagggattgaggaatgatttgaaagcagccttggataagattgatcagcagtacctcaatgaaatcgtcggcggtcaggagcctggagaggaagacacacagaatgatctgaaagttcatgaggaaaacaccacaattgaagagttagaggcgcttggagagtccttagggaaaggcgatgatcataaggacatggacatcatcaccaaattcctgaagtttcttcttggcgtttgggctaaagaattgaatgccagagaagattatgtgaaacgcagtgtgcagggtaaactgaacagtgcgacccagaaacagaccgagtcctacctaagaccactttttagaaagctacggaaaaggaatcttcctgctgatattaaagaatcaataacggatattattaaattcatgttgcagagagaatacgtgaaggcaaatgatgcttatcttcagatggccattggaaatgcgccttggcccatcggtgtcactatgtgaagttgacacaaaattaaccatcacagctgccttcctntgggcctcatgttatatgagaacagtattgggtgtacacttaaagcgttctgggaatatgaatcccttctgcaccctggaatcaccagtccagccatgcatggagctggggaaagcaggccctgaattgtctagagagacttggtggaggaagccacggcccgccttgtccctgcgggtcccggccaggtgtgtgtgtgccccagctcgactctcggtggtctccaggctgcagcagaaggaataccttgggccctgtgctaatcacgagtctttcctgttcggagcagtgaggcctgagaccctcaacagtgctgtgtgtacagaaggcccccagaatccacacaaaggggccgcctgaaacctagagcatttgtgaaggaggaaaatggaaggaacaactggatgttgtaaatgtttctcatctggccttaaaatccatgaaagctggaaaatcacaaggcatctgtgcatatactggtggattttaatgagagtcctgtgtttggagcaccagaaataaaccagcttcagaagcaaagtaagaaaaggcccttgattatgacactggccatgggtattactatatgtaggtggtatgtggatgattctgggacacctgtcctgcaaactttgtctccaccctaagctgacttttgacattgtgcctgactgaaaaacttctaatgggagaggtggttgggccttgcaggggtcctatgtttttcttagggggacagtctctccctaactccacgtggtcctggtggtgctctccaccatggcgccatcctcactcccgtgggggccaggggacaaggaacccaacggggccgggccaatgagagtcccccgatcaaaatccctggttcaaaggtggccacgtgcctgagcagctttgaaaccacaaggatgtcatttcctcctgagaactaggttaacaggaggaggaagcagagctagagatggaaggagacccagccagcccgggctccagtgacatcggctggtacacgcttttgtttgcttacgcttgttgaactgagtttttcatatgtaactaacgaatactggcacatgtaagtagtttcttaaactgttgatgaaatttttgtttctaacacaaacatgatctgggtctgtttgggataaaacttccctaaggggtttcatgagatcttaggaacacttagccagtgtttcccaaagtagtcctgtgagttgctctgaggggaaaaaaagcttccatggataaataaatttgaggattctgcctttcagaggcctgaaatgtaaatgtatatgaaacatatattaaaggttctgagaagtcctggattagtttgccacagaacttctggaacagtatcacctattaacatccacagaacacactttgaaaaatactcttaaatgggctaatattatgaaatgtagttgactctcttgtatgttggatcctaaacagtttctggttgaaactattaaagttgagtcataattgtgacaacataatctgcttcagagggactaaaagtgcactatgtattgatcataaaggctcaagaaagaccattgagttcaaagcagtgatgtttggatcaggcagtagatgaggttaagggttcctgtggtggtttatttggtatgtgaagagcctaactgttggctggcccatggtgttctcctgtggttcattatggaggcttctgggtcacagaacccacatatgagagggcatcgggaggatctggatgatggggtgggagatgctggattggtggtttggttctcaggtggctcctagaggagccgcagtatggaaaccactggcctgctcctgcctctgagaaaatgaagctggaggaaaagatgtaaagatgtattttttccaaacttgcgatgttttatacagaatctttcttagtgcttccacatagttattgaagtacgtaaggtatttttaaagctataaatgtt

SEQ ID NO: 278639 - DNA, 1392 bp, Homo sapiens
tctctctcatcccagcttccgccggaagcggctcctgtcagttgttctcaggtgtttgggcttgttgttccgtatactcagtgggttcgcggccgccggcccagtgaggctgggttcgaggagctggagcgggaaactggagcttaaattctggcggcgagatggacattctgaaatcagagatccttcggaagcggcagctggtggaggacaggaacctgctggtggaaaataaaaaatatttcaagcgtagtgagctcgccaaaaaagaagaggaagcatattttgaaagatgtggctacaagatacagccaaaagaggaggaccagaaaccattaacttcatcgaatccagtgttagaacttgaactggcagaggaaaaattacctatgacgctttctaggcaagaggtcatcagaagattgagagaaagaggagaaccaatcagactatttggagagactgattatgatgcttttcaacgtttaaggaaaatagagatcctcacaccagaagttaacaagggattgaggaatgatttgaaagcagccttggataagattgatcagcagtacctcaatgaaatcgtcggcggtcaggagcctggagaggaagacacacagaatgatctgaaagttcatgaggaaaacaccacaattgaagagttagaggcgcttggagagtccttagggaaaggcgatgatcataaggacatggacatcatcaccaaattcctgaagaatcttcctgctgatattaaagaatcaataacggatattattaaattcatgttgcagagagaatacgtgaaggcaaatgatgcttatcttcagatggccattggaaatgcgccttggcccatcggtgtcactatggttggtatccatgccagaactggcagagaaaagattttttccaagcatgttgcacatgttttaaatgacgaaactcagcggaaatatattcagggattgaagaggttaatgaccatttgccagaaacactttcctacagacccatccaaatgtgtggagtacaatgcactgtgagatctgtgtatggtgtgttaataacaataagaaacttagggaagcaggctgtggacttctggaattaccaacaggaatgaggaaagaagaaaactggagtttccagtctctgagttctacctgatgtaactcttgattggttttaagaactttgttggccttcatttcatatctgactgcaagctgatttttctttcttgctttcattttaattagtccaaaattaagttttaaagatttttcctcacaatttaaatccatagacaacagaagggggtttaaaatgacctttttttcagttgacccgaaagttgtggttagatgattaaaaagaaacatttga

SEQ ID NO: 278640 - DNA, 992 bp, Homo sapiens
  misc_feature (899)..(899): n is a, c, g, or t
  misc_feature (948)..(948): n is a, c, g, or t
  misc_feature (992)..(992): n is a, c, g, or t
tctctctcatcccagcttccgccggaagcggctcctgtcagttgttctcaggtgtttgggcttgttgttccgtatactcagtgggttcgcggccgccggcccagtgaggctgggttcgaggagctggagcgggaaactggagcttaaattctggcggcgagatggacattctgaaatcagagatccttcggaagcggcagctggtggaggacaggaacctgctggtggaaaataaaaaatatttcaagcgtagtgagctcgccaaaaaagaagaggaagcatattttgaaagatgtggctacaagatacagccaaaagaggaggaccagaaaccattaacttcatcgaatccagtgttagaacttgaactggcagaggaaaaattacctatgacgctttctaggcaagaggtcatcagaagattgagagaaagaggagaaccaatcagactatttggagagactgattatgatgcttttcaacgtttaaggaaaatagagatcctcacaccagaagttaacaagggattgaggaatgatttgaaagcagccttggataagattgatcagcagtacctcaatgaaatcgtcggcggtcaggagcctggagaggaagacacacagaatgatctgaaagttcatgaggaaaacaccacaattgaagagttagaggcgcttggagagtccttagggaaaggcgatgatcataaggacatggacatcatcaccaaattcctgaagtttcttcttggcgtttgggctaaagaattgaatgccagagaagattatgtgaaacgcagtgtgcagggtaaactgaacagtgcgacccagaaacagaccgagtcctacctaagaccactttttagaaagctacggaaaaggaatcttcctgctgatatntaaagaaatccaaaaattttaaaaaaaaaaccccccggggggggggggnaaaaaattttaaaaaaatttttcttttacagatggccattggan

SEQ ID NO: 278641 - DNA, 975 bp, Homo sapiens
cagccaggcctgcactgagaaggatatgttcaccttgacagggccctgtgctaatcacgagtctttcctgttcggagcagtgaggcctgagaccctcaacagtgctgtgtgtacagaaggcccccagaatccacacaaaggggccgcctgaaacctagagcatttgtgaaggaggaaaatggaaggaacaactggatgttgtaaatgtttctcatctggccttaaaatccatgaaagctggaaaatcacaaggcatctgtgcatatactggtggattttaatgagagtcctgtgtttggagcaccagaaataaaccagcttcagaagcaaagatctgaacgtctatgacactctttcgagctgacacagtgaagaacatagaaggagaactcacccagtctgccagggtcacagaatgatcatactcaagatcttcctggggagtcaatggcaaatttcactgggctattttacagatgaagaaggaacataaagaaggttctgggaccccgaagtccacggaacacccaccattacctgatctttggagcttgtcatttggccagtggaccctaataaacgtccacggggatgtggggatagaatgccggagcctggctcgctagggcatccaggttcttccttcctctttgccctgctgtctccaggcaccaagaatctcctacagttccccaaagatgaaccccccattatctcaggtcactctgtttcccccgatctttaccaaattcctgactcagagttcctcccatttgcttctgactctcattttattcttacctctcattttattcttatgatgtttaccatttctcttctcctcagtgtccctctctgagtggtaagagtatgttaataagccagtgctgagaccggagcacgaggcaactgctcaatgttggtcattgtcactgttattaaatgtaacttaagggaatgagtggtttcttcctt

SEQ ID NO: 278642 - DNA, 460 bp, Homo sapiens
  misc_feature (172)..(172): n is a, c, g, or t
tgcccatatgcactgagaagggccatgtgtttactcggtctaccaattcaaatgttaatctcatccaaaaacaccctcacagatacctttggaatgatgtttaaccaaatatttgggtaccgtcttccccagtgaagttgacacaaaattaaccatcacagctgccttcctntgggcctcatgttatatgagaacagtattgggtaagttgggtttccattatattctgctgaactcagtccccaagcaatgtatgcattactcaaacttcttgaccttcaaaatcatcaagtgacttgtggcaagtgtgccatggtgctgaggtctttgttcatttcgactggaataaaatcggactttgccacatcctcctaagataaaatagatgtgagagcatttacttgaagtggttctgtggatgttggtacattgtgatttcagttacagaaaagccacagat

SEQ ID NO: 278643 - DNA, 257 bp, Homo sapiens
ggttactatagaggatcccgcactgtggtcaggatgccgtgggcgcagccactcaggactgtcaaagggctcagtgctgtcagagagggactacgagagcctcgtcatgatgcgcatgcgccaggcggccgagcggcaacagctgatcgcacggatgcagcaggaagaccaggaggggccgcctacgtagccccagctccagccatccacccctcagcccttttcttcaacgtcaccaataaatttttttttttttt

SEQ ID NO: 278644 - DNA, 1240 bp, Homo sapiens
tgctgggatgacaggcgtgagccaccgcaccggccaatcataatcttttaaatgagtctccccgttgatggggatcttggctggctagtatcaacagtgttgtagagagcatccttgtatatttatttttgccatacttctacaagtccagattcctaggacttgggtcaaagggaaagaacattttaaattttgatggctgaattttcttccagataggttgccccagtttatatgcccaccaagaatgtgtagagtacctgtcttcgagtggctgtcgagaaagcggggtactgtgctcctgcctgttgcagcagcccctggacatctgcagtggtaaagaaggcgtataggcagaaggccctctcctgccacccagacaaaaatccagataatcccagagcagctgaactcttccaccagctttctcaggccttggaggtgctgaccgatgctgcagccagggctgcatatgacaaggtcaggaaagccaagaagcaagcagcagagaggacccagaaacttgatgagaaaaggaagaaagtgaagcttgacctggaggcccgggagcggcaggcccaggcccaggagagtgaggaggaagaggagagccggagcaccaggacactagagcaagagatcgaacgcctgagagaagagggttcccggcagctggaggaacagcagaggctcatccgggagcagatacgccaggagcgtgaccagaggttgagaggaaaggcagaaaatactgaaggccaaggaacccccaaactaaagctaaaatggaagtgcaagaaggaggatgagtcaaaaggtggctactccaaagacgtcctcctacggcttttgcagaagtatggtgaggttctcaacctggtgctttccagtaagaagccaggcactgctgtggtggagtttgcaaccgtcaaggcagcggagctggctgtccagaatgaagttggcctggtggataaccctctgaagatttcctggttggagggacagccccaggatgccgtgggccgcagccactcaggactgtcaaagggctcagtgctgtcagagagggactacgagagcctcgtcatgatgcgcatgcgccaggcggccgagcggcaacagctgatcgcacggatgcagcaggaagaccaggaggggccgcctacgtagccccagctccagccatccacccctcagcccttttcttcaacgtcaccaataaatttttttttttttt

SEQ ID NO: 278645 - DNA, 1303 bp, Homo sapiens
tgctgggatgacaggcgtgagccaccgcaccggccaatcataatcttttaaatgagtctccccgttgatggggatcttggctggctagtatcaacagtgttgtagagagcatccttgtatatttatttttgccatacttctacaagtccagattcctaggacttgggtcaaagggaaagaacattttaaattttgatggctgaattttcttccagataggttgccccagtttatatgcccaccaagaatgtgtagagtacctgtcttcgagtggctgtcgagaaagcggggtactgtgctcctgcctgttgcagcagcccctggacatctgcagtggtaaagaaggcgtataggcagaaggccctctcctgccacccagacaaaaatccagataatcccagagcagctgaactcttccaccagctttctcaggccttggaggtgctgaccgatgctgcagccagggctgcatatgacaaggtcaggaaagccaagaagcaagcagcagagaggacccagaaacttgatgagaaaaggaagaaagtgaagcttgacctggaggcccgggagcggcaggcccaggcccaggagagtgaggaggaagaggagagccggagcaccaggacactagagcaagagatcgaacgcctgagagaagagggttcccggcagctggaggaacagcagaggctcatccgggagcagatacgccaggagcgtgaccagaggttgagaggaaaggcagaaaatactgaaggccaaggaacccccaaactaaagctaaaatggaagtgcaagaaggaggatgagtcaaaaggtggctactccaaagacgtcctcctacggcttttgcagaaggtcggccctgttgacgtccactctttcctatcatctcagtccacgtctcagtccacaccctagtatggtgaggttctcaacctggtgctttccagtaagaagccaggcactgctgtggtggagtttgcaaccgtcaaggcagcggagctggctgtccagaatgaagttggcctggtggataaccctctgaagatttcctggttggagggacagccccaggatgccgtgggccgcagccactcaggactgtcaaagggctcagtgctgtcagagagggactacgagagcctcgtcatgatgcgcatgcgccaggcggccgagcggcaacagctgatcgcacggatgcagcaggaagaccaggaggggccgcctacgtagccccagctccagccatccacccctcagcccttttcttcaacgtcaccaataaatttttttttttttt

SEQ ID NO: 278646 - DNA, 1022 bp, Homo sapiens
tcttgggagttgtagtacgaggatccgtcaggccggaaccatggcagtgaccaaggagctcttacagatggacctgtacgcgctgctaggcattgaggagaaggcagcggacaaagaggtaaagaaggcgtataggcagaaggccctctcctgccacccagacaaaaatccagataatcccagagcagctgaactcttccaccagctttctcaggccttggaggtgctgaccgatgctgcagccagggctgcatatgacaaggtcaggaaagccaagaagcaagcagcagagaggacccagaaacttgatgagaaaaggaagaaagtgaagcttgacctggaggcccgggagcggcaggcccaggcccaggagagtgaggaggaagaggagagccggagcaccaggacactagagcaagagatcgaacgcctgagagaagagggttcccggcagctggaggaacagcagaggctcatccgggagcagatacgccaggagcgtgaccagaggttgagaggaaaggcagaaaatactgaaggccaaggaacccccaaactaaagctaaaatggaagtgcaagaaggaggatgagtcaaaaggtggctactccaaagacgtcctcctacggcttttgcagaagtatggtgaggttctcaacctggtgctttccagtaagaagccaggcactgctgtggtggagtttgcaaccgtcaaggcagcggagctggctgtccagaatgaagttggcctggtggataaccctctgaagatttcctggttggagggacagccccaggatgccgtgggccgcagccactcaggactgtcaaagggctcagtgctgtcagagagggactacgagagcctcgtcatgatgcgcatgcgccaggcggccgagcggcaacagctgatcgcacggatgcagcaggaagaccaggaggggccgcctacgtagccccagctccagccatccacccctcagcccttttcttcaacgtcaccaataaatttttttttttttt

SEQ ID NO: 278647 - DNA, 1096 bp, Homo sapiens
tcttgggagttgtagtacgaggatccgtcaggccggaaccatggcagtgaccaaggagctcttacagatggacctgtacgcgctgctaggcattgaggagaaggcagcggacaaagaggtaaagaaggcgtataggcagaaggccctctcctgccacccagacaaaaatccagataatcccagagcagctgaactcttccaccagctttctcaggccttggaggtgctgaccgatgctgcagccagggctgcatatgacaaggtcaggaaagccaagaagcaagcagcagagaggacccagaaacttgatgagaaaaggaagaaagtgaagcttgacctggaggcccgggagcggcaggcccaggcccaggagagtgaggaggaagaggagagccggagcaccaggacactagagcaagagatcgaacgcctgagagaagagggttcccggcagctggaggaacagcagaggctcatccgggagcagatacgccaggagcgtgaccagaggttgagaggaaaggcagaaaatactgaaggccaaggaacccccaaactaaagctaaaatggaagtgcaagaaggaggatgagtcaaaaggtggctactccaaagacgtcctcctacggcttttgcagaagtatggtgaggttctcaacctggtgctttccagtaagaagccaggcactgctgtggtggagtttgcaaccgtcaaggcagcggagctggctgtccagaatgaagttggcctggtggataaccctctgaagatttcctggttggagggacagccccaggatgccgtgggccgcagccactcaggactgtcaaagggctcagtgctgtcagagagggactacgagagcctcgtcatgatgcgcatgcgccaggcggccgagcggcaacagctgatcgcacggatgcagcaggaagaccaggaggggccgcctacgtagccccagctccagccatccacccctcagcccttttcttcaacgtcaccaataaattttttttttttttttttttttttttttttttttttttttttttgttttttttttttttgtggtggggggggggggggtggggagatg

SEQ ID NO: 278648 - DNA, 5449 bp, Homo sapiens
caacgtcatcgcggggcgccgcggcgccgggcggggagcggcggacggtctaggcggggctggaggcggtggctgcggttgcgggaccgggagatggctgcgatttagttttgaggatgctacaggcagcagcagggctggcaccctgtgtcacaggcactatgctgggccttcctaccacttgtgtgtggcttggtagtggcctagggtctctcctccctgctgaagtccctctcctgcaggtggccgtctgcccggcccagcaccatgcacacgcttgtgttcttgagcacacggcaggtgctgcagtgccagccagctgcctgccaggccctgcccctgctgccacgcgaactcttccccctgctgttcaaggtggccttcatggacaagaagacagtggtactgcgcgagttggtacacacgtggcccttcccgctgctcagtttccagcagctgctacaggagtgtgcccactgcagccgtgccctcctgcaggagcggcctagcactgagagcatgcaggctgttatcctggggctgactgcccggctccacacctcagagcctggggccagcacacagcccctctgcaggaagcatgcgctgcgggtgctggacatgacgggcctcttggatgatggtgtggaacaggatcctggcaccatgagcatgtgggactgtactgctgccgtagctcgcacatgcattgcccagcagcagggtggggccgcagagcctgggccagcccccatccccgtggaggtgcgcgtggacctgcgggtgaaccgggcctcctatgcgttcctgcgggaggcactccgaagcagcgtgggcagcccgctgcggctctgctgccgggacctgcgagctgaggacctgcccatgcgcaacactgtggccctgctgcagcttctggatgcaggctgcctgcgccgcgtggacctgcgcttcaacaatctgggcctgcgcggcctgtctgtgatcatcccacacgtggcccgcttccagcacctggccagcctgcggctccactatgtgcatggggattcaaggcagccctccgtggatggcgaggacaacttccgctacttccttgcccagatgggccgcttcacctgtctgcgtgagctcagcatgggctcctctctcctttcagggaggctggaccagctgctcagcaccctgcagagccccctggagagcctggagttggccttctgtgctctgctgcctgaggacctacgcttcctggcacggagcccacatgctgcccacctcaagaagttggacctgagtggtaacgacctgtctggcagccagctggcacccttccagggtctgttgcaggcatcagcagccacactgttgcatctggagctgactgagtgtcagctcgcagacacccagctgttggccacactacccatcctgactcagtgcgccagtctccggtaccttggcctctatggcaacccactgtccatggcgggcctcaaggagctgctgcgggactcagtggcacaggctgagctgcgtactgtggtgcaccccttccctgtggactgctatgagggcttgccctggccgccgcctgcctctgtcctgctggaggcctccatcaatgaggagaagtttgcccgcgtagaagctgagttgcaccagctgcttctagcctcaggccgtgcccatgtgctctggaccacggacatctacgggcgactggctgcggactacttcagcctatgatgaagtagctctgggtgagacacaggccgccctgcagtctctttaggtaggcagggcctttgctgggacccctggtggaggccttcacaaaagcactggttactggtttcctgctgggtctaccttgcttctgggcacacctcaagcctcccctgctttctgcagtgccccacgcggttttccctgcacttgctccataattggctgatcatctgtgggccccggggctggatgtcaggcctccattgccctgctcagtttggctgcatttggctgccgtctggggtcctggtcctttgtgcaaatgctttgggattccagttgtgagctgagagagatgatggcctctctgggcctttcctctccctttactgagagctcagtgcttctggggttgaagttggacagaggcctgcttcagggaagctgggagtccccaggcactcacgcctcttacgtgttccctaccctgccacccagccaccccactgggctgggctcgggctggagggggtcatcaaggtacacatgtgcctggaagttgaatttgtggctgtttttttttctgtccacgttggtcacccttatccttatctctgctgtcacccccaacatggccaccgggcaacaactgccatccagcctgtcgccccgcccttcgcggggcagccccgtcggcactgccggccagtccttgctcttcccacctttcggaggcccaagatcctactgtggccggccagggccagcgagggaccccccccatgcagagctggaggttggggtgatgtcttttcggaagagcttcaagggaggtgttggggcctccccggccaccttccattgctaccccaggattcccgagtgcaacgttcccggctcgcgccccacacacggctcagcgcacactgcgcggcttccacctttactgacggagcatgcgcgaggccgcaccggccaatctccggcgcccacgtcatccgcgcgcccgcggccctagcagtggatctcgtaggcgaccggcgggggcacgcggagtcccggccccgccccctgttccgggccgcagtcagcgggcgcctccgccggaccctcggcgaagagcggcttggagcggttgatgacgaacatctcgtggccgcgctcgtcgcggagctcctctagctgtgcgaacgtacaggggccgtccaagtagtcgttgacgaacagcgctccctcccccggaggcccccgcgccttttttcgcctgcggcgccggcgacagatcatggcgaccaggagcagcgccgtgagcgccagcagcgcgatggccgccgcaatggccgtctgtgtggccacgcccagggcgcggaaggccatgctgcccgcctcgggccggggctcgctgccggcggggcgggcggccggaggcggcggttgcgcgggctgctgcggctgctgccgggacgcgttgaccaggagccggaagggcacgcgggcagcgccgccggcgttggaggcctcgcactcgtacttaccggcgtgcgccagcgtgatgttgctgaggaagagcatgccgctgcccgtgtcggatgccgagtgtccgcccaggcccagcaacccgccttctagctgggcctgggctcgcggccggccctcgcgaggctggggcacctttctccaggtcaccaatggctgcgggtagccggaggcttggcaggcaacccgcaggtcctcacccaggttggctgtgagctccagcggctgcacgtggacagagggcggaatgcagatgaggctgctgtgggatacgtccaggagactctggagcgccaggcgcgggggctctgcacacatgatcttcctgtccctggaggtgagcagccgctggccgccctccttgatccaggcccccagccagtgcagggcgcagtcacagcgccatgggttctctgtgggagagcagcgttaggcaggtggcttgagggtgctgctaaaacagcctgtgcagttggggttttgcaggccaggacagaggcctctttcccacctcccacagcgttttcacacggagtccaaggccctgccaccccttccttgaccccaagctccttggggcggcaggcccttcaccctcgcccccctcccctttagctctgtgatgcctgcctgttacagatcacttctccgtcggtctctgagaaagcacctgctccttaagtcttcctgcaacaagtgccactgtttttaggaacctgggcgtccacatagacatctcaccagcactgaaacctcacaagtcctctcagccttgcctttggatgccctctcttgggaatgtccccagtcctggtcagctgtctctctcctttgcaattttgtctgcctcccctcagcctaaaagtgtgcagaaccctcaattctgttaagtcaccctgtggagttcctgtcttctgttttccccaggcagggtgcctgagctgtattccccagcacacccactcccgcagccctccagtgtggctgcaggcggtggtgcagccttccagactgctgcccagttgcctgatgtcagagcccctccacacatgagcctgctccctactgccaacaccgtggcccagacagagacgctttccgaggaagaggtacctgtgaggcgcaggacttgcagactggccaggggctgcagggcctctcggctgatggtgcccagctggttcctgctgaggtccagcagtgctagggaggacagccccgctagagcctggtcctccagcagctcaatgctgttttcttgcaggtgaagctcctgcagtcgctgaagtaaggacagcagatcgtgaggaaaaagggcgccgaggttgggggcatgtctctcttcttaccaagctagactgggttgccttttctaactattccagccctacagggcgaggggccataatggagtatcccgcccctttagaccccaggcgctcaccggcaggtgcaagaaggtgaaatccagcagccgcgccagctggttgcccgccaggtagagcacgcgcagctgggccaggcctacgaaggcgccgctgcgcaagccgcgcagccggttgctagtgagcgccagctccagcaggcgcggctgcgcgcggaaggcgccggcctccagggcgcgcaggctgttgttgtgcaggtagagccggcgcagagcggcgagtggcgccagggctcccggctctaggcgggcgatgttgttgtcctgcaggaacagtgtctgcaggccggggaaagaggaggcgcttaccccgttgcgggggtcttcctctccctgggggcaccccgtcctcccgcagctccacacggtgcccacctgcgtccctggcgggattcccagcgggacgacgcgcaaccgcagggcgccacactccaccgtggcgctgtagcagcggcaggctgctgggcagccggcggcgcggagcggcagtagtagcagcagcagcggcagcagtgcgggggccctcagggccatctcccgaggcccggttcctcaccggcccttccgcggttcagccgcagacgcgtgccctcctgaaacacaggttggcaggccagtctcggcagtcgagagccagccaatagatggaatggaggcctgcacctgcgtctaacttttgacactataaataggttcaagaaactaataaaacgttctggttttctcctttgaaaaaaa

SEQ ID NO: 278649 - DNA, 5147 bp, Homo sapiens
caacgtcatcgcggggcgccgcggcgccgggcggggagcggcggacggtctaggcggggctggaggcggtggctgcggttgcgggaccgggagatggctgcgatttagttttgaggatgctacaggcagcagcagggctggcaccctgtgtcacaggcactatgctgggccttcctaccacttgtgtgtggcttggtagtggcctagggtctctcctccctgctgaagtccctctcctgcaggtggccgtctgcccggcccagcaccatgcacacgcttgtgttcttgagcacacggcaggtgctgcagtgccagccagctgcctgccaggccctgcccctgctgccacgcgaactcttccccctgctgttcaaggtggccttcatggacaagaagacagtggtactgcgcgagttggtacacacgtggcccttcccgctgctcagtttccagcagctgctacaggagtgtgcccactgcagccgtgccctcctgcaggagcggcctagcactgagagcatgcaggctgttatcctggggctgactgcccggctccacacctcagagcctggggccagcacacagcccctctgcaggaagcatgcgctgcgggtgctggacatgacgggcctcttggatgatggtgtggaacaggatcctggcaccatgagcatgtgggactgtactgctgccgtagctcgcacatgcattgcccagcagcagggtggggccgcagagcctgggccagcccccatccccgtggaggtgcgcgtggacctgcgggtgaaccgggcctcctatgcgttcctgcgggaggcactccgaagcagcgtgggcagcccgctgcggctctgctgccgggacctgcgagctgaggacctgcccatgcgcaacactgtggccctgctgcagcttctggatgcaggctgcctgcgccgcgtggacctgcgcttcaacaatctgggcctgcgcggcctgtctgtgatcatcccacacgtggcccgcttccagcacctggccagcctgcggctccactatgtgcatggggattcaaggcagccctccgtggatggcgaggacaacttccgctacttccttgcccagatgggccgcttcacctgtctgcgtgagctcagcatgggctcctctctcctttcagggaggctggaccagctgctcagcaccctgcagagccccctggagagcctggagttggccttctgtgctctgctgcctgaggacctacgcttcctggcacggagcccacatgctgcccacctcaagaagttggacctgagtggtaacgacctgtctggcagccagctggcacccttccagggtctgttgcaggcatcagcagccacactgttgcatctggagctgactgagtgtcagctcgcagacacccagctgttggccacactacccatcctgactcagtgcgccagtctccggtaccttggcctctatggcaacccactgtccatggcgggcctcaaggagctgctgcgggactcagtggcacaggctgagctgcgtactgtggtgcaccccttccctgtggactgctatgagggcttgccctggccgccgcctgcctctgtcctgctggaggcctccatcaatgaggagaagtttgcccgcgtagaagctgagttgcaccagctgcttctagcctcaggccgtgcccatgtgctctggaccacggacatctacgggcgactggctgcggactacttcagcctatgatgaagtagctctgggtgagacacaggccgccctgcagtctctttaggtaggcagggcctttgctgggacccctggtggaggccttcacaaaagcactggttactggtttcctgctgggtctaccttgcttctgggcacacctcaagcctcccctgctttctgcagtgccccacgcggttttccctgcacttgctccataattggctgatcatctgtgggccccggggctggatgtcaggcctccattgccctgctcagtttggctgcatttggctgccgtctggggtcctggtcctttgtgcaaatgctttgggattccagttgtgagctgagagagatgatggcctctctgggcctttcctctccctttactgagagctcagtgcttctggggttgaagttggacagaggcctgcttcagggaagctgggagtccccaggcactcacgcctcttacgtgttccctaccctgccacccagccaccccactgggctgggctcgggctggagggggtcatcaaggtacacatgtgcctggaagttgaatttgtggctgtttttttttctgtccacgttggtcacccttatccttatctctgctgtcacccccaacatggccaccgggcaacaactgccatccagcctgtcgccccgcccttcgcggggcagccccgtcggcactgccggccagtccttgctcttcccacctttcggaggcccaagatcctactgtggccggccagggccagcgagggaccccccccatgcagagctggaggttggggtgatgtcttttcggaagagcttcaagggaggtgttggggcctccccggccaccttccattgctaccccaggattcccgagtgcaacgttcccggctcgcgccccacacacggctcagcgcacactgcgcggcttccacctttactgacggagcatgcgcgaggccgcaccggccaatctccggcgcccacgtcatccgcgcgcccgcggccctagcagtggatctcgtaggcgaccggcgggggcacgcggagtcccggccccgccccctgttccgggccgcagtcagcgggcgcctccgccggaccctcggcgaagagcggcttggagcggttgatgacgaacatctcgtggccgcgctcgtcgcggagctcctctagctgtgcgaacgtacaggggccgtccaagtagtcgttgacgaacagcgctccctcccccggaggcccccgcgccttttttcgcctgcggcgccggcgacagatcatggcgaccaggagcagcgccgtgagcgccagcagcgcgatggccgccgcaatggccgtctgtgtggccacgcccagggcgcggaaggccatgctgcccgcctcgggccggggctcgctgccggcggggcgggcggccggaggcggcggttgcgcgggctgctgcggctgctgccgggacgcgttgaccaggagccggaagggcacgcgggcagcgccgccggcgttggaggcctcgcactcgtacttaccggcgtgcgccagcgtgatgttgctgaggaagagcatgccgctgcccgtgtcggatgccgagtgtccgcccaggcccagcaacccgccttctagctgggcctgggctcgcggccggccctcgcgaggctggggcacctttctccaggtcaccaatggctgcgggtagccggaggcttggcaggcaacccgcaggtcctcacccaggttggctgtgagctccagcggctgcacgtggacagagggcggaatgcagatgaggctgctgtgggatacgtccaggagactctggagcgccaggcgcgggggctctgcacacatgatcttcctgtccctggagatcacttctccgtcggtctctgagaaagcacctgctccttaagtcttcctgcaacaagtgccactgtttttaggaacctgggcgtccacatagacatctcaccagcactgaaacctcacaagtcctctcagccttgcctttggatgccctctcttgggaatgtccccagtcctggtcagctgtctctctcctttgcaattttgtctgcctcccctcagcctaaaagtgtgcagaaccctcaattctgttaagtcaccctgtggagttcctgtcttctgttttccccaggcagggtgcctgagctgtattccccagcacacccactcccgcagccctccagtgtggctgcaggcggtggtgcagccttccagactgctgcccagttgcctgatgtcagagcccctccacacatgagcctgctccctactgccaacaccgtggcccagacagagacgctttccgaggaagaggtacctgtgaggcgcaggacttgcagactggccaggggctgcagggcctctcggctgatggtgcccagctggttcctgctgaggtccagcagtgctagggaggacagccccgctagagcctggtcctccagcagctcaatgctgttttcttgcaggtgaagctcctgcagtcgctgaagtaaggacagcagatcgtgaggaaaaagggcgccgaggttgggggcatgtctctcttcttaccaagctagactgggttgccttttctaactattccagccctacagggcgaggggccataatggagtatcccgcccctttagaccccaggcgctcaccggcaggtgcaagaaggtgaaatccagcagccgcgccagctggttgcccgccaggtagagcacgcgcagctgggccaggcctacgaaggcgccgctgcgcaagccgcgcagccggttgctagtgagcgccagctccagcaggcgcggctgcgcgcggaaggcgccggcctccagggcgcgcaggctgttgttgtgcaggtagagccggcgcagagcggcgagtggcgccagggctcccggctctaggcgggcgatgttgttgtcctgcaggaacagtgtctgcaggccggggaaagaggaggcgcttaccccgttgcgggggtcttcctctccctgggggcaccccgtcctcccgcagctccacacggtgcccacctgcgtccctggcgggattcccagcgggacgacgcgcaaccgcagggcgccacactccaccgtggcgctgtagcagcggcaggctgctgggcagccggcggcgcggagcggcagtagtagcagcagcagcggcagcagtgcgggggccctcagggccatctcccgaggcccggttcctcaccggcccttccgcggttcagccgcagacgcgtgccctcctgaaacacaggttggcaggccagtctcggcagtcgagagccagccaatagatggaatggaggcctgcacctgcgtctaacttttgacactataaataggttcaagaaactaataaaacgttctggttttctcctttgaaaaaaa

SEQ ID NO: 278650 - DNA, 5296 bp, Homo sapiens
caacgtcatcgcggggcgccgcggcgccgggcggggagcggcggacggtctaggcggggctggaggcggtggctgcggttgcgggaccggtggccgtctgcccggcccagcaccatgcacacgcttgtgttcttgagcacacggcaggtgctgcagtgccagccagctgcctgccaggccctgcccctgctgccacgcgaactcttccccctgctgttcaaggtggccttcatggacaagaagacagtggtactgcgcgagttggtacacacgtggcccttcccgctgctcagtttccagcagctgctacaggagtgtgcccactgcagccgtgccctcctgcaggagcggcctagcactgagagcatgcaggctgttatcctggggctgactgcccggctccacacctcagagcctggggccagcacacagcccctctgcaggaagcatgcgctgcgggtgctggacatgacgggcctcttggatgatggtgtggaacaggatcctggcaccatgagcatgtgggactgtactgctgccgtagctcgcacatgcattgcccagcagcagggtggggccgcagagcctgggccagcccccatccccgtggaggtgcgcgtggacctgcgggtgaaccgggcctcctatgcgttcctgcgggaggcactccgaagcagcgtgggcagcccgctgcggctctgctgccgggacctgcgagctgaggacctgcccatgcgcaacactgtggccctgctgcagcttctggatgcaggctgcctgcgccgcgtggacctgcgcttcaacaatctgggcctgcgcggcctgtctgtgatcatcccacacgtggcccgcttccagcacctggccagcctgcggctccactatgtgcatggggattcaaggcagccctccgtggatggcgaggacaacttccgctacttccttgcccagatgggccgcttcacctgtctgcgtgagctcagcatgggctcctctctcctttcagggaggctggaccagctgctcagcaccctgcagagccccctggagagcctggagttggccttctgtgctctgctgcctgaggacctacgcttcctggcacggagcccacatgctgcccacctcaagaagttggacctgagtggtaacgacctgtctggcagccagctggcacccttccagggtctgttgcaggcatcagcagccacactgttgcatctggagctgactgagtgtcagctcgcagacacccagctgttggccacactacccatcctgactcagtgcgccagtctccggtaccttggcctctatggcaacccactgtccatggcgggcctcaaggagctgctgcgggactcagtggcacaggctgagctgcgtactgtggtgcaccccttccctgtggactgctatgagggcttgccctggccgccgcctgcctctgtcctgctggaggcctccatcaatgaggagaagtttgcccgcgtagaagctgagttgcaccagctgcttctagcctcaggccgtgcccatgtgctctggaccacggacatctacgggcgactggctgcggactacttcagcctatgatgaagtagctctgggtgagacacaggccgccctgcagtctctttaggtaggcagggcctttgctgggacccctggtggaggccttcacaaaagcactggttactggtttcctgctgggtctaccttgcttctgggcacacctcaagcctcccctgctttctgcagtgccccacgcggttttccctgcacttgctccataattggctgatcatctgtgggccccggggctggatgtcaggcctccattgccctgctcagtttggctgcatttggctgccgtctggggtcctggtcctttgtgcaaatgctttgggattccagttgtgagctgagagagatgatggcctctctgggcctttcctctccctttactgagagctcagtgcttctggggttgaagttggacagaggcctgcttcagggaagctgggagtccccaggcactcacgcctcttacgtgttccctaccctgccacccagccaccccactgggctgggctcgggctggagggggtcatcaaggtacacatgtgcctggaagttgaatttgtggctgtttttttttctgtccacgttggtcacccttatccttatctctgctgtcacccccaacatggccaccgggcaacaactgccatccagcctgtcgccccgcccttcgcggggcagccccgtcggcactgccggccagtccttgctcttcccacctttcggaggcccaagatcctactgtggccggccagggccagcgagggaccccccccatgcagagctggaggttggggtgatgtcttttcggaagagcttcaagggaggtgttggggcctccccggccaccttccattgctaccccaggattcccgagtgcaacgttcccggctcgcgccccacacacggctcagcgcacactgcgcggcttccacctttactgacggagcatgcgcgaggccgcaccggccaatctccggcgcccacgtcatccgcgcgcccgcggccctagcagtggatctcgtaggcgaccggcgggggcacgcggagtcccggccccgccccctgttccgggccgcagtcagcgggcgcctccgccggaccctcggcgaagagcggcttggagcggttgatgacgaacatctcgtggccgcgctcgtcgcggagctcctctagctgtgcgaacgtacaggggccgtccaagtagtcgttgacgaacagcgctccctcccccggaggcccccgcgccttttttcgcctgcggcgccggcgacagatcatggcgaccaggagcagcgccgtgagcgccagcagcgcgatggccgccgcaatggccgtctgtgtggccacgcccagggcgcggaaggccatgctgcccgcctcgggccggggctcgctgccggcggggcgggcggccggaggcggcggttgcgcgggctgctgcggctgctgccgggacgcgttgaccaggagccggaagggcacgcgggcagcgccgccggcgttggaggcctcgcactcgtacttaccggcgtgcgccagcgtgatgttgctgaggaagagcatgccgctgcccgtgtcggatgccgagtgtccgcccaggcccagcaacccgccttctagctgggcctgggctcgcggccggccctcgcgaggctggggcacctttctccaggtcaccaatggctgcgggtagccggaggcttggcaggcaacccgcaggtcctcacccaggttggctgtgagctccagcggctgcacgtggacagagggcggaatgcagatgaggctgctgtgggatacgtccaggagactctggagcgccaggcgcgggggctctgcacacatgatcttcctgtccctggaggtgagcagccgctggccgccctccttgatccaggcccccagccagtgcagggcgcagtcacagcgccatgggttctctgtgggagagcagcgttaggcaggtggcttgagggtgctgctaaaacagcctgtgcagttggggttttgcaggccaggacagaggcctctttcccacctcccacagcgttttcacacggagtccaaggccctgccaccccttccttgaccccaagctccttggggcggcaggcccttcaccctcgcccccctcccctttagctctgtgatgcctgcctgttacagatcacttctccgtcggtctctgagaaagcacctgctccttaagtcttcctgcaacaagtgccactgtttttaggaacctgggcgtccacatagacatctcaccagcactgaaacctcacaagtcctctcagccttgcctttggatgccctctcttgggaatgtccccagtcctggtcagctgtctctctcctttgcaattttgtctgcctcccctcagcctaaaagtgtgcagaaccctcaattctgttaagtcaccctgtggagttcctgtcttctgttttccccaggcagggtgcctgagctgtattccccagcacacccactcccgcagccctccagtgtggctgcaggcggtggtgcagccttccagactgctgcccagttgcctgatgtcagagcccctccacacatgagcctgctccctactgccaacaccgtggcccagacagagacgctttccgaggaagaggtacctgtgaggcgcaggacttgcagactggccaggggctgcagggcctctcggctgatggtgcccagctggttcctgctgaggtccagcagtgctagggaggacagccccgctagagcctggtcctccagcagctcaatgctgttttcttgcaggtgaagctcctgcagtcgctgaagtaaggacagcagatcgtgaggaaaaagggcgccgaggttgggggcatgtctctcttcttaccaagctagactgggttgccttttctaactattccagccctacagggcgaggggccataatggagtatcccgcccctttagaccccaggcgctcaccggcaggtgcaagaaggtgaaatccagcagccgcgccagctggttgcccgccaggtagagcacgcgcagctgggccaggcctacgaaggcgccgctgcgcaagccgcgcagccggttgctagtgagcgccagctccagcaggcgcggctgcgcgcggaaggcgccggcctccagggcgcgcaggctgttgttgtgcaggtagagccggcgcagagcggcgagtggcgccagggctcccggctctaggcgggcgatgttgttgtcctgcaggaacagtgtctgcaggccggggaaagaggaggcgcttaccccgttgcgggggtcttcctctccctgggggcaccccgtcctcccgcagctccacacggtgcccacctgcgtccctggcgggattcccagcgggacgacgcgcaaccgcagggcgccacactccaccgtggcgctgtagcagcggcaggctgctgggcagccggcggcgcggagcggcagtagtagcagcagcagcggcagcagtgcgggggccctcagggccatctcccgaggcccggttcctcaccggcccttccgcggttcagccgcagacgcgtgccctcctgaaacacaggttggcaggccagtctcggcagtcgagagccagccaatagatggaatggaggcctgcacctgcgtctaacttttgacactataaataggttcaagaaactaataaaacgttctggttttctcctttgaaaaaaa

SEQ ID NO: 278651 - DNA, 5652 bp, Homo sapiens
cttcgcgaaacgcaggcgaccgaggaccgtcgcgttccctgcggccggcgggaggggagggggcgtcgcacggaggtgcctgcctcccttggtgggcaggccgtctgctttggtgttctcccgtgacaagtgctcggttggtctgtcctgtcagagcgagtatgatcgttgagatctgtccaccggcagaactaggccgagggttggtgtctgggacttttcaggaaccggtgccttaaggacttacttgtatgtggaaaagtcgacaaaaagaagggccttggggccagagtgtcttccccggcccccttccctggcttgtcactcaggctgtgaccttgggccaggccgaggccttcattttctaatctgtcacagggagatggctgcgatttagttttgaggatgctacaggcagcagcagggctggcaccctgtgtcacaggtggccgtctgcccggcccagcaccatgcacacgcttgtgttcttgagcacacggcaggtgctgcagtgccagccagctgcctgccaggccctgcccctgctgccacgcgaactcttccccctgctgttcaaggtggccttcatggacaagaagacagtggtactgcgcgagttggtacacacgtggcccttcccgctgctcagtttccagcagctgctacaggagtgtgcccactgcagccgtgccctcctgcaggagcggcctagcactgagagcatgcaggctgttatcctggggctgactgcccggctccacacctcagagcctggggccagcacacagcccctctgcaggaagcatgcgctgcgggtgctggacatgacgggcctcttggatgatggtgtggaacaggatcctggcaccatgagcatgtgggactgtactgctgccgtagctcgcacatgcattgcccagcagcagggtggggccgcagagcctgggccagcccccatccccgtggaggtgcgcgtggacctgcgggtgaaccgggcctcctatgcgttcctgcgggaggcactccgaagcagcgtgggcagcccgctgcggctctgctgccgggacctgcgagctgaggacctgcccatgcgcaacactgtggccctgctgcagcttctggatgcaggctgcctgcgccgcgtggacctgcgcttcaacaatctgggcctgcgcggcctgtctgtgatcatcccacacgtggcccgcttccagcacctggccagcctgcggctccactatgtgcatggggattcaaggcagccctccgtggatggcgaggacaacttccgctacttccttgcccagatgggccgcttcacctgtctgcgtgagctcagcatgggctcctctctcctttcagggaggctggaccagctgctcagcaccctgcagagccccctggagagcctggagttggccttctgtgctctgctgcctgaggacctacgcttcctggcacggagcccacatgctgcccacctcaagaagttggacctgagtggtaacgacctgtctggcagccagctggcacccttccagggtctgttgcaggcatcagcagccacactgttgcatctggagctgactgagtgtcagctcgcagacacccagctgttggccacactacccatcctgactcagtgcgccagtctccggtaccttggcctctatggcaacccactgtccatggcgggcctcaaggagctgctgcgggactcagtggcacaggctgagctgcgtactgtggtgcaccccttccctgtggactgctatgagggcttgccctggccgccgcctgcctctgtcctgctggaggcctccatcaatgaggagaagtttgcccgcgtagaagctgagttgcaccagctgcttctagcctcaggccgtgcccatgtgctctggaccacggacatctacgggcgactggctgcggactacttcagcctatgatgaagtagctctgggtgagacacaggccgccctgcagtctctttaggtaggcagggcctttgctgggacccctggtggaggccttcacaaaagcactggttactggtttcctgctgggtctaccttgcttctgggcacacctcaagcctcccctgctttctgcagtgccccacgcggttttccctgcacttgctccataattggctgatcatctgtgggccccggggctggatgtcaggcctccattgccctgctcagtttggctgcatttggctgccgtctggggtcctggtcctttgtgcaaatgctttgggattccagttgtgagctgagagagatgatggcctctctgggcctttcctctccctttactgagagctcagtgcttctggggttgaagttggacagaggcctgcttcagggaagctgggagtccccaggcactcacgcctcttacgtgttccctaccctgccacccagccaccccactgggctgggctcgggctggagggggtcatcaaggtacacatgtgcctggaagttgaatttgtggctgtttttttttctgtccacgttggtcacccttatccttatctctgctgtcacccccaacatggccaccgggcaacaactgccatccagcctgtcgccccgcccttcgcggggcagccccgtcggcactgccggccagtccttgctcttcccacctttcggaggcccaagatcctactgtggccggccagggccagcgagggaccccccccatgcagagctggaggttggggtgatgtcttttcggaagagcttcaagggaggtgttggggcctccccggccaccttccattgctaccccaggattcccgagtgcaacgttcccggctcgcgccccacacacggctcagcgcacactgcgcggcttccacctttactgacggagcatgcgcgaggccgcaccggccaatctccggcgcccacgtcatccgcgcgcccgcggccctagcagtggatctcgtaggcgaccggcgggggcacgcggagtcccggccccgccccctgttccgggccgcagtcagcgggcgcctccgccggaccctcggcgaagagcggcttggagcggttgatgacgaacatctcgtggccgcgctcgtcgcggagctcctctagctgtgcgaacgtacaggggccgtccaagtagtcgttgacgaacagcgctccctcccccggaggcccccgcgccttttttcgcctgcggcgccggcgacagatcatggcgaccaggagcagcgccgtgagcgccagcagcgcgatggccgccgcaatggccgtctgtgtggccacgcccagggcgcggaaggccatgctgcccgcctcgggccggggctcgctgccggcggggcgggcggccggaggcggcggttgcgcgggctgctgcggctgctgccgggacgcgttgaccaggagccggaagggcacgcgggcagcgccgccggcgttggaggcctcgcactcgtacttaccggcgtgcgccagcgtgatgttgctgaggaagagcatgccgctgcccgtgtcggatgccgagtgtccgcccaggcccagcaacccgccttctagctgggcctgggctcgcggccggccctcgcgaggctggggcacctttctccaggtcaccaatggctgcgggtagccggaggcttggcaggcaacccgcaggtcctcacccaggttggctgtgagctccagcggctgcacgtggacagagggcggaatgcagatgaggctgctgtgggatacgtccaggagactctggagcgccaggcgcgggggctctgcacacatgatcttcctgtccctggaggtgagcagccgctggccgccctccttgatccaggcccccagccagtgcagggcgcagtcacagcgccatgggttctctgtgggagagcagcgttaggcaggtggcttgagggtgctgctaaaacagcctgtgcagttggggttttgcaggccaggacagaggcctctttcccacctcccacagcgttttcacacggagtccaaggccctgccaccccttccttgaccccaagctccttggggcggcaggcccttcaccctcgcccccctcccctttagctctgtgatgcctgcctgttacagatcacttctccgtcggtctctgagaaagcacctgctccttaagtcttcctgcaacaagtgccactgtttttaggaacctgggcgtccacatagacatctcaccagcactgaaacctcacaagtcctctcagccttgcctttggatgccctctcttgggaatgtccccagtcctggtcagctgtctctctcctttgcaattttgtctgcctcccctcagcctaaaagtgtgcagaaccctcaattctgttaagtcaccctgtggagttcctgtcttctgttttccccaggcagggtgcctgagctgtattccccagcacacccactcccgcagccctccagtgtggctgcaggcggtggtgcagccttccagactgctgcccagttgcctgatgtcagagcccctccacacatgagcctgctccctactgccaacaccgtggcccagacagagacgctttccgaggaagaggtacctgtgaggcgcaggacttgcagactggccaggggctgcagggcctctcggctgatggtgcccagctggttcctgctgaggtccagcagtgctagggaggacagccccgctagagcctggtcctccagcagctcaatgctgttttcttgcaggtgaagctcctgcagtcgctgaagtaaggacagcagatcgtgaggaaaaagggcgccgaggttgggggcatgtctctcttcttaccaagctagactgggttgccttttctaactattccagccctacagggcgaggggccataatggagtatcccgcccctttagaccccaggcgctcaccggcaggtgcaagaaggtgaaatccagcagccgcgccagctggttgcccgccaggtagagcacgcgcagctgggccaggcctacgaaggcgccgctgcgcaagccgcgcagccggttgctagtgagcgccagctccagcaggcgcggctgcgcgcggaaggcgccggcctccagggcgcgcaggctgttgttgtgcaggtagagccggcgcagagcggcgagtggcgccagggctcccggctctaggcgggcgatgttgttgtcctgcaggaacagtgtctgcaggccggggaaagaggaggcgcttaccccgttgcgggggtcttcctctccctgggggcaccccgtcctcccgcagctccacacggtgcccacctgcgtccctggcgggattcccagcgggacgacgcgcaaccgcagggcgccacactccaccgtggcgctgtagcagcggcaggctgctgggcagccggcggcgcggagcggcagtagtagcagcagcagcggcagcagtgcgggggccctcagggccatctcccgaggcccggttcctcaccggcccttccgcggttcagccgcagacgcgtgccctcctgaaacacaggttggcaggccagtctcggcagtcgagagccagccaatagatggaatggaggcctgcacctgcgtctaacttttgacactataaataggttcaagaaactaataaaacgttctggttttctcctttgaaaaaaa

SEQ ID NO: 278652 - DNA, 1697 bp, Homo sapiens
acctagaggacccataagcggatagggcggaatgcagatgaggctgctgtggacagagggcggaatgcagatgaggctgctgtgggatacgtccaggagactctggagcgccaggcgcgggggctctgcacacatgatcttcctgtccctggagatcacttctccgtcggtctctgagaaagcacctgctccttaagtcttcctgcaacaagtgccactgtttttaggaacctgggcgtccacatagacatctcaccagcactgaaacctcacaagtcctctcagccttgcctttggatgccctctcttgggaatgtccccagtcctggtcagctgtctctctcctttgcaattttgtctgcctcccctcagcctaaaagtgtgcagaaccctcaattctgttaagtcaccctgtggagttcctgtcttctgttttccccaggcagggtgcctgagctgtattccccagcacacccactcccgcagccctccagtgtggctgcaggcggtggtgcagccttccagactgctgcccagttgcctgatgtcagagcccctccacacatgagcctgctccctactgccaacaccgtggcccagacagagacgctttccgaggaagaggtacctgtgaggcgcaggacttgcagactggccaggggctgcagggcctctcggctgatggtgcccagctggttcctgctgaggtccagcagtgctagggaggacagccccgctagagcctggtcctccagcagctcaatgctgttttcttgcaggtgaagctcctgcagtcgctgaagtaaggacagcagatcgtgaggaaaaagggcgccgaggttgggggcatgtctctcttcttaccaagctagactgggttgccttttctaactattccagccctacagggcgaggggccataatggagtatcccgcccctttagaccccaggcgctcaccggcaggtgcaagaaggtgaaatccagcagccgcgccagctggttgcccgccaggtagagcacgcgcagctgggccaggcctacgaaggcgccgctgcgcaagccgcgcagccggttgctagtgagcgccagctccagcaggcgcggctgcgcgcggaaggcgccggcctccagggcgcgcaggctgttgttgtgcaggtagagccggcgcagagcggcgagtggcgccagggctcccggctctaggcgggcgatgttgttgtcctgcaggaacagtgtctgcaggccggggaaagaggaggcgcttaccccgttgcgggggtcttcctctccctgggggcaccccgtcctcccgcagctccacacggtgcccacctgcgtccctggcgggattcccagcgggacgacgcgcaaccgcagggcgccacactccaccgtggcgctgtagcagcggcaggctgctgggcagccggcggcgcggagcggcagtagtagcagcagcagcggcagcagtgcgggggccctcagggccatctcccgaggcccggttcctcaccggcccttccgcggttcagccgcagacgcgtgccctcctgaaacacaggttggcaggccagtctcggcagtcgagagccagccaatagatggaatggaggcctgcacctgcgtctaacttttgacactataaataggttcaagaaactaataaaacgttctggttttctcctttgaaaaaaa

SEQ ID NO: 278653 - DNA, 2617 bp, Homo sapiens
caacgtcatcgcggggcgccgcggcgccgggcggggagcggcggacggtctaggcggggctggaggcggtggctgcggttgcgggaccgggagatggctgcgatttagttttgaggatgctacaggcagcagcagggctggcaccctgtgtcacaggcactatgctgggccttcctaccacttgtgtgtggcttggtagtggcctagggtctctcctccctgctgaagtccctctcctgcaggtggccgtctgcccggcccagcaccatgcacacgcttgtgttcttgagcacacggcaggtgctgcagtgccagccagctgcctgccaggccctgcccctgctgccacgcgaactcttccccctgctgttcaaggtggccttcatggacaagaagacagtggtactgcgcgagttggtacacacgtggcccttcccgctgctcagtttccagcagctgctacaggagtgtgcccactgcagccgtgccctcctgcaggagcggcctagcactgagagcatgcaggctgttatcctggggctgactgcccggctccacacctcagagcctggggccagcacacagcccctctgcaggaagcatgcgctgcgggtgctggacatgacgggcctcttggatgatggtgtggaacaggatcctggcaccatgagcatgtgggactgtactgctgccgtagctcgcacatgcattgcccagcagcagggtggggccgcagagcctgggccagcccccatccccgtggaggtgcgcgtggacctgcgggtgaaccgggcctcctatgcgttcctgcgggaggcactccgaagcagcgtgggcagcccgctgcggctctgctgccgggacctgcgagctgaggacctgcccatgcgcaacactgtggccctgctgcagcttctggatgcaggctgcctgcgccgcgtggacctgcgcttcaacaatctgggcctgcgcggcctgtctgtgatcatcccacacgtggcccgcttccagcacctggccagcctgcggctccactatgtgcatggggattcaaggcagccctccgtggatggcgaggacaacttccgctacttccttgcccagatgggccgcttcacctgtctgcgtgagctcagcatgggctcctctctcctttcagggaggctggaccagctgctcagcaccctgcagagccccctggagagcctggagttggccttctgtgctctgctgcctgaggacctacgcttcctggcacggagcccacatgctgcccacctcaagaagttggacctgagtggtaacgacctgtctggcagccagctggcacccttccagggtctgttgcaggcatcagcagccacactgttgcatctggagctgactgagtgtcagctcgcagacacccagctgttggccacactacccatcctgactcagtgcgccagtctccggtaccttggcctctatggcaacccactgtccatggcgggcctcaaggagctgctgcgggactcagtggcacaggctgagctgcgtactgtggtgcaccccttccctgtggactgctatgagggcttgccctggccgccgcctgcctctgtcctgctggaggcctccatcaatgaggagaagtttgcccgcgtagaagctgagttgcaccagctgcttctagcctcaggccgtgcccatgtgctctggaccacggacatctacgggcgactggctgcggactacttcagcctatgatgaagtagctctgggtgagacacaggccgccctgcagtctctttaggtaggcagggcctttgctgggacccctggtggaggccttcacaaaagcactggttactggtttcctgctgggtctaccttgcttctgggcacacctcaagcctcccctgctttctgcagtgccccacgcggttttccctgcacttgctccataattggctgatcatctgtgggccccggggctggatgtcaggcctccattgccctgctcagtttggctgcatttggctgccgtctggggtcctggtcctttgtgcaaatgctttgggattccagttgtgagctgagagagatgatggcctctctgggcctttcctctccctttactgagagctcagtgcttctggggttgaagttggacagaggcctgcttcagggaagctgggagtccccaggcactcacgcctcttacgtgttccctaccctgccacccagccaccccactgggctgggctcgggctggagggggtcatcaaggtacacatgtgcctggcaaaaaaaaaaaaaaaaaaaaaaatttttgggccgctggggctctgaaagaagtttctaaacacattctcgttgggcccacggggccccataagggccactgcggcacctgggggccacaacacggttgtccccaaagggaagaacccgggcggcacaagaacaaacgggcgcctgggggtctctctaccgcaatataaaaaaaacgccgcggggggccagcccgagcggggttctgggaacaaaacccccgaaggggagggctcaggggcagcccagcagcgggagccccaccacccagggaggccaacgaagcgccaaatataaaact

SEQ ID NO: 278654 - DNA, 5382 bp, Homo sapiens
caacgtcatcgcggggcgccgcggcgccgggcggggagcggcggacggtctaggcggggctggaggcggtggctgcggttgcgggaccggcactatgctgggccttcctaccacttgtgtgtggcttggtagtggcctagggtctctcctccctgctgaagtccctctcctgcaggtggccgtctgcccggcccagcaccatgcacacgcttgtgttcttgagcacacggcaggtgctgcagtgccagccagctgcctgccaggccctgcccctgctgccacgcgaactcttccccctgctgttcaaggtggccttcatggacaagaagacagtggtactgcgcgagttggtacacacgtggcccttcccgctgctcagtttccagcagctgctacaggagtgtgcccactgcagccgtgccctcctgcaggagcggcctagcactgagagcatgcaggctgttatcctggggctgactgcccggctccacacctcagagcctggggccagcacacagcccctctgcaggaagcatgcgctgcgggtgctggacatgacgggcctcttggatgatggtgtggaacaggatcctggcaccatgagcatgtgggactgtactgctgccgtagctcgcacatgcattgcccagcagcagggtggggccgcagagcctgggccagcccccatccccgtggaggtgcgcgtggacctgcgggtgaaccgggcctcctatgcgttcctgcgggaggcactccgaagcagcgtgggcagcccgctgcggctctgctgccgggacctgcgagctgaggacctgcccatgcgcaacactgtggccctgctgcagcttctggatgcaggctgcctgcgccgcgtggacctgcgcttcaacaatctgggcctgcgcggcctgtctgtgatcatcccacacgtggcccgcttccagcacctggccagcctgcggctccactatgtgcatggggattcaaggcagccctccgtggatggcgaggacaacttccgctacttccttgcccagatgggccgcttcacctgtctgcgtgagctcagcatgggctcctctctcctttcagggaggctggaccagctgctcagcaccctgcagagccccctggagagcctggagttggccttctgtgctctgctgcctgaggacctacgcttcctggcacggagcccacatgctgcccacctcaagaagttggacctgagtggtaacgacctgtctggcagccagctggcacccttccagggtctgttgcaggcatcagcagccacactgttgcatctggagctgactgagtgtcagctcgcagacacccagctgttggccacactacccatcctgactcagtgcgccagtctccggtaccttggcctctatggcaacccactgtccatggcgggcctcaaggagctgctgcgggactcagtggcacaggctgagctgcgtactgtggtgcaccccttccctgtggactgctatgagggcttgccctggccgccgcctgcctctgtcctgctggaggcctccatcaatgaggagaagtttgcccgcgtagaagctgagttgcaccagctgcttctagcctcaggccgtgcccatgtgctctggaccacggacatctacgggcgactggctgcggactacttcagcctatgatgaagtagctctgggtgagacacaggccgccctgcagtctctttaggtaggcagggcctttgctgggacccctggtggaggccttcacaaaagcactggttactggtttcctgctgggtctaccttgcttctgggcacacctcaagcctcccctgctttctgcagtgccccacgcggttttccctgcacttgctccataattggctgatcatctgtgggccccggggctggatgtcaggcctccattgccctgctcagtttggctgcatttggctgccgtctggggtcctggtcctttgtgcaaatgctttgggattccagttgtgagctgagagagatgatggcctctctgggcctttcctctccctttactgagagctcagtgcttctggggttgaagttggacagaggcctgcttcagggaagctgggagtccccaggcactcacgcctcttacgtgttccctaccctgccacccagccaccccactgggctgggctcgggctggagggggtcatcaaggtacacatgtgcctggaagttgaatttgtggctgtttttttttctgtccacgttggtcacccttatccttatctctgctgtcacccccaacatggccaccgggcaacaactgccatccagcctgtcgccccgcccttcgcggggcagccccgtcggcactgccggccagtccttgctcttcccacctttcggaggcccaagatcctactgtggccggccagggccagcgagggaccccccccatgcagagctggaggttggggtgatgtcttttcggaagagcttcaagggaggtgttggggcctccccggccaccttccattgctaccccaggattcccgagtgcaacgttcccggctcgcgccccacacacggctcagcgcacactgcgcggcttccacctttactgacggagcatgcgcgaggccgcaccggccaatctccggcgcccacgtcatccgcgcgcccgcggccctagcagtggatctcgtaggcgaccggcgggggcacgcggagtcccggccccgccccctgttccgggccgcagtcagcgggcgcctccgccggaccctcggcgaagagcggcttggagcggttgatgacgaacatctcgtggccgcgctcgtcgcggagctcctctagctgtgcgaacgtacaggggccgtccaagtagtcgttgacgaacagcgctccctcccccggaggcccccgcgccttttttcgcctgcggcgccggcgacagatcatggcgaccaggagcagcgccgtgagcgccagcagcgcgatggccgccgcaatggccgtctgtgtggccacgcccagggcgcggaaggccatgctgcccgcctcgggccggggctcgctgccggcggggcgggcggccggaggcggcggttgcgcgggctgctgcggctgctgccgggacgcgttgaccaggagccggaagggcacgcgggcagcgccgccggcgttggaggcctcgcactcgtacttaccggcgtgcgccagcgtgatgttgctgaggaagagcatgccgctgcccgtgtcggatgccgagtgtccgcccaggcccagcaacccgccttctagctgggcctgggctcgcggccggccctcgcgaggctggggcacctttctccaggtcaccaatggctgcgggtagccggaggcttggcaggcaacccgcaggtcctcacccaggttggctgtgagctccagcggctgcacgtggacagagggcggaatgcagatgaggctgctgtgggatacgtccaggagactctggagcgccaggcgcgggggctctgcacacatgatcttcctgtccctggaggtgagcagccgctggccgccctccttgatccaggcccccagccagtgcagggcgcagtcacagcgccatgggttctctgtgggagagcagcgttaggcaggtggcttgagggtgctgctaaaacagcctgtgcagttggggttttgcaggccaggacagaggcctctttcccacctcccacagcgttttcacacggagtccaaggccctgccaccccttccttgaccccaagctccttggggcggcaggcccttcaccctcgcccccctcccctttagctctgtgatgcctgcctgttacagatcacttctccgtcggtctctgagaaagcacctgctccttaagtcttcctgcaacaagtgccactgtttttaggaacctgggcgtccacatagacatctcaccagcactgaaacctcacaagtcctctcagccttgcctttggatgccctctcttgggaatgtccccagtcctggtcagctgtctctctcctttgcaattttgtctgcctcccctcagcctaaaagtgtgcagaaccctcaattctgttaagtcaccctgtggagttcctgtcttctgttttccccaggcagggtgcctgagctgtattccccagcacacccactcccgcagccctccagtgtggctgcaggcggtggtgcagccttccagactgctgcccagttgcctgatgtcagagcccctccacacatgagcctgctccctactgccaacaccgtggcccagacagagacgctttccgaggaagaggtacctgtgaggcgcaggacttgcagactggccaggggctgcagggcctctcggctgatggtgcccagctggttcctgctgaggtccagcagtgctagggaggacagccccgctagagcctggtcctccagcagctcaatgctgttttcttgcaggtgaagctcctgcagtcgctgaagtaaggacagcagatcgtgaggaaaaagggcgccgaggttgggggcatgtctctcttcttaccaagctagactgggttgccttttctaactattccagccctacagggcgaggggccataatggagtatcccgcccctttagaccccaggcgctcaccggcaggtgcaagaaggtgaaatccagcagccgcgccagctggttgcccgccaggtagagcacgcgcagctgggccaggcctacgaaggcgccgctgcgcaagccgcgcagccggttgctagtgagcgccagctccagcaggcgcggctgcgcgcggaaggcgccggcctccagggcgcgcaggctgttgttgtgcaggtagagccggcgcagagcggcgagtggcgccagggctcccggctctaggcgggcgatgttgttgtcctgcaggaacagtgtctgcaggccggggaaagaggaggcgcttaccccgttgcgggggtcttcctctccctgggggcaccccgtcctcccgcagctccacacggtgcccacctgcgtccctggcgggattcccagcgggacgacgcgcaaccgcagggcgccacactccaccgtggcgctgtagcagcggcaggctgctgggcagccggcggcgcggagcggcagtagtagcagcagcagcggcagcagtgcgggggccctcagggccatctcccgaggcccggttcctcaccggcccttccgcggttcagccgcagacgcgtgccctcctgaaacacaggttggcaggccagtctcggcagtcgagagccagccaatagatggaatggaggcctgcacctgcgtctaacttttgacactataaataggttcaagaaactaataaaacgttctggttttctcctttgaaaaaaa

SEQ ID NO: 278655 - DNA, 4901 bp, Homo sapiens
caacgtcatcgcggggcgccgcggcgccgggcggggagcggcggacggtctaggcggggctggaggcggtggctgcggttgcgggaccgggagatggctgcgatttagttttgaggatgctacaggcagcagcagggctggcaccctgtgtcacaggcactatgctgggccttcctaccacttgtgtgtggcttggtagtggcctagggtctctcctccctgctgaagtccctctcctgcaggtggccgtctgcccggcccagcaccatgcacacgcttgtgttcttgagcacacggcaggtgctgcagtgccagccagctgcctgccaggccctgcccctgctgccacgcgaactcttccccctgctgttcaaggtggccttcatggacaagaagacagtggtactgcgcgagttggtacacacgtggcccttcccgctgctcagtttccagcagctgctacaggagtgtgcccactgcagccgtgccctcctgcaggagcggcctagcactgagagcatgcaggctgttatcctggggctgactgcccggctccacacctcagagcctggggccagcacacagcccctctgcaggaagcatgcgctgcgggtgctggacatgacgggcctcttggatgatggtgtggaacaggatcctggcaccatgagcatgtgggactgtactgctgccgtagctcgcacatgcattgcccagcagcagggtggggccgcagagcctgggccagcccccatccccgtggaggtgcgcgtggacctgcgggtgaaccgggcctcctatgcgttcctgcgggaggcactccgaagcagcgtgggcagcccgctgcggctctgctgccgggacctgcgagctgaggacctgcccatgcgcaacactgtggccctgctgcagcttctggatgcaggctgcctgcgccgcgtggacctgcgcttcaacaatctgggcctgcgcggcctgtctgtgatcatcccacacgtggcccgcttccagcacctggccagcctgcggctccactatgtgcatggggattcaaggcagccctccgtggatggcgaggacaacttccgctacttccttgcccagatgggccgcttcacctgtctgcgtgagctcagcatgggctcctctctcctttcagggaggctggaccagctgctcagcaccctgcagagccccctggagagcctggagttggccttctgtgctctgctgcctgaggacctacgcttcctggcacggagcccacatgctgcccacctcaagaagttggacctgagtggtaacgacctgtctggcagccagctggcacccttccagggtctgttgcaggcatcagcagccacactgttgcatctggagctgactgagtgtcagctcgcagacacccagctgttggccacactacccatcctgactcagtgcgccagtctccggtaccttggcctctatggcaacccactgtccatggcgggcctcaaggagctgctgcgggactcagtggcacaggctgagctgcgtactgtggtgcaccccttccctgtggactgctatgagggcttgccctggccgccgcctgcctctgtcctgctggaggcctccatcaatgaggagaagtttgcccgcgtagaagctgagttgcaccagctgcttctagcctcaggccgtgcccatgtgctctggaccacggacatctacgggcgactggctgcggactacttcagcctatgatgaagtagctctgggtgagacacaggccgccctgcagtctctttaggtaggcagggcctttgctgggacccctggtggaggccttcacaaaagcactggttactggtttcctgctgggtctaccttgcttctgggcacacctcaagcctcccctgctttctgcagtgccccacgcggttttccctgcacttgctccataattggctgatcatctgtgggccccggggctggatgtcaggcctccattgccctgctcagtttggctgcatttggctgccgtctggggtcctggtcctttgtgcaaatgctttgggattccagttgtgagctgagagagatgatggcctctctgggcctttcctctccctttactgagagctcagtgcttctggggttgaagttggacagaggcctgcttcagggaagctgggagtccccaggcactcacgcctcttacgtgttccctaccctgccacccagccaccccactgggctgggctcgggctggagggggtcatcaaggtacacatgtgcctggaagttgaatttgtggctgtttttttttctgtccacgttggtcacccttatccttatctctgctgtcacccccaacatggccaccgggcaacaactgccatccagcctgtcgccccgcccttcgcggggcagccccgtcggcactgccggccagtccttgctcttcccacctttcggaggcccaagatcctactgtggccggccagggccagcgagggaccccccccatgcagagctggaggttggggtgatgtcttttcggaagagcttcaagggaggtgttggggcctccccggccaccttccattgctaccccaggattcccgagtgcaacgttcccggctcgcgccccacacacggctcagcgcacactgcgcggcttccacctttactgacggagcatgcgcgaggccgcaccggccaatctccggcgcccacgtcatccgcgcgcccgcggccctagcagtggatctcgtaggcgaccggcgggggcacgcggagtcccggccccgccccctgttccgggccgcagtcagcgggcgcctccgccggaccctcggcgaagagcggcttggagcggttgatgacgaacatctcgtggccgcgctcgtcgcggagctcctctagctgtgcgaacgtacaggggccgtccaagtagtcgttgacgaacagcgctccctcccccggaggcccccgcgccttttttcgcctgcggcgccggcgacagatcatggcgaccaggagcagcgccgtgagcgccagcagcgcgatggccgccgcaatggccgtctgtgtggccacgcccagggcgcggaaggccatgctgcccgcctcgggccggggctcgctgccggcggggcgggcggccggaggcggcggttgcgcgggctgctgcggctgctgccgggacgcgttgaccaggagccggaagggcacgcgggcagcgccgccggcgttggaggcctcgcactcgtacttaccggcgtgcgccagcgtgatgttgctgaggaagagcatgccgctgcccgtgtcggatgccgagtgtccgcccaggcccagcaacccgccttctagctgggcctgggctcgcggccggccctcgcgaggctggggcacctttctccaggtcaccaatggctgcgggtagccggaggcttggcaggcaacccgcaggtcctcacccaggttggctgtgagctccagcggctgcacgtggacagagggcggaatgcagatgaggctgctgtgggatacgtccaggagactctggagcgccaggcgcgggggctctgcacacatgatcttcctgtccctggaggtgagcagccgctggccgccctccttgatccaggcccccagccagtgcagggcgcagtcacagcgccatgggttctctgtgggagagcagcgttaggcaggtggcttgagggtgctgctaaaacagcctgtgcagttggggttttgcaggccaggacagaggcctctttcccacctcccacagcgttttcacacggagtccaaggccctgccaccccttccttgaccccaagctccttggggcggcaggcccttcaccctcgcccccctcccctttagctctgtgatgcctgcctgttacagatcacttctccgtcggtctctgagaaagcacctgctccttaagtcttcctgcaacaagtgccactgtttttaggaacctgggcgtccacatagacatctcaccagcactgaaacctcacaagtcctctcagccttgcctttggatgccctctcttgggaatgtccccagtcctggtcagctgtctctctcctttgcaattttgtctgcctcccctcagcctaaaagtgtgcagaaccctcaattctgttaagtcacccggcaggtgcaagaaggtgaaatccagcagccgcgccagctggttgcccgccaggtagagcacgcgcagctgggccaggcctacgaaggcgccgctgcgcaagccgcgcagccggttgctagtgagcgccagctccagcaggcgcggctgcgcgcggaaggcgccggcctccagggcgcgcaggctgttgttgtgcaggtagagccggcgcagagcggcgagtggcgccagggctcccggctctaggcgggcgatgttgttgtcctgcaggaacagtgtctgcaggccggggaaagaggaggcgcttaccccgttgcgggggtcttcctctccctgggggcaccccgtcctcccgcagctccacacggtgcccacctgcgtccctggcgggattcccagcgggacgacgcgcaaccgcagggcgccacactccaccgtggcgctgtagcagcggcaggctgctgggcagccggcggcgcggagcggcagtagtagcagcagcagcggcagcagtgcgggggccctcagggccatctcccgaggcccggttcctcaccggcccttccgcggttcagccgcagacgcgtgccctcctgaaacacaggttggcaggccagtctcggcagtcgagagccagccaatagatggaatggaggcctgcacctgcgtctaacttttgacactataaataggttcaagaaactaataaaacgttctggttttctcctttgaaaaaaa

SEQ ID NO: 278656 - DNA, 5535 bp, Homo sapiens
caacgtcatcgcggggcgccgcggcgccgggcggggagcggcggacggtctaggcggggctggaggcggtggctgcggttgcgggaccgggagatggctgcgatttagttttgaggatgctacaggcagcagcagggctggcaccctgtgtcacaggcactatgctgggccttcctaccacttgtgtgtggcttggtagtggcctagggtctctcctccctgctgaagtccctctcctgcaggtggccgtctgcccggcccagcaccatgcacacgcttgtgttcttgagcacacggcaggtgctgcagtgccagccagctgcctgccaggccctgcccctgctgccacgcgaactcttccccctgctgttcaaggtggccttcatggacaagaagacagtggtactgcgcgagttggtacacacgtggcccttcccgctgctcagtttccagcagctgctacaggagtgtgcccactgcagccgtgccctcctgcaggagcggcctagcactgagagcatgcaggctgttatcctggggctgactgcccggctccacacctcagagcctggggccagcacacagcccctctgcaggaagcatgcgctgcgggtgctggacatgacgggcctcttggatgatggtgtggaacaggatcctggcaccatgagcatgtgggactgtactgctgccgtagctcgcacatgcattgcccagcagcagggtggggccgcagagcctgggccagcccccatccccgtggaggtgcgcgtggacctgcgggtgaaccgggcctcctatgcgttcctgcgggaggcactccgaagcagcgtgggcagcccgctgcggctctgctgccgggacctgcgagctgaggacctgcccatgcgcaacactgtggccctgctgcagcttctggatgcaggctgcctgcgccgcgtggacctgcgcttcaacaatctgggcctgcgcggcctgtctgtgatcatcccacacgtggcccgcttccagcacctggccagcctgcggctccactatgtgcatggggattcaaggcagccctccgtggatggcgaggacaacttccgctacttccttgcccagatgggccgcttcacctgtctgcgtgagctcagcatgggctcctctctcctttcagggaggctggaccagctgctcagcaccctgcagagccccctggagagcctggagttggccttctgtgctctgctgcctgaggacctacgcttcctggcacggagcccacatgctgcccacctcaagaagttggacctgagtggtaacgacctgtctggcagccagctggcacccttccagggtctgttgcaggcatcagcagccacactgttgcatctggagctgactgagtgtcagctcgcagacacccagctgttggccacactacccatcctgactcagtgcgccagtctccggtaccttggcctctatggcaacccactgtccatggcgggcctcaaggagctgctgcgggactcagtggcacaggctgagctgcgtactgtggtgcaccccttccctgtggactgctatgagggcttgccctggccgccgcctgcctctgtcctgctggaggcctccatcaatgaggagaagtttgcccgcgtagaagctgagttgcaccagctgcttctagcctcaggccgtgcccatgtgctctggaccacggacatctacgggcgactggctgcggactacttcagcctatgatgaagtagctctgggtgagacacaggccgccctgcagtctctttaggtaggcagggcctttgctgggacccctggtggaggccttcacaaaagcactggttactggtttcctgctgggtctaccttgcttctgggcacacctcaagcctcccctgctttctgcagtgccccacgcggttttccctgcacttgctccataattggctgatcatctgtgggccccggggctggatgtcaggcctccattgccctgctcagtttggctgcatttggctgccgtctggggtcctggtcctttgtgcaaatgctttgggattccagttgtgagctgagagagatgatggcctctctgggcctttcctctccctttactgagagctcagtgcttctggggttgaagttggacagaggcctgcttcagggaagctgggagtccccaggcactcacgcctcttacgtgttccctaccctgccacccagccaccccactgggctgggctcgggctggagggggtcatcaaggtacacatgtgcctggaagttgaatttgtggctgtttttttttctgtccacgttggtcacccttatccttatctctgctgtcacccccaacatggccaccgggcaacaactgccatccagcctgtcgccccgcccttcgcggggcagccccgtcggcactgccggccagtccttgctcttcccacctttcggaggcccaagatcctactgtggccggccagggccagcgagggaccccccccatgcagagctggaggttggggtgatgtcttttcggaagagcttcaagggaggtgttggggcctccccggccaccttccattgctaccccaggattcccgagtgcaacgttcccggctcgcgccccacacacggctcagcgcacactgcgcggcttccacctttactgacggagcatgcgcgaggccgcaccggccaatctccggcgcccacgtcatccgcgcgcccgcggccctagcagtggatctcgtaggcgaccggcgggggcacgcggagtcccggccccgccccctgttccgggccgcagtcagcgggcgcctccgccggaccctcggcgaagagcggcttggagcggttgatgacgaacatctcgtggccgcgctcgtcgcggagctcctctagctgtgcgaacgtacaggggccgtccaagtagtcgttgacgaacagcgctccctcccccggaggcccccgcgccttttttcgcctgcggcgccggcgacagatcatggcgaccaggagcagcgccgtgagcgccagcagcgcgatggccgccgcaatggccgtctgtgtggccacgcccagggcgcggaaggccatgctgcccgcctcgggccggggctcgctgccggcggggcgggcggccggaggcggcggttgcgcgggctgctgcggctgctgccgggacgcgttgaccaggagccggaagggcacgcgggcagcgccgccggcgttggaggcctcgcactcgtacttaccggcgtgcgccagcgtgatgttgctgaggaagagcatgccgctgcccgtgtcggatgccgagtgtccgcccaggcccagcaacccgccttctagctgggcctgggctcgcggccggccctcgcgaggctggggcacctttctccaggtcaccaatggctgcgggtagccggaggcttggcaggcaacccgcaggtcctcacccaggttggctgtgagctccagcggctgcacgtggacagagggcggaatgcagatgaggctgctgtgggatacgtccaggagactctggagcgccaggcgcgggggctctgcacacatgatcttcctgtccctggaggtgagcagccgctggccgccctccttgatccaggcccccagccagtgcagggcgcagtcacagcgccatgggttctctgtgggagagcagcgttaggcaggtggcttgagggtgctgctaaaacagcctgtgcagttggggttttgcaggccaggacagaggcctctttcccacctcccacagcgttttcacacggagtccaaggccctgccaccccttccttgaccccaagctccttggggcggcaggcccttcaccctcgcccccctcccctttagctctgtgatgcctgcctgttacagatcacttctccgtcggtctctgagaaagcacctgctccttaagtcttcctgcaacaagtgccactgtttttaggaacctgggcgtccacatagacatctcaccagcactgaaacctcacaagtcctctcagccttgcctttggatgccctctcttgggaatgtccccagtcctggtcagctgtctctctcctttgcaattttgtctgcctcccctcagcctaaaagtgtgcagaaccctcaattctgttaagtcaccctgtggagttcctgtcttctgttttccccaggcagggtgcctgagctgtattccccagcacacccactcccgcagccctccagtgtggctgcaggcggtggtgcagccttccagactgctgcccagttgcctgatgtcagagcccctccacacatgagcctgctccctactgccaacaccgtggcccagacagagacgctttccgaggaagaggtacctgtgaggcgcaggacttgcagactggccaggggctgcagggcctctcggctgatggtgcccagctggttcctgctgaggtccagcagtgctagggaggacagccccgctagagcctggtcctccagcagctcaatgctgttttcttgcaggtgaagctcctgcagtcgctgaagtaaggacagcagatcgtgaggaaaaagggcgccgaggttgggggcatgtctctcttcttaccaagctagactgggttgccttttctaactattccagccctacagggcgaggggccataatggagtatcccgcccctttagaccccaggcgctcaccggcaggtgcaagaaggtgaaatccagcagccgcgccagctggttgcccgccaggtagagcacgcgcagctgggccaggcctacgaaggcgccgctgcgcaagccgcgcagccggttgctagtgagcgccagctccagcaggcgcggctgcgcgcggaaggcgccggcctccagggcgcgcaggctgttgttgtgcaggtagagccggcgcagagcggcgagtggcgccagggctcccggctctaggcgggcgatgttgttgtcctgcaggaacagtgtctgcaggccggggaaagaggaggcgcttaccccgttgcgggggtcttcctctccctgggggcaccccgtcctcccgcagctccacacggtgcccacctgcgtccctggcgggattcccagcgggacgacgcgcaaccgcagggcgccacactccaccgtggcgctgtagcagcggcaggctgctgggcagccggcggcgcggagcggcagtagtagcagcagcagcggcagcagtgcgggggccctcagggccatctcccgaggcccggttcctcaccggcccttccgcggttcagccgcagacgcgtgccctcctgaaacacaggttggcaggccagtctcggcagtcgagagccagccaatagatggaatggaggcctgcacctgcgtctaacttttgacactataaataggttcaagaaactaataaaacgttctggttttctcctttgaaaaaaaaaaattgataaaaattcacttttaatttttgtataaatcatgcttatttttttaactcccttgaggggggggcccggccccaattt

SEQ ID NO: 278657 - DNA, 4295 bp, Homo sapiens
caacgtcatcgcggggcgccgcggcgccgggcggggagcggcggacggtctaggcggggctggaggcggtggctgcggttgcgggaccgggagatggctgcgatttagttttgaggatgctacaggcagcagcagggctggcaccctgtgtcacaggcactatgctgggccttcctaccacttgtgtgtggcttggtagtggcctagggtctctcctccctgctgaagtccctctcctgcaggtggccgtctgcccggcccagcaccatgcacacgcttgtgttcttgagcacacggcaggtgctgcagtgccagccagctgcctgccaggccctgcccctgctgccacgcgaactcttccccctgctgttcaaggtggccttcatggacaagaagacagtggtactgcgcgagttggtacacacgtggcccttcccgctgctcagtttccagcagctgctacaggagtgtgcccactgcagccgtgccctcctgcaggagcggcctagcactgagagcatgcaggctgttatcctggggctgactgcccggctccacacctcagagcctggggccagcacacagcccctctgcaggaagcatgcgctgcgggtgctggacatgacgggcctcttggatgatggtgtggaacaggatcctggcaccatgagcatgtgggactgtactgctgccgtagctcgcacatgcattgcccagcagcagggtggggccgcagagcctgggccagcccccatccccgtggaggtgcgcgtggacctgcgggtgaaccgggcctcctatgcgttcctgcgggaggcactccgaagcagcgtgggcagcccgctgcggctctgctgccgggacctgcgagctgaggacctgcccatgcgcaacactgtggccctgctgcagcttctggatgcaggctgcctgcgccgcgtggacctgcgcttcaacaatctgggcctgcgcggcctgtctgtgatcatcccacacgtggcccgcttccagcacctggccagcctgcgtccccaggcactcacgcctcttacgtgttccctaccctgccacccagccaccccactgggctgggctcgggctggagggggtcatcaaggtacacatgtgcctggaagttgaatttgtggctgtttttttttctgtccacgttggtcacccttatccttatctctgctgtcacccccaacatggccaccgggcaacaactgccatccagcctgtcgccccgcccttcgcggggcagccccgtcggcactgccggccagtccttgctcttcccacctttcggaggcccaagatcctactgtggccggccagggccagcgagggaccccccccatgcagagctggaggttggggtgatgtcttttcggaagagcttcaagggaggtgttggggcctccccggccaccttccattgctaccccaggattcccgagtgcaacgttcccggctcgcgccccacacacggctcagcgcacactgcgcggcttccacctttactgacggagcatgcgcgaggccgcaccggccaatctccggcgcccacgtcatccgcgcgcccgcggccctagcagtggatctcgtaggcgaccggcgggggcacgcggagtcccggccccgccccctgttccgggccgcagtcagcgggcgcctccgccggaccctcggcgaagagcggcttggagcggttgatgacgaacatctcgtggccgcgctcgtcgcggagctcctctagctgtgcgaacgtacaggggccgtccaagtagtcgttgacgaacagcgctccctcccccggaggcccccgcgccttttttcgcctgcggcgccggcgacagatcatggcgaccaggagcagcgccgtgagcgccagcagcgcgatggccgccgcaatggccgtctgtgtggccacgcccagggcgcggaaggccatgctgcccgcctcgggccggggctcgctgccggcggggcgggcggccggaggcggcggttgcgcgggctgctgcggctgctgccgggacgcgttgaccaggagccggaagggcacgcgggcagcgccgccggcgttggaggcctcgcactcgtacttaccggcgtgcgccagcgtgatgttgctgaggaagagcatgccgctgcccgtgtcggatgccgagtgtccgcccaggcccagcaacccgccttctagctgggcctgggctcgcggccggccctcgcgaggctggggcacctttctccaggtcaccaatggctgcgggtagccggaggcttggcaggcaacccgcaggtcctcacccaggttggctgtgagctccagcggctgcacgtggacagagggcggaatgcagatgaggctgctgtgggatacgtccaggagactctggagcgccaggcgcgggggctctgcacacatgatcttcctgtccctggaggtgagcagccgctggccgccctccttgatccaggcccccagccagtgcagggcgcagtcacagcgccatgggttctctgtgggagagcagcgttaggcaggtggcttgagggtgctgctaaaacagcctgtgcagttggggttttgcaggccaggacagaggcctctttcccacctcccacagcgttttcacacggagtccaaggccctgccaccccttccttgaccccaagctccttggggcggcaggcccttcaccctcgcccccctcccctttagctctgtgatgcctgcctgttacagatcacttctccgtcggtctctgagaaagcacctgctccttaagtcttcctgcaacaagtgccactgtttttaggaacctgggcgtccacatagacatctcaccagcactgaaacctcacaagtcctctcagccttgcctttggatgccctctcttgggaatgtccccagtcctggtcagctgtctctctcctttgcaattttgtctgcctcccctcagcctaaaagtgtgcagaaccctcaattctgttaagtcaccctgtggagttcctgtcttctgttttccccaggcagggtgcctgagctgtattccccagcacacccactcccgcagccctccagtgtggctgcaggcggtggtgcagccttccagactgctgcccagttgcctgatgtcagagcccctccacacatgagcctgctccctactgccaacaccgtggcccagacagagacgctttccgaggaagaggtacctgtgaggcgcaggacttgcagactggccaggggctgcagggcctctcggctgatggtgcccagctggttcctgctgaggtccagcagtgctagggaggacagccccgctagagcctggtcctccagcagctcaatgctgttttcttgcaggtgaagctcctgcagtcgctgaagtaaggacagcagatcgtgaggaaaaagggcgccgaggttgggggcatgtctctcttcttaccaagctagactgggttgccttttctaactattccagccctacagggcgaggggccataatggagtatcccgcccctttagaccccaggcgctcaccggcaggtgcaagaaggtgaaatccagcagccgcgccagctggttgcccgccaggtagagcacgcgcagctgggccaggcctacgaaggcgccgctgcgcaagccgcgcagccggttgctagtgagcgccagctccagcaggcgcggctgcgcgcggaaggcgccggcctccagggcgcgcaggctgttgttgtgcaggtagagccggcgcagagcggcgagtggcgccagggctcccggctctaggcgggcgatgttgttgtcctgcaggaacagtgtctgcaggccggggaaagaggaggcgcttaccccgttgcgggggtcttcctctccctgggggcaccccgtcctcccgcagctccacacggtgcccacctgcgtccctggcgggattcccagcgggacgacgcgcaaccgcagggcgccacactccaccgtggcgctgtagcagcggcaggctgctgggcagccggcggcgcggagcggcagtagtagcagcagcagcggcagcagtgcgggggccctcagggccatctcccgaggcccggttcctcaccggcccttccgcggttcagccgcagacgcgtgccctcctgaaacacaggttggcaggccagtctcggcagtcgagagccagccaatagatggaatggaggcctgcacctgcgtctaacttttgacactataaataggttcaagaaactaataaaacgttctggttttctcctttgaaaaaaa

SEQ ID NO: 278658 - DNA, 1299 bp, Homo sapiens
aggcaccctggcctggggaaaacagaagacaggaactccacgaggcagggtgcctgagctgtattccccagcacacccactcccgcagccctccagtgtggctgcaggcggtggtgcagccttccagactgctgcccagttgcctgatgtcagagcccctccacacatgagcctgctccctactgccaacaccgtggcccagacagagacgctttccgaggaagaggtacctgtgaggcgcaggacttgcagactggccaggggctgcagggcctctcggctgatggtgcccagctggttcctgctgaggtccagcagtgctagggaggacagccccgctagagcctggtcctccagcagctcaatgctgttttcttgcaggtgaagctcctgcagtcgctgaagtaaggacagcagatcgtgaggaaaaagggcgccgaggttgggggcatgtctctcttcttaccaagctagactgggttgccttttctaactattccagccctacagggcgaggggccataatggagtatcccgcccctttagaccccaggcgctcaccggcaggtgcaagaaggtgaaatccagcagccgcgccagctggttgcccgccaggtagagcacgcgcagctgggccaggcctacgaaggcgccgctgcgcaagccgcgcagccggttgctagtgagcgccagctccagcaggcgcggctgcgcgcggaaggcgccggcctccagggcgcgcaggctgttgttgtgcaggtagagccggcgcagagcggcgagtggcgccagggctcccggctctaggcgggcgatgttgttgtcctgcaggaacagtgtctgcaggccggggaaagaggaggcgcttaccccgttgcgggggtcttcctctccctgggggcaccccgtcctcccgcagctccacacggtgcccacctgcgtccctggcgggattcccagcgggacgacgcgcaaccgcagggcgccacactccaccgtggcgctgtagcagcggcaggctgctgggcagccggcggcgcggagcggcagtagtagcagcagcagcggcagcagtgcgggggccctcagggccatctcccgaggcccggttcctcaccggcccttccgcggttcagccgcagacgcgtgccctcctgaaacacaggttggcaggccagtctcggcagtcgagagccagccaatagatggaatggaggcctgcacctgcgtctaacttttgacactataaataggttcaagaaactaataaaacgttctggttttctcctttgaaaaaaa

SEQ ID NO: 278659 - DNA, 1574 bp, Homo sapiens
agtccgtgcgcgagggcgccggcgagccgtctcggaagcagcatgcaggcgcgctactccgtgtccgaccccaacgccctgggagtggtgccctacctgagcgagcagaattactaccgggctgcgggcagctacggcggcatggccagccccatgggcgtctattccggccacccggagcagtacagcgcggggatgggccgctcctacgcgccctaccaccaccaccagcccgcggcgcctaaggacctggtgaagccgccctacagctacatcgcgctcatcaccatggccatccagaacgcgcccgagaagaagatcaccttgaacggcatctaccagttcatcatggaccgcttccccttctaccgggagaacaagcagggctggcagaacagcatccgccacaacctctcgctcaacgagtgcttcgtcaaggtgccccgcgacgacaagaagcccggcaagggcagttactggaccctggacccggactcctacaacatgttcgagaacggcagcttcctgcggcgccggcggcgcttcaaaaagaaggacgtgtccaaggagaaggaggagcgggcccacctcaaggagccgcccccggcggcgtccaagggcgccccggccaccccccacctagcggacgcccccaaggaggccgagaagaaggtggtgatcaagagcgaggcggcgtccccggcgctgccggtcatcaccaaggtggagacgctgagccccgagagcgcgctgcagggcagcccgcgcagcgcggcctccacgcccgccggctcccccgacggctcgctgccggagcaccacgccgcggcgcccaacgggctgcctggcttcagcgtggagaacatcatgaccctgcgaacgtcgccgccgggcggagagctgagcccgggggccggacgcgcgggcctggtggtgccgccgctggcgctgccctacgccgccgcgccgcccgccgcctacggccagccgtgcgctcagggcctggaggccggggccgccgggggctaccagtgcagcatgcgagcgatgagcctgtacaccggggccgagcggccggcgcacatgtgcgtcccgcccgccctggacgaggccctctcggaccacccgagcggccccacgtcgcccctgagcgctctcaacctcgccgccggccaggagggcgcgctcgccgccacgggccaccaccaccagcaccacggccaccaccacccgcaggcgccgccgcccccgccggctccccagccccagccgacgccgcagcccggggccgccgcggcgcaggcggcctcctggtatctcaaccacagcggggacctgaaccacctccccggccacacgttcgcggcccagcagcaaactttccccaacgtgcgggagatgttcaactcccaccggctggggattgagaactcgaccctcggggagtcccaggtgagtggcaatgccagctgccagctgccctacagatccacgccgcctctctatcgccacgcagccccctactcctacgactgcacgaaatactgacgtgtcccgggacctcccctccccgg

SEQ ID NO: 278660 - DNA, 680 bp, Homo sapiens
caactgttgggaaagggaaaaaaacagcatcactcagttgaacactttgatacttggtatttgtcaggttaggtactggggatgctaaatgaatgaaattacccatttcataagaggactcaatctagtgaaggagaaaggaaaatggtatagtgtataggtgctatataataaatggaagcacaagttgctttggggacataacgaggcatctgcaccagaatggacaaattggaaaggatttctggagaaatcaccagaaaagtcttaagtggattttccctgtgcacatacaaatggcatggaggtcaggaagaacatagcatgtttaggaatggggataggagtgagttggaaaatagcccacaaagataacgtcacttgccttatgccaggcactaccctaagccccttaatcccttatttaagtgcttccttaatcttcacaactcagtaagatagagactgctgttattcccgttttatagatgaggaaaaagactaaggatcacagttggaaagatactagaggaatataattagaatcttatctaacatttgaactttgtaaaccttagggtctgaggagtattcctcaaaaaatgtttataatgatcagtaagaataattttataccatgattcattaaacaatacataaaacaagttcacaagacaata

SEQ ID NO: 278661 - DNA, 307 bp, Homo sapiens
cttctgtctacatataatacagttgaagacagctcagcttcattatccaagtgcttggggagcagtgcagaggggataaattcccaggtcatcctaggaatggccagtctctaaaataaaaagggaacagagtccataactcttctaagaagaggaagcaaatcaaagcctggaattcaaagctttcttcagcagagtcaacagaccaataaagaaagggagtccctctgcctgtggcattgtccacactcacagggtcccacactcttatttgttcctacagagtaaaacgaggctagaaatacct

SEQ ID NO: 278662 - DNA, 222 bp, Homo sapiens
tggaaaaaaaagtaggacagtgagacaacacagtgagacaacgtcagtcacaatgagctgacctaaagtaggggtcagctgggggaagaatagcacaaatcacattggaatgaaagatatgactacataatgtttattgcgatctattttaaggcttttcatggcttaagttgtaattttgatgtaactaaagtttacattgttttctcaaagaataacgca

SEQ ID NO: 278663 - DNA, 207 bp, Homo sapiens
gatgagtaggattttagtatgaggaacaaaggaagaagagtatttcagccctacaaacagcatgatcaaagatctactccacagctcttctcccttcctggaagagaatgatgctgtgaatgtccaatatccaatgaaatgccagcatatcaaaatggatgctaatagttgaccttcccaaagcctcactgatgctctgctcatctt

SEQ ID NO: 278664 - DNA, 712 bp, Homo sapiens
tggaaaaaaaagtaggacagtgagacaacacagtgagacaacgtcagtcacaatgagctgacctaaagtaggggtcagctgggggaagaatagcacaaatcacattggaatgaaagatatgactacataatgtttattgcgatctattttaaggcttttcatggatcttttcagctatgcacatggttagtcataatgattgtcattttaggtcagagtttctcagccttagcattgttgacattttggttaattctttgttgtaggggctgtcctgtacactgtagggtgtttagcagcatccctgatctctacctactaaatgccaggagcaacacagtacctccagctcagttgtgacaactactgaatgtctccagacaactactgaatgtctccagacattgcagagaaattgagtctggttgagaagtcactgttttagggcataatttttgggtagactgttagattctttgtgttcgttgtctctggcctgtataactcttcttaattatctgctactcaaatgtatttgggatcagccactgtcttccatttctcttttgctcacagatctactccacagctcttctcccttcctggaagagaatgatgctgtgaatgtccaatatccaatgaaatgccagcatatcaaaatggatgctaatagttgaccttcccaaagcctcactgatgctctgctcatctt

SEQ ID NO: 278665 - DNA, 1172 bp, Homo sapiens
gatgagtcatgcctatgcctgggagactggcagggaagttggggaggtacatgaagcataatcagagttaccagtgttcggtgaaccaccgaaccagtgtttgctttcatacgaccgcgtgtcagatcatctactcttccaccagtaaatctattttgctgagggatacacaaaagaagcactgaaaaactatacataagattttctttaggtaattttttattaatatttcaatgttggtagaatactgctacatacccagaattcaggattttctactatattctattctagtacaaaatgagattttttcccctcaaaatcagttcacaataacttctaatacatctgttatgaaaaatgcttaattcttcatataactatgtgtcttatatatagggtgatcgtacaatttattatacaaaatgggacatacctgagagtgaaaggaagcactattaaaaattaaggtgggactacaggcatgaaaccagaactgtcttaggccaactaggacatatgcttatcatctttatatacccggtgacctcctatgtcagcaaataaagaatatatactaatatcaatagatcaccatgctgtactattgagtgagaaaccgtagtagcagaaggaactgtgaggtgggagacagtagtatggggaaagacatgaacaccacagccctgttttctatacaaatatatacatatatgaaatttggggacattagtaaaaggggtctttggccttatccgtaatattttaacattatataagaaaaatacatctatgcattatttgtatagttacttttaaatctaagttacacagaagcactctgaatgtgtagaaataaaagcttgatgattttgggttggctttctagccccacaatttaaaaccaacacacaccgctatgggtgtttatagacatcaaaatttagagcagagaggcatagatgcctacttgttctctagcatggtgtaattgactctgcaatctcaagaaaagaaaaactcattttcagtttagagctcaaaacgtgactgaattgagtaattgaaaaccatggtatcaagcctgtaatcccagcactttgggaggccgaggtgggtggatcacctgagctcaggagttcgataccatcacggctgacatggtgaaaccc

SEQ ID NO: 278666 - DNA, 1304 bp, Homo sapiens
cagatcttttaaaatgtcactttactagaggctcttcttggctaccctatatgaaataaattccttcattttactccattgcacttagacataccatatatttacttcatccatctctaccatacaatataacgtgcttgagggcagggatattttattaacatatatatctctagtacctgaacaaagtgtgaaaaaagtagatggtcaataaaatgctgaatgaccaaatggaacttgttggggactctattaaatacaaatcaattaagctaaattaatgtactttcagtccagagaaaatgttgcaaaaagagttacagaagaaacagaaggcatcatggtacatcccaaccaggagcctgcagtgatagctggacaagggacaattgccctggaagtgctgaaccaggtaaaatagctgagttcttcctgtttagctactggtaaagctgttgggctatattcaattattttatatgtatacattaaatataaaactgcttacagtttatattttcactaaaggttcctttggtggatgcactggtggtacctgtaggtggaggaggaatgcttgctggaatagcaattacagttaaggtgagcagcttctggaggattccctgcttcaagcagaggatttactttacatcctaaatgttctgtatacacgtgctcaacattctgcacacattaccattccttccccttattcctttgggacttgagatgaaggcccatctctgcctcactactctatttactattattattattttttgagacagattctcgctgttgcccaggctggagtgcagtggcacgatcctggcccactgcagcctccacctcccgggttcaagcgattctcctgtctcagcctcctgagtagctgggattacaggcatgagccaccacaccccgctaatttttttgtattttttttagtagagacagggtttcaccatgttggtcaggctggtcttgaactcctgaccttgcgatccacccgccttggcctcccaaagtgttgggattacaggcgtgagccactgcgcccggcctatttattatttctaatatttttattttttttaagagatggggtcttgctgtgttggccaggttggtctggaactcctgggctcaagcagtccttactttggcctcccaaagtgctaggattacaggtgtgagccaccgcacccagccaactctcttcttaatccatgacaattttacagcacaaaagcagttacaagtgacaccatcatagtcttttccctgaattccatgtcatc

SEQ ID NO: 278667 - DNA, 2760 bp, Homo sapiens
ccgacgcggagatccgcacacgctccagcccttccgccatcttcgcggctgctgctacagccgtagcggctccgccaccgccgcgcgcagccaggaaaccaccacagacgggcggcgcgcgcgctcgcccacctcccggcctttccccgccccctgccgccctccctttccgaacgacggtggccgcgctgggaggaaaagcgcccgccgccggttccagaggggcgggaccggagcgagagcctgggtggggcgggcgggcgctgcgcgtgcgcagaggtgcggccggggaggcgcgcggaggctggagctggaggcgcggcgccggtgagctgagaaccatgtgtgctcagtattgcatctcctttgctgatgttgaaaaagctcatatcaacattcgagattctatccacctcacaccagtgctaacaagctccattttgaatcaactaacagggcgcaatcttttcttcaaatgtgaactcttccagaaaacaggatcttttaagattcgtggtgctctcaatgccgtcagaagcttggttcctgatgctttagaaaggaagccgaaagctgttgttactcacagcagtggaaaccatggccaggctctcacctatgctgccaaattggaaggaattcctgcttatattgtggtgccccagacagctccagactgtaaaaaacttgcaatacaagcctacggagcgtcaattgtatactgtgaacctagtgatgagtccagagaaaatgttgcaaaaagagttacagaagaaacagaaggcatcatggtacatcccaaccaggagcctgcagtgatagctggacaagggacaattgccctggaagtgctgaaccaggttcctttggtggatgcactggtggtacctgtaggtggaggaggaatgcttgctggaatagcaattacagttaaggctctgaaacctagtgtgaaggtatatgctgctgaaccctcaaatgcagatgactgctaccagtccaagctgaaggggaaactgatgcccaatctttatcctccagaaaccatagcagatggtgtcaaatccagcattggcttgaacacctggcctattatcagggaccttgtggatgatatcttcactgtcacagaggatgaaattaagtgtgcaacccagctggtgtgggagaggatgaaactactcattgaacctacagctggtgttggagtggctgctgtgctgtctcaacattttcaaactgtttccccagaagtaaagaacatttgtattgtgctcagtggtggaaatgtagacttaacctcctccataacttgggtgaagcaggctgaaaggccagcttcttatcagtctgtttctgtttaatttacagaaaaggaaatggtgggaattcagtgtctttagatactgaagacattttgtttcctagtattgtcaactcttagttatcagattcttaatggagagtggctatttcattaagatttaatagttttttttggactaagtagtggaaaaacttttatacttaactgagacattttgtcaaggctaaaaaaaagtcttgcaaaatggggcagtggactgacaggctgacatagaaaataaactttgcccaatcacaacttgtgcctcccatccctggagtactgactggcaccggtaagacagaatctctctgaatccattactccatgcccccttgaggcactgttgaagaaatctcacttttcagccagggtactggttctggtacatatggatcataagtccatttggggaagactcgtttatacaggttcatcagtactgtgtcttgagattttagcttcccatcaaagctgcatttcatgtggccatgggtacctagaaagacatcagaacaagtcggtcaaattaaaagtagaaaattttaaagcaatgacttccaacccaacagtcatttagcaacactgcagaaatgcagacatggtctcaaatcccgtgtttccttacctaaaggttccttgatatgtcctctccggccccacttcgttctcagttccactggtttaaaccacagcacatcctcttagaatcaaacacattaaagaccaagatgaaacatttacccacaaaatgtaaacccaacctttataccacaaaggcaatcagatcccatcctcctccttcatacccacctctgttgaagaacatgtaacgtactactgccatcttagtaaaaattttgaaaggatgaccactcagaacaactctcttgatgaccattctgtctggatctactgacataagatggcctgtagcaatgaggctgtgcattcctaaaggacaaaagcaaagaagctatttaggaatttacaggccaaagtcttcatttattgcccagtccatttaaagacccatgcaagagcctggtttgtcatccctgccctagcccaatctgaggctaagattggtaaactgtaagcccacacttaaccttgtcaataggttcttgaaaacttgtacttcaagagaaatgatgtataacaaaaccatactttttctcatcagttgttacaaggaaaggatgttgaacaaaaggcagttatttgaggactggctatacactgtttcacgtaaaagttggagttttcattgttctattaacaatgttaaatgaagacttactgtattttgaaaaccatcattaccttctccataccatttggctcccaaatttaaataaacaagagaaaacggtgttcatctaaaaaggacc

SEQ ID NO: 278668 - DNA, 2876 bp, Homo sapiens
ccgacgcggagatccgcacacgctccagcccttccgccatcttcgcggctgctgctacagccgtagcggctccgccaccgccgcgcgcagccaggaaaccaccacagacgggcggcgcgcgcgctcgcccacctcccggcctttccccgccccctgccgccctccctttccgaacgacggtggccgcgctgggaggaaaagcgcccgccgccggttccagaggggcgggaccggagcgagagcctgggtggggcgggcgggcgctgcgcgtgcgcagaggtgcggccggggaggcgcgcggaggctggagctggaggcgcggcgccggtgagctgagaaccatgtgtgctcagtattgcatctcctttgctgatgttgaaaaagctcatatcaacattcgagattctatccacctcacaccagtgctaacaagctccattttgaatcaactaacagggcgcaatcttttcttcaaatgtgaactcttccagaaaacaggatcttttaagattcgtggtgctctcaatgccgtcagaagcttggttcctgatgctttagaaaggaagccgaaagctgttgttactcacagcagtggaaaccatggccaggctctcacctatgctgccaaattggaaggaattcctgcttatattgtggtgccccagacagctccagactgtaaaaaacttgcaatacaagcctacggagcgtcaattgtatactgtgaacctagtgatgagtccagagaaaatgttgcaaaaagagttacagaagaaacagaaggcatcatggtacatcccaaccaggagcctgcagtgatagctggacaagggacaattgccctggaagtgctgaaccaggtaaaatagctgagttcttcctgtttagctactggtaaagctgttgggctatattcaattattttatatgtatacattaaatataaaactgcttacagtttatattttcactaaaggttcctttggtggatgcactggtggtacctgtaggtggaggaggaatgcttgctggaatagcaattacagttaaggctctgaaacctagtgtgaaggtatatgctgctgaaccctcaaatgcagatgactgctaccagtccaagctgaaggggaaactgatgcccaatctttatcctccagaaaccatagcagatggtgtcaaatccagcattggcttgaacacctggcctattatcagggaccttgtggatgatatcttcactgtcacagaggatgaaattaagtgtgcaacccagctggtgtgggagaggatgaaactactcattgaacctacagctggtgttggagtggctgctgtgctgtctcaacattttcaaactgtttccccagaagtaaagaacatttgtattgtgctcagtggtggaaatgtagacttaacctcctccataacttgggtgaagcaggctgaaaggccagcttcttatcagtctgtttctgtttaatttacagaaaaggaaatggtgggaattcagtgtctttagatactgaagacattttgtttcctagtattgtcaactcttagttatcagattcttaatggagagtggctatttcattaagatttaatagttttttttggactaagtagtggaaaaacttttatacttaactgagacattttgtcaaggctaaaaaaaagtcttgcaaaatggggcagtggactgacaggctgacatagaaaataaactttgcccaatcacaacttgtgcctcccatccctggagtactgactggcaccggtaagacagaatctctctgaatccattactccatgcccccttgaggcactgttgaagaaatctcacttttcagccagggtactggttctggtacatatggatcataagtccatttggggaagactcgtttatacaggttcatcagtactgtgtcttgagattttagcttcccatcaaagctgcatttcatgtggccatgggtacctagaaagacatcagaacaagtcggtcaaattaaaagtagaaaattttaaagcaatgacttccaacccaacagtcatttagcaacactgcagaaatgcagacatggtctcaaatcccgtgtttccttacctaaaggttccttgatatgtcctctccggccccacttcgttctcagttccactggtttaaaccacagcacatcctcttagaatcaaacacattaaagaccaagatgaaacatttacccacaaaatgtaaacccaacctttataccacaaaggcaatcagatcccatcctcctccttcatacccacctctgttgaagaacatgtaacgtactactgccatcttagtaaaaattttgaaaggatgaccactcagaacaactctcttgatgaccattctgtctggatctactgacataagatggcctgtagcaatgaggctgtgcattcctaaaggacaaaagcaaagaagctatttaggaatttacaggccaaagtcttcatttattgcccagtccatttaaagacccatgcaagagcctggtttgtcatccctgccctagcccaatctgaggctaagattggtaaactgtaagcccacacttaaccttgtcaataggttcttgaaaacttgtacttcaagagaaatgatgtataacaaaaccatactttttctcatcagttgttacaaggaaaggatgttgaacaaaaggcagttatttgaggactggctatacactgtttcacgtaaaagttggagttttcattgttctattaacaatgttaaatgaagacttactgtattttgaaaaccatcattaccttctccataccatttggctcccaaatttaaataaacaagagaaaacggtgttcatctaaaaaggacc

SEQ ID NO: 278669 - DNA, 2428 bp, Homo sapiens
cagatcttttaaaatgtcactttactagaggctcttcttggctaccctatatgaaataaattccttcattttactccattgcacttagacataccatatatttacttcatccatctctaccatacaatataacgtgcttgagggcagggatattttattaacatatatatctctagtacctgaacaaagtgtgaaaaaagtagatggtcaataaaatgctgaatgaccaaatggaacttgttggggactctattaaatacaaatcaattaagctaaattaatgtactttcagtccagagaaaatgttgcaaaaagagttacagaagaaacagaaggcatcatggtacatcccaaccaggagcctgcagtgatagctggacaagggacaattgccctggaagtgctgaaccaggtaaaatagctgagttcttcctgtttagctactggtaaagctgttgggctatattcaattattttatatgtatacattaaatataaaactgcttacagtttatattttcactaaaggttcctttggtggatgcactggtggtacctgtaggtggaggaggaatgcttgctggaatagcaattacagttaaggctctgaaacctagtgtgaaggtatatgctgctgaaccctcaaatgcagatgactgctaccagtccaagctgaaggggaaactgatgcccaatctttatcctccagaaaccatagcagatggtgtcaaatccagcattggcttgaacacctggcctattatcagggaccttgtggatgatatcttcactgtcacagaggatgaaattaagtgtgcaacccagctggtgtgggagaggatgaaactactcattgaacctacagctggtgttggagtggctgctgtgctgtctcaacattttcaaactgtttccccagaagtaaagaacatttgtattgtgctcagtggtggaaatgtagacttaacctcctccataacttgggtgaagcaggctgaaaggccagcttcttatcagtctgtttctgtttaatttacagaaaaggaaatggtgggaattcagtgtctttagatactgaagacattttgtttcctagtattgtcaactcttagttatcagattcttaatggagagtggctatttcattaagatttaatagttttttttggactaagtagtggaaaaacttttatacttaactgagacattttgtcaaggctaaaaaaaagtcttgcaaaatggggcagtggactgacaggctgacatagaaaataaactttgcccaatcacaacttgtgcctcccatccctggagtactgactggcaccggtaagacagaatctctctgaatccattactccatgcccccttgaggcactgttgaagaaatctcacttttcagccagggtactggttctggtacatatggatcataagtccatttggggaagactcgtttatacaggttcatcagtactgtgtcttgagattttagcttcccatcaaagctgcatttcatgtggccatgggtacctagaaagacatcagaacaagtcggtcaaattaaaagtagaaaattttaaagcaatgacttccaacccaacagtcatttagcaacactgcagaaatgcagacatggtctcaaatcccgtgtttccttacctaaaggttccttgatatgtcctctccggccccacttcgttctcagttccactggtttaaaccacagcacatcctcttagaatcaaacacattaaagaccaagatgaaacatttacccacaaaatgtaaacccaacctttataccacaaaggcaatcagatcccatcctcctccttcatacccacctctgttgaagaacatgtaacgtactactgccatcttagtaaaaattttgaaaggatgaccactcagaacaactctcttgatgaccattctgtctggatctactgacataagatggcctgtagcaatgaggctgtgcattcctaaaggacaaaagcaaagaagctatttaggaatttacaggccaaagtcttcatttattgcccagtccatttaaagacccatgcaagagcctggtttgtcatccctgccctagcccaatctgaggctaagattggtaaactgtaagcccacacttaaccttgtcaataggttcttgaaaacttgtacttcaagagaaatgatgtataacaaaaccatactttttctcatcagttgttacaaggaaaggatgttgaacaaaaggcagttatttgaggactggctatacactgtttcacgtaaaagttggagttttcattgttctattaacaatgttaaatgaagacttactgtattttgaaaaccatcattaccttctccataccatttggctcccaaatttaaataaacaagagaaaacggtgttcatctaaaaaggacc

SEQ ID NO: 278670 - DNA, 1752 bp, Homo sapiens
ccgacgcggagatccgcacacgctccagcccttccgccatcttcgcggctgctgctacagccgtagcggctccgccaccgccgcgcgcagccaggaaaccaccacagacgggcggcgcgcgcgctcgcccacctcccggcctttccccgccccctgccgccctccctttccgaacgacggtggccgcgctgggaggaaaagcgcccgccgccggttccagaggggcgggaccggagcgagagcctgggtggggcgggcgggcgctgcgcgtgcgcagaggtgcggccggggaggcgcgcggaggctggagctggaggcgcggcgccggtgagctgagaaccatgtgtgctcagtattgcatctcctttgctgatgttgaaaaagctcatatcaacattcgagattctatccacctcacaccagtgctaacaagctccattttgaatcaactaacagggcgcaatcttttcttcaaatgtgaactcttccagaaaacaggatcttttaagattcgtggtgctctcaatgccgtcagaagcttggttcctgatgctttagaaaggaagccgaaagctgttgttactcacagcagtggaaaccatggccaggctctcacctatgctgccaaattggaaggaattcctgcttatattgtggtgccccagacagctccagactgtaaaaaacttgcaatacaagcctacggagcgtcaattgtatactgtgaacctagtgatgagtccagagaaaatgttgcaaaaagagttacagaagaaacagaaggcatcatggtacatcccaaccaggagcctgcagtgatagctggacaagggacaattgccctggaagtgctgaaccaggtaaaatagctgagttcttcctgtttagctactggtaaagctgttgggctatattcaattattttatatgtatacattaaatataaaactgcttacagtttatattttcactaaaggttcctttggtggatgcactggtggtacctgtaggtggaggaggaatgcttgctggaatagcaattacagttaaggtgagcagcttctggaggattccctgcttcaagcagaggatttactttacatcctaaatgttctgtatacacgtgctcaacattctgcacacattaccattccttccccttattcctttgggacttgagatgaaggcccatctctgcctcactactctatttactattattattattttttgagacagattctcgctgttgcccaggctggagtgcagtggcacgatcctggcccactgcagcctccacctcccgggttcaagcgattctcctgtctcagcctcctgagtagctgggattacaggcatgagccaccacaccccgctaatttttttgtattttttttagtagagacagggtttcaccatgttggtcaggctggtcttgaactcctgaccttgcgatccacccgccttggcctcccaaagtgttgggattacaggcgtgagccactgcgcccggcctatttattatttctaatatttttattttttttaagagatggggtcttgctgtgttggccaggttggtctggaactcctgggctcaagcagtccttactttggcctcccaaagtgctaggattacaggtgtgagccaccgcacccagccaactctcttcttaatccatgacaattttacagcacaaaagcagttacaagtgacaccatcatagtcttttccctgaattccatgtcatc

SEQ ID NO: 278671 - DNA, 2705 bp, Homo sapiens
ccgacgcggagatccgcacacgctccagcccttccgccatcttcgcggctgctgctacagccgtagcggctccgccaccgccgcgcgcagccaggaaaccaccacagacgggcggcgcgcgcgctcgcccacctcccggcctttccccgccccctgccgccctccctttccgaacgacggtggccgcgctgggaggaaaagcgcccgccgccggttccagaggggcgggaccggagcgagagcctgggtggggcgggcgggcgctgcgcgtgcgcagaggtgcggccggggaggcgcgcggaggctggagctggaggcgcggcgccggtgagctgagaaccatgtgtgctcagtattgcatctcctttgctgatgttgaaaaagctcatatcaacattcgagattctatccacctcacaccagtgctaacaagctccattttgaatcaactaacagggcgcaatcttttcttcaaatgtgaactcttccagaaaacaggatcttttaagattcgtggtgctctcaatgccgtcagaagcttggttcctgatgctttagaaaggaagccgaaagctgttgttactcacagcagtggaaaccatggccaggctctcacctatgctgccaaattggaaggaattcctgcttatattgtggtgccccagacagctccagactgtaaaaaacttgcaatacaagcctacggagcgtcaattgtatactgtgaacctagtgatgagatcccaaccaggagcctgcagtgatagctggacaagggacaattgccctggaagtgctgaaccaggttcctttggtggatgcactggtggtacctgtaggtggaggaggaatgcttgctggaatagcaattacagttaaggctctgaaacctagtgtgaaggtatatgctgctgaaccctcaaatgcagatgactgctaccagtccaagctgaaggggaaactgatgcccaatctttatcctccagaaaccatagcagatggtgtcaaatccagcattggcttgaacacctggcctattatcagggaccttgtggatgatatcttcactgtcacagaggatgaaattaagtgtgcaacccagctggtgtgggagaggatgaaactactcattgaacctacagctggtgttggagtggctgctgtgctgtctcaacattttcaaactgtttccccagaagtaaagaacatttgtattgtgctcagtggtggaaatgtagacttaacctcctccataacttgggtgaagcaggctgaaaggccagcttcttatcagtctgtttctgtttaatttacagaaaaggaaatggtgggaattcagtgtctttagatactgaagacattttgtttcctagtattgtcaactcttagttatcagattcttaatggagagtggctatttcattaagatttaatagttttttttggactaagtagtggaaaaacttttatacttaactgagacattttgtcaaggctaaaaaaaagtcttgcaaaatggggcagtggactgacaggctgacatagaaaataaactttgcccaatcacaacttgtgcctcccatccctggagtactgactggcaccggtaagacagaatctctctgaatccattactccatgcccccttgaggcactgttgaagaaatctcacttttcagccagggtactggttctggtacatatggatcataagtccatttggggaagactcgtttatacaggttcatcagtactgtgtcttgagattttagcttcccatcaaagctgcatttcatgtggccatgggtacctagaaagacatcagaacaagtcggtcaaattaaaagtagaaaattttaaagcaatgacttccaacccaacagtcatttagcaacactgcagaaatgcagacatggtctcaaatcccgtgtttccttacctaaaggttccttgatatgtcctctccggccccacttcgttctcagttccactggtttaaaccacagcacatcctcttagaatcaaacacattaaagaccaagatgaaacatttacccacaaaatgtaaacccaacctttataccacaaaggcaatcagatcccatcctcctccttcatacccacctctgttgaagaacatgtaacgtactactgccatcttagtaaaaattttgaaaggatgaccactcagaacaactctcttgatgaccattctgtctggatctactgacataagatggcctgtagcaatgaggctgtgcattcctaaaggacaaaagcaaagaagctatttaggaatttacaggccaaagtcttcatttattgcccagtccatttaaagacccatgcaagagcctggtttgtcatccctgccctagcccaatctgaggctaagattggtaaactgtaagcccacacttaaccttgtcaataggttcttgaaaacttgtacttcaagagaaatgatgtataacaaaaccatactttttctcatcagttgttacaaggaaaggatgttgaacaaaaggcagttatttgaggactggctatacactgtttcacgtaaaagttggagttttcattgttctattaacaatgttaaatgaagacttactgtattttgaaaaccatcattaccttctccataccatttggctcccaaatttaaataaacaagagaaaacggtgttcatctaaaaaggacc

SEQ ID NO: 278672 - DNA, 1712 bp, Homo sapiens
cgcggaggggcccggcgctagtagcccgcagacagcgcggcggcccccagcgggagaggcagcctggcggccaggacagcgcggccgggcgcctccgcgcggtgctctgggagttgtaggcacttgcctctcctctctccttcagctactggctctcgaaactcaaggacctaccggtgggtgggcgcctgtgactcccaggctgcgaacgccgggaactcagtttcttcagaaatgctcgaaccaggacggctcctggagtcctcgcgccctcgcagaaggactacgggccccggcgaccccgggggcggggcttccggcgcgctgccttgtgggcacggtagttccgccgggtctggcttccgcctgccgagcggccccggaccgcaggccggactacacttcccgtcggcccgcctgctctcccgatgccgccttggcgcgagacgttggcaagcagagtgtctccaagatggccgcttggggaaggaggcgtcttggcccgggcagcagtggcggcagcgcccgagagagggaaccaacagtgtttgtaatgaagaacatcagactctgagctgtaacctgaattcttgtccaaaattcagcacactggcaacgagcacatcaaacagattgccacttgtcctgtcggcgtctttgagacacacttgcccatctaggaaagcacagtgcaggtatctgtgttctgccaccgtgtgccagcccggaccagctcacagacagccctgcctgtcttacttgggctgctcggcttcactgtctcagggcccctgaacctcccagagccctccgtgattgttggaatggtgagcttgtcggccacagactgctacattgtgcatgagatctacaatggggagaatgcccaagaccagtttgagtacgagctggagcaggccctggaagcccagtacaagtacattgtgattgagcccactcgcattggcgacgagacagcccgctggatcaccgtgggcaactgcctgcacaagacggccgtgctggcgggcaccgcctgcctcttcaccccgttggcgctgcccttagattattcccactacatttccctgcccgctggtgtgctgagcctggcctgctgcaccctctatgggatctcctggcagtttgacccttgctgcaagtaccaagtggagtacgacgcctataaactgtcgcgcctgcctctgcacacactcacctcctccaccccggtggtgctggtccggaaggacgacctgcacagaaagagactgcacaacacgatagcactggccgccctggtgtactgtgtaaagaagatttacgaactctatgccgtatgatttcagtagaacagggagcgaagcaaaaccacccggcccacaagagacaacagagtattcagatcgccacactctgtgaggcagcagagcctgggcaggtgtttggcttagtatttgttatttttaaaaaataacagatcacgggtgtacccagggtttttcagctcattacactaagatgtggatttccataacccaagaggggggtctgaggctgtggaagtccgactgggcagtggaatgctgatggaggcagacgctgccgagggggtgtggacgtgctttgggggaggtctttaagtctattgtttaactgtaccatccagagcccaccagaagctattgatcattaaaattatgagaatttca

SEQ ID NO: 278673 - DNA, 944 bp, Homo sapiens
cgtgagtgcgtctatgtgcccaggggcagcacgtggctgtgcagctgccctgagagagggtgagcttgtcggccacagactgctacattgtgcatgagatctacaatggggagaatgcccaagaccagtttgagtacgagctggagcaggccctggaagcccagtacaagtacattgtgattgagcccactcgcattggcgacgagacagcccgctggatcaccgtgggcaactgcctgcacaagacggccgtgctggcgggcaccgcctgcctcttcaccccgttggcgctgcccttagattattcccactacatttccctgcccgctggtgtgctgagcctggcctgctgcaccctctatgggatctcctggcagtttgacccttgctgcaagtaccaagtggagtacgacgcctataaactgtcgcgcctgcctctgcacacactcacctcctccaccccggtggtgctggtccggaaggacgacctgcacagaaagagactgcacaacacgatagcactggccgccctggtgtactgtgtaaagaagatttacgaactctatgccgtatgatttcagtagaacagggagcgaagcaaaaccacccggcccacaagagacaacagagtattcagatcgccacactctgtgaggcagcagagcctgggcaggtgtttggcttagtatttgttatttttaaaaaataacagatcacgggtgtacccagggtttttcagctcattacactaagatgtggatttccataacccaagaggggggtctgaggctgtggaagtccgactgggcagtggaatgctgatggaggcagacgctgccgagggggtgtggacgtgctttgggggaggtctttaagtctattgtttaactgtaccatccagagcccaccagaagctattgatcattaaaattatgagaatttca

SEQ ID NO: 278674 - DNA, 1705 bp, Homo sapiens
cgcggaggggcccggcgctagtagcccgcagacagcgcggcggcccccagcgggagaggcagcctggcggccaggacagcgcggccgggcgcctccgcgcggtgctctgggagttgtaggcacttgcctctcctctctccttcagctactggctctcgaaactcaaggacctaccggtgggtgggcgcctgtgactcccaggctgcgaacgccgggaactcagtttcttcagaaatgctcgaaccaggacggctcctggagtcctcgcgccctcgcagaaggactacgggccccggcgaccccgggggcggggcttccggcgcgctgccttgtgggcacggtagttccgccgggtctggcttccgcctgccgagcggccccggaccgcaggccggactacacttcccgtcggcccgcctgctctcccgatgccgccttggcgcgagacgttggcaagcagagtgtctccaagatggccgcttggggaaggaggcgtcttggcccgggcagcagtggcggcagcgcccgagagagggaaccaacagtgtttgtaatgaagaacatcagactctgagctgtaacctgaattcttgtccaaaattcagcacactggcaacgagcacatcaaacagattgccacttgtcctgtcggcgtctttgagacacacttgcccatctaggaaagcacagtgcaggtatctgtgttctgccaccgtgtgccagcccggaccagctcacagacagccctgcctgtcttacttgggctgctcggcttcactgtctcagggcccctgaacctcccagagccctccgtgattgttggaatggtgagcttgtcggccacagactgctacattgtgcatgagatctacaatggggagaatgcccaagaccagtttgagtacgagctggagcaggccctggaagcccagtacaagtacattgtgattgagcccactcgcattggcgacgagacagcccgctggatcaccgtgggcaactgcctgcacaagacggccgtgctggcgggcaccgcctgcctcttcaccccgttggcgctgcccttagattattcccactacatttccctgcccgctggtgtgctgagcctggcctgctgcaccctctatgggatctcctggcagtttgacccttgctgcaagtaccaagtggagtacgacgcctataaactgtcgcgcctgcctctgcacacactcaactctgtgaggcagcagagcctgggcaggtgtttggcttagtatttgttatttttaaaaaataacagatcacgggtgtacccagggtttttcagctcattacactaagatgtggatttccataacccaagaggggggtctgaggctgtggaagtccgactgggcagtggaatgctgatggaggcagacgctgccgagggggtgtggacgtgctttgggggaggtctttaagtctattgtttaactgtaccatccagagcccaccagaagctattgatcattaaaattatgagaatttcaactcccgctgttctctctttccatgactgcccgcagctgctgctgcacatctgctctgggtggcggcttgcacatggaaggagcaggtgccatggtagccaccctgccctgctcctagctgcggcccagtgttaccacttacagcgacgacaagcctagatccaaggtagtcctggggccaaaccccg

SEQ ID NO: 278675 - DNA, 1420 bp, Homo sapiens
cgcggaggggcccggcgctagtagcccgcagacagcgcggcggcccccagcgggagaggcagcctggcggccaggacagcgcggccgggcgcctccgcgcggtgctctgggagttgtaggcacttgcctctcctctctccttcagctactggctctcgaaactcaaggacctaccggtgggtgggcgcctgtgactcccaggctgcgaacgccgggaactcagtttcttcagaaatgctcgaaccaggacggctcctggagtcctcgcgccctcgcagaaggactacgggccccggcgaccccgggggcggggcttccggcgcgctgccttgtgggcacggtagttccgccgggtctggcttccgcctgccgagcggccccggaccgcaggccggactacacttcccgtcggcccgcctgctctcccgatgccgccttggcgcgagacgttggcaagcagagtgtctccaagatggccgcttggggaaggaggcgtcttggcccgggcagcagtggcggcagcgcccgagagagggtgagcttgtcggccacagactgctacattgtgcatgagatctacaatggggagaatgcccaagaccagtttgagtacgagctggagcaggccctggaagcccagtacaagtacattgtgattgagcccactcgcattggcgacgagacagcccgctggatcaccgtgggcaactgcctgcacaagacggccgtgctggcgggcaccgcctgcctcttcaccccgttggcgctgcccttagattattcccactacatttccctgcccgctggtgtgctgagcctggcctgctgcaccctctatgggatctcctggcagtttgacccttgctgcaagtaccaagtggagtacgacgcctataaactgtcgcgcctgcctctgcacacactcacctcctccaccccggtggtgctggtccggaaggacgacctgcacagaaagagactgcacaacacgatagcactggccgccctggtgtactgtgtaaagaagatttacgaactctatgccgtatgatttcagtagaacagggagcgaagcaaaaccacccggcccacaagagacaacagagtattcagatcgccacactctgtgaggcagcagagcctgggcaggtgtttggcttagtatttgttatttttaaaaaataacagatcacgggtgtacccagggtttttcagctcattacactaagatgtggatttccataacccaagaggggggtctgaggctgtggaagtccgactgggcagtggaatgctgatggaggcagacgctgccgagggggtgtggacgtgctttgggggaggtctttaagtctattgtttaactgtaccatccagagcccaccagaagctattgatcattaaaattatgagaatttca

SEQ ID NO: 278676 - DNA, 1608 bp, Homo sapiens
cgcggaggggcccggcgctagtagcccgcagacagcgcggcggcccccagcgggagaggcagcctggcggccaggacagcgcggccgggcgcctccgcgcggtgctctgggagttgtaggcacttgcctctcctctctccttcagctactggctctcgaaactcaaggacctaccggtgggtgggcgcctgtgactcccaggctgcgaacgccgggaactcagtttcttcagaaatgctcgaaccaggacggctcctggagtcctcgcgccctcgcagaaggactacgggccccggcgaccccgggggcggggcttccggcgcgctgccttgtgggcacggtagttccgccgggtctggcttccgcctgccgagcggccccggaccgcaggccggactacacttcccgtcggcccgcctgctctcccgatgccgccttggcgcgagacgttggcaagcagagtgtctccaagatggccgcttggggaaggaggcgtcttggcccgggcagcagtggcggcagcgcccgagagagggtgagcttgtcggccacagactgctacattgtgcatgagatctacaatggggagaatgcccaagaccagtttgagtacgagctggagcaggccctggaagcccagtacaagtacattgtgattgagcccactcgcattggcgacgagacagcccgctggatcaccgtgggcaactgcctgcacaagacggccgtgctggcgggcaccgcctgcctcttcaccccgttggcgctgcccttagattattcccactacatttccctgcccgctggtgtgctgagcctggcctgctgcaccctctatgggatctcctggcagtttgacccttgctgcaagtaccaagtggagtacgacgcctataaactgtcgcgcctgcctctgcacacactcacctcctccaccccggtggtgctggtccggaaggacgacctgcacagaaagagactgcacaacacgatagcactggccgccctggtgtactgtgtaaagaagatttacgaactctatgccgtatgatttcagtagaacagggagcgaagcaaaaccacccggcccacaagagacaacagagtattcagatcgccacactctgtgaggcagcagagcctgggcaggtgtttggcttagtatttgttatttttaaaaaataacagatcacgggtgtacccagggtttttcagctcattacactaagatgtggatttccataacccaagaggggggtctgaggctgtggaagtccgactgggcagtggaatgctgatggaggcagacgctgccgagggggtgtggacgtgctttgggggaggtctttaagtctattgtttaactgtaccatccagagcccaccagaagctattgatcattaaaattatgagaatttcaactcccgctgttctctctttccatgactgcccgcagctgctgctgcacatctgctctgggtggcggcttgcacatggaaggagcaggtgccatggtagccaccctgccctgctcctagctgcggcccagtgttaccacttacagcgacgacaagcctagatccaaggtagtcctggggccaaaccccg

SEQ ID NO: 278677 - DNA, 1860 bp, Homo sapiens
cgcggaggggcccggcgctagtagcccgcagacagcgcggcggcccccagcgggagaggcagcctggcggccaggacagcgcggccgggcgcctccgcgcggtgctctgggagttgtaggcacttgcctctcctctctccttcagctactggctctcgaaactcaaggacctaccggtgggtgggcgcctgtgactcccaggctgcgaacgccgggaactcagtttcttcagaaatgctcgaaccaggacggctcctggagtcctcgcgccctcgcagaaggactacgggccccggcgaccccgggggcggggcttccggcgcgctgccttgtgggcacggtagttccgccgggtctggcttccgcctgccgagcggccccggaccgcaggccggactacacttcccgtcggcccgcctgctctcccgatgccgccttggcgcgagacgttggcaagcagagtgtctccaagatggccgcttggggaaggaggcgtcttggcccgggcagcagtggcggcagcgcccgagagagggaaccaacagtgtttgtaatgaagaacatcagactctgagctgtaacctgaattcttgtccaaaattcagcacactggcaacgagcacatcaaacagattgccacttgtcctgtcggcgtctttgagacacacttgcccatctaggaaagcacagtgcaggtatctgtgttctgccaccgtgtgccagcccggaccagctcacagacagccctgcctgtcttacttgggctgctcggcttcactgtctcagggcccctgaacctcccagagccctccgtgattgttggaatgactacaggtacacaccagcatgacacctcagccatgagaagctgcccgcgtccagacttctgcctttcatggacaccgagaaggttctggagcaggaagtgagccacctcccgctcttcttggcagtggaaggaggccctcccacggggtgagcttgtcggccacagactgctacattgtgcatgagatctacaatggggagaatgcccaagaccagtttgagtacgagctggagcaggccctggaagcccagtacaagtacattgtgattgagcccactcgcattggcgacgagacagcccgctggatcaccgtgggcaactgcctgcacaagacggccgtgctggcgggcaccgcctgcctcttcaccccgttggcgctgcccttagattattcccactacatttccctgcccgctggtgtgctgagcctggcctgctgcaccctctatgggatctcctggcagtttgacccttgctgcaagtaccaagtggagtacgacgcctataaactgtcgcgcctgcctctgcacacactcacctcctccaccccggtggtgctggtccggaaggacgacctgcacagaaagagactgcacaacacgatagcactggccgccctggtgtactgtgtaaagaagatttacgaactctatgccgtatgatttcagtagaacagggagcgaagcaaaaccacccggcccacaagagacaacagagtattcagatcgccacactctgtgaggcagcagagcctgggcaggtgtttggcttagtatttgttatttttaaaaaataacagatcacgggtgtacccagggtttttcagctcattacactaagatgtggatttccataacccaagaggggggtctgaggctgtggaagtccgactgggcagtggaatgctgatggaggcagacgctgccgagggggtgtggacgtgctttgggggaggtctttaagtctattgtttaactgtaccatccagagcccaccagaagctattgatcattaaaattatgagaatttca

SEQ ID NO: 278678 - DNA, 918 bp, Homo sapiens
  misc_feature (7)..(7): n is a, c, g, or t
gaaattntcataattttaatggtcaatagcttggtgagcttgtcggccacagactgctacattgtgcatgagatctacaatggggagaatgcccaagaccagtttgagtacgagctggagcaggccctggaagcccagtacaagtacattgtgattgagcccactcgcattggcgacgagacagcccgctggatcaccgtgggcaactgcctgcacaagacggccgtgctggcgggcaccgcctgcctcttcaccccgttggcgctgcccttagattattcccactacatttccctgcccgctggtgtgctgagcctggcctgctgcaccctctatgggatctcctggcagtttgacccttgctgcaagtaccaagtggagtacgacgcctataaactgtcgcgcctgcctctgcacacactcacctcctccaccccggtggtgctggtccggaaggacgacctgcacagaaagagactgcacaacacgatagcactggccgccctggtgtactgtgtaaagaagatttacgaactctatgccgtatgatttcagtagaacagggagcgaagcaaaaccacccggcccacaagagacaacagagtattcagatcgccacactctgtgaggcagcagagcctgggcaggtgtttggcttagtatttgttatttttaaaaaataacagatcacgggtgtacccagggtttttcagctcattacactaagatgtggatttccataacccaagaggggggtctgaggctgtggaagtccgactgggcagtggaatgctgatggaggcagacgctgccgagggggtgtggacgtgctttgggggaggtctttaagtctattgtttaactgtaccatccagagcccaccagaagctattgatcattaaaattatgagaatttca

SEQ ID NO: 278679 - DNA, 1558 bp, Homo sapiens
cgcggaggggcccggcgctagtagcccgcagacagcgcggcggcccccagcgggagaggcagcctggcggccaggacagcgcggccgggcgcctccgcgcggtgctctgggagttgtaggcacttgcctctcctctctccttcagctactggctctcgaaactcaaggacctaccggtgggtgggcgcctgtgactcccaggctgcgaacgccgggaactcagtttcttcagaaatgctcgaaccaggacggctcctggagtcctcgcgccctcgcagaaggactacgggccccggcgaccccgggggcggggcttccggcgcgctgccttgtgggcacggtagttccgccgggtctggcttccgcctgccgagcggccccggaccgcaggccggactacacttcccgtcggcccgcctgctctcccgatgccgccttggcgcgagacgttggcaagcagagtgtctccaagatggccgcttggggaaggaggcgtcttggcccgggcagcagtggcggcagcgcccgagagagggaaccaacagtgtttgtaatgaagaacatcagactctgagctgtaacctgaattcttgtccaaaattcagcacactggcaacgagcacatcaaacagattgccacttgtcctgtcggcgtctttgagacacacttgcccatctaggaaagcacagtgcaggtatctgtgttctgccaccgtgtgccagcccggaccagctcacagacagccctgcctgtcttacttgggctgctcggcttcactgtctcagggcccctgaacctcccagagccctccgtgattgttggaatggtgagcttgtcggccacagactgctacattgtgcatgagatctacaatggggagaatgcccaagaccagtttgagtacgagctggagcaggccctggaagcccagtacaagtacattgtgattgagcccactcgcattggcgacgagacagcccgctggatcaccgtgggcaactgcctgcacaagacggccgtgctggcgggcaccgcctgcctcttcaccccgttggcgctgcccttagattattcccactacatttccctgcccgctggtgtgctgagcctggcctgctgcaccctctatgggatctcctggcagtttgacccttgctgcaagtaccaagtggagtacgacgcctataaactgtcgcgcctgcctctgcacacactcacacccggcccacaagagacaacagagtattcagatcgccacactctgtgaggcagcagagcctgggcaggtgtttggcttagtatttgttatttttaaaaaataacagatcacgggtgtacccagggtttttcagctcattacactaagatgtggatttccataacccaagaggggggtctgaggctgtggaagtccgactgggcagtggaatgctgatggaggcagacgctgccgagggggtgtggacgtgctttgggggaggtctttaagtctattgtttaactgtaccatccagagcccaccagaagctattgatcattaaaattatgagaatttca

SEQ ID NO: 278680 - DNA, 421 bp, Homo sapiens
aaaggagatgaggacccaagtgagatgtgctctccgcagtgcaggctcagacctcccccagcgctgaaacacagttaagtgctcctcagcctaatcatcctgtctctctctctctctccctttcctgccccctccatcaaaaggggtgagcttgtcggccacagactgctacattgtgcatgagatctacaatggggagaatgcccaagaccagtttgagtacgagctggagcaggccctggaagcccagtacaagtacattgtgattgagcccactcgcattggcgacgagacagcccgctggatcaccgtgggcaactgcctgcacaagacggccgtgctggcgggcaccgcctgcctcttcaccccgttggcgctgcccttagattattcccactacatttccctgcccgctggtgtg

SEQ ID NO: 278681 - DNA, 1996 bp, Homo sapiens
gatctcagcgatgtcctctctgtgctcccagctgggaaacatattggtgaatgtcaggggctccagaccagcgtggataaggtaagacttgggggctggtttcttgagattttttcctgtagttacacagattgcaatgtcagtagaccccagggagaccctgtctttctctgatttcccttgaaatcttttcttctttgccagaactcatgacttcatgcttaaaatgcaagttaccagtagttcataacaacacatggataatgtttatataagatgtttgttagtttcatgcctgtgactaccatagtgacctataatcaacctgagtctatacttcttgaacctaacaaaacgctgtgtattcctggaagggagagagaggctctgtctgcagcttctgggtggagcattttcttcctcctgaattcacctgtagagtcatccgtctcatttcctagcacaggattaactcccataatgactgacggcgaacgacagcatcttatacatccacattcactataacattgagtggaaggtttcatatgttatttattgctaaagagtttttcaggaagagaatccattgcacatactcagtgacattaaactagttgtgtcaatgaaaccataaaaattaaataagattaattactggcattttcattttatataaaagactagaaatttcatgtgtatagtaaagaaccatgaacttactatgggtatttctctttggatataatactaaaaataataatgaataataaaaaggttggcaatggccgttcactgtttgggggagacctccattctccaacagcgtggtagtgcttgcagataatgtacagggcagaggccaacttgtctctcagcatgatcaaccccgagtacagcggggttttaatctgcctggggcattccacaatacagcctttatccttgagggtaacaagttagcctcataatatcagagagaaaaactagttcttcttcatgctggcagctgagaatgcgctaatctaaaacttaatacatctcaaaaagttaaaggggaaaaaattggtttcatcaccacctgccaggctttatggatggatgctggctgacatgcacagaaggggaagggggtctcctggctgcgcatgcctgaggggcttccccatctgttccgtgctgcaggcatgttagagggagcctcacctttgcagtactggagcacagtctccatcgcactcttccggtcggaggcccagcggatgcgggcggaaccagtgatcttgttctcgatgggccaccagccttgccagaggtacacctcgtggtgattgtcaacaaggaaaagtgctgtgagggcagggacagggccagaccatcaggagctccttcacggacacttctagctcactcctcccccaacctagtggatgttgtccctcttgactgcagtgtcacagggggaaacccccttggccatcaaaccaggggcaaaggggcaaacagagaaacccaggataccccagccctttgacagttcaacggggagaagcctgtaggcagagagaagtggtgtcaaggagttggtctttttcattcctcgtcctccaggtcctcctccctttgccccagctcaaggccctggcccttctggatactggcagggctgtgctaagagtggaagggataatgcatgtgccactcaaggggctgttagcaccgcatatctccaaagagcacaatcaacactggagcgcacatctcactgcagacaggtcagtggcgttcctgccctgcacgcgattgcttagcagtgaggtgagctcatggctctcttacagagaaatgggccttaaaaagcaaaactgccaccgggagtggtggctcatgcctgtaatcccagtgctttgggaggctgaggaggaaggactgcttgagcccggaggttgaagaccagcctgggccacatgatgagaccctatctctacaaaaaaaa

SEQ ID NO: 278682 - DNA, 5214 bp, Homo sapiens
agccactgttatgcaaagttcaagggcctctctcacacttagctgggggaggagtgaatacagcctttctgaagaaagaaaaattaagtaatagcaaaatcattaagtgtttatgattcataaatacagtttttgtcaactaaaaaaataaaatatgtagaagtcaaaaaagtgtctatgattcagaaatgccaccgttagaagttgccataagagtgcacacaaaaaggacatatgggtcaaagtgtttgcagcagtgttgtcccaaataaggacattttgcaacattgtggggtggttaaaataactatagaatatgcattagaatacaatgaaaccattaaacataatgtggaagaatattgtatattatagggaaatgctcataatatatagtgacaatttaaaaagcagattacaaaacaatatgccaagacatgatttctgcccaagtctgccctgatgggtgagctaaccaaggttgctgcactgtgagggcataggggctgcccctcagcccccaccccagccactgggctcctcaggaaaggacacgtgagtgtttactgcacatcctacagatgaggagctcacaaggaccctggatgggggagtcctctgaggttgctggagctgctgcagccatcttgtcactgccaggggagagctctctctgagagcgaaggcacagtggaggaaagcagaactaagaagagacagagaaagcgaaagtgggagagagagagagatatgaggtgacaaagtgtgggtccttggatcctgcttggtgtaaagctagcctgctcctggactttacagataataaattccttcctcatcagattaacctgggtttttgtggcttgtaaccaaaagggtctgcacggcccacacacaggctcccagctcatttcctttgcaatgagtggtaactggaggcgggcggtgcatggacctgccttgcaaggcttctctgttagtggtgcctggagcccactctctcagctggcacagccagtgtgacacatcagtccgggtgtgtcctggacctaccccctttctgggtgcaaaccagaactgaggatgccgagggtggtgggggggtagtttcctgcctcagggctgtgctcctgctacctctttgcctaaaattctcccctctctgtgctcccagggccagctcctttgtatgctctgtgattctttgaacagcgccccctctgagaagccttccctgaccacctggctgaggacatcattctgtcccagcttccatttgctttgggagtggcctcctgacacttcacttccgtgaggcagggaccagttctgtcctggtcactgctgtatccccagctctagataaggcctgagacatcgtaggagtgccagggatctttggttactgagaaaacgagcagctagatcaaggttcccaacaccaacacgctggggacatgttgggagtcaacttagccctaccagcaggtggaactagttttgctgctccaaaacagagttctagctatggggacagccactagagagcagagctaagtccatgctatgctgaggggccacagtctgccctgaactgtgcctcccagcctggagctagtgagggggccgagcctgggagctgacagatgagggctcggcgtggggacttttggaggggagggcattttcttgatcttaccatgggggcaacagctagatgggtagggggggacccactcaaggacatactgcggcttcaggcttcgaccagcccagaacgctcgctccatctgagggtcttgatatcagggtgtggcgtcaggagccggagcctacgggttgaaagccaagagtgggcaatcaaagctgaaaccaggcccacgacttaggagctggagagcacacagggctgaacactcgagttggtgaccaggaaaccagggagcaaagtctccagggtgcttgggcaagaccccagatggtctgcagcaacgcacgggcaacacgggatgatcagcgctacgtggtgagaaacttacctccttttgcaggacaacattttccagtccttctgagtaaatcaaagagaagtctcagcttggtgattgcaggtctctaatgcttatttctctgtctctgtctctctctctttaacaaaagtctaccagcggcctcaggctcagggcctgtctcaggtaaaagcgggttagggtgtaataacagtgatcggtttcattgtgtttatttttgtagctactttctaattatagcaagtgattctgagtttccatttaggatagtaataggaagtttctttttcaagtaaatgtgcataagtaaaaggagactgctcaaaggaaaacagctggtgattgatagaacaggctgtggcattgttgggccccagagggaagggctgtgtgagcatgcaggaaattctgggaaggcagctaaatgcagttgctgcatgggggccaggaagcatttggagacgtggctgggcacagcttggcttttgagcccaagagaggcctgctggggatgtgttgggagccaacctacccctaccagcaggtggaactggttttgccactccaaaacagagttccagctatggggacagccactagagagcagagctaagggcattctaggccaaggggtcacagtccaccctgaactgtgcctcccagcctgaagccagaaagctcagggaggctagcggccctgcccaggcctcagcactgaccctgcacccctaggcccagctggatgacccctaagagcttcctggaatttggatgcagggttattctgtgtgtgctgcctctcagagcatgtcactttgacgtggacatctcgggtctggttctggtgctgtccctgtctcgccacgtgaccctggataagtcatctctccaggccttgatttccccatctgtaaacagaggtgagtgaaatgatctttaaaggcgtgtcagtccattttgcattgctataaaggaatacctgaggttgggtagcttataaagaaaagagggttatttggctcacagttgtgcaggttgtacagaagcatggcaccagcattgcttcttgtgaagcttcaggaagcttccacttatggtggaaggggaagggggagttcgtgacttacatggcaagagagggagcaagagccatgtcaggctcttctaaacaaccagctctcatgtaaactaacagagtgagaactcattcattaccacggggagggcaccaagccatccatgagggacctgcccccatgagccaaacatctcccaccaggccacaccttcaacactgggagtcacattcagcatgagatttggaggtgaccaccatgcatccaaaccatatcaaggacccatttcggtgaggggaccaggaacatatcccttcccctctcctccacatcctttaatgtggagttcagcaaggaaagtagggcttgggtcaaattaaagcctggtcttaatttcctggtccagttattagctgtgtaaccctgggcaagtcacttaaccccctcaggttacaatgttacaaatgatcacattttcctcaactgaaaaatgggataggaacatgtcccaagcagagctggagtgacggtgctatcaatggcccggcagtgcctggtcacacagtaggcctggggagccctgacttttaccgcacagggagctgcttgcagagcttgttttcaattgtgggcttggcagggaactgccggcatcccaggggacagggtctcatgaggatgcctaatcccagctcaaagtggagaccccaggactccatcacagccagtgggggggagtggctgctgcagcagggagggcttcattggaatgaacccctttaagctccagtccaaatgcccagagtggttttgcaggtatggttgtgaggctggcatggtagtcccatctgcagtcccctgggatgaggcacctgtatggtagagggcccgggtggagagaagagaaggatggggatgaacccaggaccacagatggcccagttccatggatgattttcattgaggtgccttcaagtcagttcaacactgggcttctcaacctttgaggtatgcaggtaagagtcacctgcggcagtgggggatgctcttgttaaagtgcagactccgattaagcaggtctagggtggggcctgaaattctgtgttcctaacaaggctccatcctgggtatggaggtcaggtaccccctcacctctcctgtggacccagcttttgaggggtcaggagaagaatgttcagtcccagctgccaccactctaaagtcccctagaaacaaggactaatacaggtggcgtgggagagggcccaggcaaacagggaggtggggtaccccggtggggctgcagtgggccctgcggaaagcttgctggaggtgggggcctaaggaattcaaggacttgttccaggaacccaaggaacgagtgggctctaactgctgcagcatatgggagatgccaggaggagctggctgtggcaggccatcccagtccatcagacaacttgtagtggatgaagatgcagtgtccatggccagaagaaactcccgtggatgctcaggccaaggctgccagaagcacgaggaggggcagcattgagtgtcatcgggaaaaggcaaagtgatggtcctgaagctgccccatgtggccagtccctttttgggaagcctgaataaatccatttcctgtgcactgtgtgggaagccaacccctcttcagagcacctctgaactcaacaggatcctacacttcttataggcctggcttgatgctgacatccttcagccccagggaagacctaaagatctccaggtcttgaggcacctggaacacctccacctgagaccactttaacatgatttctctgcttgagggattttggaccatgctgtgtgtattcagccctaaaacatgggcgagtgcccgcttgcagttcaaattctcagaggaagttccctgtactccacccagtgccaagtttagtttgtgcaaatttccttaatgtcccctcctgtacaacaggcttatttggtgttaaccctcatatcgggggtctaactctttggttttccagcttttgtgctggaatatcccattaaactgtccatgttgggtattttttctttgttagtaaacatttgttgcatattgt

SEQ ID NO: 278683 - DNA, 3752 bp, Homo sapiens
agccactgttatgcaaagttcaagggcctctctcacacttagctgggggaggagtgaatacagcctttctgaagaaagaaaaattaagtaatagcaaaatcattaagtgtttatgattcataaatacagtttttgtcaactaaaaaaataaaatatgtagaagtcaaaaaagtgtctatgattcagaaatgccaccgttagaagttgccataagagtgcacacaaaaaggacatatgggtcaaagtgtttgcagcagtgttgtcccaaataaggacattttgcaacattgtggggtggttaaaataactatagaatatgcattagaatacaatgaaaccattaaacataatgtggaagaatattgtatattatagggaaatgctcataatatatagtgacaatttaaaaagcagattacaaaacaatatgccaagacatgatttctgcccaagtctgccctgatgggtgagctaaccaaggttgctgcactgtgagggcataggggctgcccctcagcccccaccccagccactgggctcctcaggaaaggacacgtgagtgtttactgcacatcctacagatgaggagctcacaaggaccctggatgggggagtcctctgaggttgctggagctgctgcagccatcttgtcactgccaggggagagctctctctgagagcgaaggcacagtggaggaaagcagaactaagaagagacagagaaagcgaaagtgggagagagagagagatatgaggtgacaaagtgtgggtccttggatcctgcttggtgtaaagctagcctgctcctggactttacagataataaattccttcctcatcagattaacctgggtttttgtggcttgtaaccaaaagggtctgcacggcccacacacaggctcccagctcatttcctttgcaatgagtggtaactggaggcgggcggtgcatggacctgccttgcaaggcttctctgttagtggtgcctggagcccactctctcagctggcacagccagtgtgacacatcagtccgggtgtgtcctggacctaccccctttctgggtgcaaaccagaactgaggatgccgagggtggtgggggggtagtttcctgcctcagggctgtgctcctgctacctctttgcctaaaattctcccctctctgtgctcccagggccagctcctttgtatgctctgtgattctttgaacagcgccccctctgagaagccttccctgaccacctggctgaggacatcattctgtcccagcttccatttgctttgggagtggcctcctgacacttcacttccgtgaggcagggaccagttctgtcctggtcactgctgtatccccagctctagataaggcctgagacatcgtaggagtgccagggatctttggttactgagaaaacgagcagctagatcaaggttcccaacaccaacacgctggggacatgttgggagtcaacttagccctaccagcaggtggaactagttttgctgctccaaaacagagttctagctatggggacagccactagagagcagagctaagtccatgctatgctgaggggccacagtctgccctgaactgtgcctcccagcctggagctagtgagggggccgagcctgggagctgacagatgagggctcggcgtggggacttttggaggggagggcattttcttgatcttaccatgggggcaacagctagatgggtagggggggacccactcaaggacatactgcggcttcaggcttcgaccagcccagaacgctcgctccatctgagggtcttgatatcagggtgtggcgtcaggagccggagcctacgggttgaaagccaagagtgggcaatcaaagctgaaaccaggcccacgacttaggagctggagagcacacagggctgaacactcgagttggtgaccaggaaaccagggagcaaagtctccagggtgcttgggcaagaccccagatggtctgcagcaacgcacgggcaacacgggatgatcagcgctacgtggtgagaaacttacctccttttgcaggacaacattttccagtccttctgagtaaatcaaagagaagtctcagcttggtgattgcaggtctctaatgcttatttctctgtctctgtctctctctctttaacaaaagtctaccagcggcctcaggctcagggcctgtctcaggtaaaagcgggttagggtgtaataacagtgatcggtttcattgtgtttatttttgtagctactttctaattatagcaagtgattctgagtttccatttaggatagtaataggaagtttctttttcaagtaaatgtgcataagtaaaaggagactgctcaaaggaaaacagctggtgattgatagaacaggctgtggcattgttgggccccagagggaagggctgtgtgagcatgcaggaaattctgggaaggcagctaaatgcagttgctgcatgggggccaggaagcatttggagacgtggctgggcacagcttggcttttgagcccaagagaggcctgctggggatgtgttgggagccaacctacccctaccagcaggtggaactggttttgccactccaaaacagagttccagctatggggacagccactagagagcagagctaagggcattctaggccaaggggtcacagtccaccctgaactgtgcctcccagcctgaagccagaaagctcagggaggctagcggccctgcccaggcctcagcactgaccctgcacccctaggcccagctggatgacccctaagagcttcctggaatttggatgcagggttattctgtgtgtgctgcctctcagagcatgtcactttgacgtggacatctcgggtctggttctggtgctgtccctgtctcgccacgtgaccctggataagtcatctctccaggccttgatttccccatctgtaaacagaggaacccaaggaacgagtgggctctaactgctgcagcatatgggagatgccaggaggagctggctgtggcaggccatcccagtccatcagacaacttgtagtggatgaagatgcagtgtccatggccagaagaaactcccgtggatgctcaggccaaggctgccagaagcacgaggaggggcagcattgagtgtcatcgggaaaaggcaaagtgatggtcctgaagctgccccatgtggccagtccctttttgggaagcctgaataaatccatttcctgtgcactgtgtgggaagccaacccctcttcagagcacctctgaactcaacaggatcctacacttcttataggcctggcttgatgctgacatccttcagccccagggaagacctaaagatctccaggtcttgaggcacctggaacacctccacctgagaccactttaacatgatttctctgcttgagggattttggaccatgctgtgtgtattcagccctaaaacatgggcgagtgcccgcttgcagttcaaattctcagaggaagttccctgtactccacccagtgccaagtttagtttgtgcaaatttccttaatgtcccctcctgtacaacaggcttatttggtgttaaccctcatatcgggggtctaactctttggttttccagcttttgtgctggaatatcccattaaactgtccatgttgggtattttttctttgttagtaaacatttgttgcatattgttgatagcattttagatttgaagaaataactgacaaaatcaatattttctgtttcatcatt

SEQ ID NO: 278684 - DNA, 4326 bp, Homo sapiens
agccactgttatgcaaagttcaagggcctctctcacacttagctgggggaggagtgaatacagcctttctgaagaaagaaaaattaagtaatagcaaaatcattaagtgtttatgattcataaatacagtttttgtcaactaaaaaaataaaatatgtagaagtcaaaaaagtgtctatgattcagaaatgccaccgttagaagttgccataagagtgcacacaaaaaggacatatgggtcaaagtgtttgcagcagtgttgtcccaaataaggacattttgcaacattgtggggtggttaaaataactatagaatatgcattagaatacaatgaaaccattaaacataatgtggaagaatattgtatattatagggaaatgctcataatatatagtgacaatttaaaaagcagattacaaaacaatatgccaagacatgatttctgcccaagtctgccctgatgggtgagctaaccaaggttgctgcactgtgagggcataggggctgcccctcagcccccaccccagccactgggctcctcaggaaaggacacgtgagtgtttactgcacatcctacagatgaggagctcacaaggaccctggatgggggagtcctctgaggttgctggagctgctgcagccatcttgtcactgccaggggagagctctctctgagagcgaaggcacagtggaggaaagcagaactaagaagagacagagaaagcgaaagtgggagagagagagagatatgaggtgacaaagtgtgggtccttggatcctgcttggtgtaaagctagcctgctcctggactttacagataataaattccttcctcatcagattaacctgggtttttgtggcttgtaaccaaaagggtctgcacggcccacacacaggctcccagctcatttcctttgcaatgagtggtaactggaggcgggcggtgcatggacctgccttgcaaggcttctctgttagtggtgcctggagcccactctctcagctggcacagccagtgtgacacatcagtccgggtgtgtcctggacctaccccctttctgggtgcaaaccagaactgaggatgccgagggtggtgggggggtagtttcctgcctcagggctgtgctcctgctacctctttgcctaaaattctcccctctctgtgctcccagggccagctcctttgtatgctctgtgattctttgaacagcgccccctctgagaagccttccctgaccacctggctgaggacatcattctgtcccagcttccatttgctttgggagtggcctcctgacacttcacttccgtgaggcagggaccagttctgtcctggtcactgctgtatccccagctctagataaggcctgagacatcgtaggagtgccagggatctttggttactgagaaaacgagcagctagatcaaggttcccaacaccaacacgctggggacatgttgggagtcaacttagccctaccagcaggtggaactagttttgctgctccaaaacagagttctagctatggggacagccactagagagcagagctaagtccatgctatgctgaggggccacagtctgccctgaactgtgcctcccagcctggagctagtgagggggccgagcctgggagctgacagatgagggctcggcgtggggacttttggaggggagggcattttcttgatcttaccatgggggcaacagctagatgggtagggggggacccactcaaggacatactgcggcttcaggcttcgaccagcccagaacgctcgctccatctgagggtcttgatatcagggtgtggcgtcaggagccggagcctacgggttgaaagccaagagtgggcaatcaaagctgaaaccaggcccacgacttaggagctggagagcacacagggctgaacactcgagttggtgaccaggaaaccagggagcaaagtctccagggtgcttgggcaagaccccagatggtctgcagcaacgcacgggcaacacgggatgatcagcgctacgtggtgagaaacttacctccttttgcaggacaacattttccagtccttctgagtaaatcaaagagaagtctcagcttggtgattgcaggtctctaatgcttatttctctgtctctgtctctctctctttaacaaaagtctaccagcggcctcaggctcagggcctgtctcaggtaaaagcgggttagggtgtaataacagtgatcggtttcattgtgtttatttttgtagctactttctaattatagcaagtgattctgagtttccatttaggatagtaataggaagtttctttttcaagtaaatgtgcataagtaaaaggagactgctcaaaggaaaacagctggtgattgatagaacaggctgtggcattgttgggccccagagggaagggctgtgtgagcatgcaggaaattctgggaaggcagctaaatgcagttgctgcatgggggccaggaagcatttggagacgtggctgggcacagcttggcttttgagcccaagagaggcctgctggggatgtgttgggagccaacctacccctaccagcaggtggaactggttttgccactccaaaacagagttccagctatggggacagccactagagagcagagctaagggcattctaggccaaggggtcacagtccaccctgaactgtgcctcccagcctgaagccagaaagctcagggaggctagcggccctgcccaggcctcagcactgaccctgcacccctaggcccagctggatgacccctaagagcttcctggaatttggatgcagggttattctgtgtgtgctgcctctcagagcatgtcactttgacgtggacatctcgggtctggttctggtgctgtccctgtctcgccacgtgaccctggataagtcatctctccaggccttgatttccccatctgtaaacagaggaacccaaggaacgagtgggctctaactgctgcagcatatgggagatgccaggaggagctggctgtggcaggccatcccagtccatcagacaacttgtagtggatgaagatgcagtgtccatggccagaagaaactcccgtggatgctcaggccaaggctgccagaagcacgaggaggggcagcattgagtgtcatcgggaaaaggcaaagtgatggtcctgaagctgccccatgtggccagtccctttttgggaagcctgaataaatccatttcctgtgcactgtgtgggaagccaacccctcttcagagcacctctgaactcaacaggatcctacacttcttataggcctggcttgatgctgacatccttcagccccagggaagacctaaagatctccaggtcttgaggcacctggaacacctccacctgagaccactttaacatgatttctctgcttgagggattttggaccatgctgtgtgtattcagccctaaaacatgggcgagtgcccgcttgcagttcaaattctcagaggaagttccctgtactccacccagtgccaagtttagtttgtgcaaatttccttaatgtcccctcctgtacaacaggcttatttggtgttaaccctcatatcgggggtctaactctttggttttccagcttttgtgctggaatatcccattaaactgtccatgttgggtattttttctttgttagtaaacatttgttgcatattgttgatagcattttagatttgaagaaataactgacaaaatcaatattttctgtttcatcattacaaatagactcatagctctttaatttttccatttaacactttaattttccataggcctagattttcaagaagtccaatatctctcacttgaagtgtcttttccctggagtagattgggagatttgagggatatctgtccaaagatgagacagtctgtttctagtttcccatccagcctgatggggcgtctacagtttttaccacaaggtgtcgctgttgaacagattctggtgcagtctagtgcatagctgtccacttctagagtgatcacttgctgggccaagttcctctccttaagtggtgtctcacattaaggttcccaaattacagactcattaattcaccctaataagctcatccaggcagtttaggtcttcaggggcttccagcctccaacacacattgggccaaaaccagcctgtaccaccagctccaagccctgtgttgaatctaggtcattggtccagatgccccttcattctgggcctgtggtgtcctttccagacagcagacctcagttaagggcatcccagtccatcagagaagttccaggatcacagaccctcaaaaggg

SEQ ID NO: 278685 - DNA, 4195 bp, Homo sapiens
agccactgttatgcaaagttcaagggcctctctcacacttagctgggggaggagtgaatacagcctttctgaagaaagaaaaattaagtaatagcaaaatcattaagtgtttatgattcataaatacagtttttgtcaactaaaaaaataaaatatgtagaagtcaaaaaagtgtctatgattcagaaatgccaccgttagaagttgccataagagtgcacacaaaaaggacatatgggtcaaagtgtttgcagcagtgttgtcccaaataaggacattttgcaacattgtggggtggttaaaataactatagaatatgcattagaatacaatgaaaccattaaacataatgtggaagaatattgtatattatagggaaatgctcataatatatagtgacaatttaaaaagcagattacaaaacaatatgccaagacatgatttctgcccaagtctgccctgatgggtgagctaaccaaggttgctgcactgtgagggcataggggctgcccctcagcccccaccccagccactgggctcctcaggaaaggacacgtgagtgtttactgcacatcctacagatgaggagctcacaaggaccctggatgggggagtcctctgaggttgctggagctgctgcagccatcttgtcactgccaggggagagctctctctgagagcgaaggcacagtggaggaaagcagaactaagaagagacagagaaagcgaaagtgggagagagagagagatatgaggtgacaaagtgtgggtccttggatcctgcttggtgtaaagctagcctgctcctggactttacagataataaattccttcctcatcagattaacctgggtttttgtggcttgtaaccaaaagggtctgcacggcccacacacaggctcccagctcatttcctttgcaatgagtggtaactggaggcgggcggtgcatggacctgccttgcaaggcttctctgttagtggtgcctggagcccactctctcagctggcacagccagtgtgacacatcagtccgggtgtgtcctggacctaccccctttctgggtgcaaaccagaactgaggatgccgagggtggtgggggggtagtttcctgcctcagggctgtgctcctgctacctctttgcctaaaattctcccctctctgtgctcccagggccagctcctttgtatgctctgtgattctttgaacagcgccccctctgagaagccttccctgaccacctggctgaggacatcattctgtcccagcttccatttgctttgggagtggcctcctgacacttcacttccgtgaggcagggaccagttctgtcctggtcactgctgtatccccagctctagataaggcctgagacatcgtaggagtgccagggatctttggttactgagaaaacgagcagctagatcaaggttcccaacaccaacacgctggggacatgttgggagtcaacttagccctaccagcaggtggaactagttttgctgctccaaaacagagttctagctatggggacagccactagagagcagagctaagtccatgctatgctgaggggccacagtctgccctgaactgtgcctcccagcctggagctagtgagggggccgagcctgggagctgacagatgagggctcggcgtggggacttttggaggggagggcattttcttgatcttaccatgggggcaacagctagatgggtagggggggacccactcaaggacatactgcggcttcaggcttcgaccagcccagaacgctcgctccatctgagggtcttgatatcagggtgtggcgtcaggagccggagcctacgggttgaaagccaagagtgggcaatcaaagctgaaaccaggcccacgacttaggagctggagagcacacagggctgaacactcgagttggtgaccaggaaaccagggagcaaagtctccagggtgcttgggcaagaccccagatggtctgcagcaacgcacgggcaacacgggatgatcagcgctacgtggtgagaaacttacctccttttgcaggacaacattttccagtccttctgagtaaatcaaagagaagtctcagcttggtgattgcaggtctctaatgcttatttctctgtctctgtctctctctctttaacaaaagtctaccagcggcctcaggctcagggcctgtctcaggtaaaagcgggttagggtgtaataacagtgatcggtttcattgtgtttatttttgtagctactttctaattatagcaagtgattctgagtttccatttaggatagtaataggaagtttctttttcaagtaaatgtgcataagtaaaaggagactgctcaaaggaaaacagctggtgattgatagaacaggctgtggcattgttgggccccagagggaagggctgtgtgagcatgcaggaaattctgggaaggcagctaaatgcagttgctgcatgggggccaggaagcatttggagacgtggctgggcacagcttggcttttgagcccaagagaggcctgctggggatgtgttgggagccaacctacccctaccagcaggtggaactggttttgccactccaaaacagagttccagctatggggacagccactagagagcagagctaagggcattctaggccaaggggtcacagtccaccctgaactgtgcctcccagcctgaagccagaaagctcagggaggctagcggccctgcccaggcctcagcactgaccctgcacccctaggcccagctggatgacccctaagagcttcctggaatttggatgcagggttattctgtgtgtgctgcctctcagagcatgtcactttgacgtggacatctcgggtctggttctggtgctgtccctgtctcgccacgtgaccctggataagtcatctctccaggccttgatttccccatctgtaaacagaggaacccaaggaacgagtgggctctaactgctgcagcatatgggagatgccaggaggagctggctgtggcaggccatcccagtccatcagacaacttgtagtggatgaagatgcagtgtccatggccagaagaaactcccgtggatgctcaggccaaggctgccagaagcacgaggaggggcagcattgagtgtcatcgggaaaaggcaaagtgatggtcctgaagctgccccatgtggccagtccctttttgggaagcctgaataaatccatttcctgtgcactgtgtgggaagccaacccctcttcagagcacctctgaactcaacaggatcctacacttcttataggcctggcttgatgctgacatccttcagccccagggaagacctaaagatctccaggtcttgaggcacctggaacacctccacctgagaccactttaacatgatttctctgcttgagggattttggaccatgctgtgtgtattcagccctaaaacatgggcgagtgcccgcttgcagttcaaattctcagaggaagttccctgtactccacccagtgccaagtttagtttgtgcaaatttccttaatgtcccctcctgtacaacaggcttatttggtgttaaccctcatatcgggggtctaactctttggttttccagcttttgtgctggaatatcccattaaactgtccatgttgggtattttttctttgttagtaaacatttgttgcatattgttgatagcattttagatttgaagaaataactgacaaaatcaatattttctgtttcatcattacaaatagactcatagctctttaatttttccatttaacactttaattttccataggcctagattttcaagaagtccaatatctctcacttgaagtgtcttttccctggagtagattgggagatttgagggatatctgtccaaagatgagacagtctgtttctagtttcccatccagcctgatggggcgtctacagtttttaccacaaggtgtcgctgttgaacagattctggtgcagtctagtgcatagctgtccacttctagagtgatcacttgctgggccaagttcctctccttaagtggtgtctcacattaaggttcccaaattacagactcattaattcaccctaataagctcatccaggcattggttttgtgttttggagatgaagtggccctggcatcaagaggacgtgggacacaagcagaggcttccaaggggtc

SEQ ID NO: 278686 - DNA, 380 bp, Homo sapiens
aggggtgaaccgagactcagacttacccaaggtcaccaaagctggcagagctcccggctgcctgactgttctgtccaagtgcccccacacctcgacgccttcagcagccgctagctccagggattcctggggaagccaaggccggccggactcctgggagccctggtctggcctccagcgacccctcacccctcacggcacagcatctcttctgcaggacttcagaatgccccctctgggatctcccaaagcagtcggtagccctggcaccctcccccaatcctaaaaccctgctctctccatgaaaccagtccctgcatcttctcatcccatattgttttgcaggctctaccctgagtcattatattcctttctcatcc

SEQ ID NO: 278687 - DNA, 829 bp, Homo sapiens
caggactaagaaccattctgaggatgaatcaggacgaggataagtaagagtttgttcccgtggtgcggagggtcaaggcccacacccggaaacctagcgaggtaaagttgcgtcttggttgtagagacgacaacttctccgcttcctcggcgatggcggcgtccgggagcggtatggcccagaaaacctgggaactggccaacaacatgcaggaagctcagagtatcgatgaaatctacaaatacgacaagaaacagcagcaagaaatcctggcggcgaagccctggactaaggatcaccattactttaagtactgcaaaatctcagcattggctctgctgaagatggtgatgcatgccagatcgggaggcaacttggaagtgatgggtctgatgctaggaaaggtggatggtgaaaccatgatcattatggacagttttgctttgcctgtggagggcactgaaacccgagtaaatgctcaggctgctgcatatgaatacatggctgcatacatagaaaatgcaaaacaggttggccgccttgaaaatgcaatcgggtggtatcatagccaccctggctatggctgctggctttctgggattgatgttagtactcagatgctcaatcagcagttccaggaaccatttgtagcagtggtgattgatccaacaagaacaatatccgcagggaaagtgaatcttggcgcctttaggacatacccaaagggctacaaacctcctgatgaaggaccttctgagtaccagactattccacttaataaaatagaagattttggtgtacactgcaaacagtaagtaatttaaaaaca

SEQ ID NO: 278688 - DNA, 1011 bp, Homo sapiens
  misc_feature (27)..(27): n is a, c, g, or t
  misc_feature (32)..(32): n is a, c, g, or t
aaggaaaactaggctagtacgagcctngtgtnatcggcgaggtcaaggcccacacccggaaacctagcgaggtaaagttgcgtcttggttgtagagacgacaacttctccgcttcctcggcgatggcggcgtccgggagcggtatggcccagaaaacctgggaactggccaacaacatgcaggaagctcagagtatcgatgaaatctacaaatacgacaagaaacagcagcaagaaatcctggcggcgaagccctggactaaggatcaccattactttaagtactgcaaaatctcagcattggctctgctgaagatggtgatgcatgccagatcgggaggcaacttggaagtgatgggtctgatgctaggaaaggtggatggtgaaaccatgatcattatggacagttttgctttgcctgtggagggcactgaaacccgagtaaatgctcaggctgctgcatatgaatacatggctgcatacatagaaaatgcaaaacaggttggccgccttgaaaatgcaatcgggtggtatcatagccaccctggctatggctgctggctttctgggattgatgttagtactcagatgctcaatcagcagttccaggaaccatttgtagcagtggtgattgatccaacaagaacaatatccgcagggaaagtgaatcttggcgcctttaggacatacccaaagggctacaaacctcctgatgaaggaccttctgagtaccagactattccacttaataaaatagaagattttggtgtacactgcaaacaatattatgccttagaagtctcatatttcaaatcctctttggatcgcaaattgcttgagctgttgtggaataaatactgggtgaatacgttgagttcttctagcttgcttactgcgtaccaagcgacatcccgggcgggcttgattgcgaagttagccaaaccgggagaggggttgtggttaacgcgccataaatgctcaacaggaccaacccggggcggagagaggacac

SEQ ID NO: 278689 - DNA, 807 bp, Homo sapiens
ccaaagggctgtaccggtccggaagttttttggactgtcaaggcccacacccggaaacctagcgaggtaaagttgcgtcttggttgtagagacgacaacttctccgcttcctcggcgatggcggcgtccgggagcggtatggcccagaaaacctgggaactggccaacaacatgcaggaagctcagagtatcgatgaaatctacaaatacgacaagaaacagcagcaagaaatcctggcggcgaagccctggactaaggatcaccattactttaagtactgcaaaatctcagcattggctctgctgaagatggtgatgcatgccagatcgggaggcaacttggaagtgatgggtctgatgctaggaaaggtggatggtgaaaccatgatcattatggacagttttgctttgcctgtggagggcactgaaacccgagtaaatgctcaggctgctgcatatgaatacatggctgcatacatagaaaatgcaaaacaggttggccgccttgaaaatgcaatcgggtggtatcatagccaccctggctatggctgctggctttctgggattgatgttagtactcagatgctcaatcagcagttccaggaaccatttgtagcagtggtgattgatcccccagggcaatatccgcggggaagtggatctgggggcccttatgacataccccaagggtgcaaactcctcgtgaagggctctggggccaaaattcccttataaaaaagacttggggggcccgggacatttgccgaaagctattaacccctcgggggaggcggcgggggaaacggg

SEQ ID NO: 278690 - DNA, 949 bp, Homo sapiens
cattttagatacttgctttgagtgtgtgttttgttcatctgtctttatgtatgtcatttatcagtttatctacatttattaattatgaagcaaaaattttactatggcaatgtcttcaattatataagaaatagaacagaagtagtaatcaaaagtagagaattttcctttttggggtagctttacaagaattgcatctcttctgagtattggtggggttttgtcatttcttttgccttatactttttatcatttctaaaatctaaggccttcacccgctaacctaagtttgacttctgattgttggaggatgcttgtgattatttcagaaaaaagcatagtattctttaaaattatttgtcaaattatcctaagtaataaacaaggaataacagattttaatataatataatattagaatcaatctctaattacaggtttgtataattttactcaccttctaaaacagaacaattgtatcaaattttacgttgtcattctcttgtgaaagttctagtaagtaatgaaatggtcaaaaagacatggggaagactaataaaatcacaagggaaaacttcagattggggtggtttgagaagtatgaataaaactaaactcattggagttacatggatggattggggctgatcttgtgtgtttgaaatagttttcaatttatgacatcatgtgatgtgtgtttttttttccagctgtaaaactaccatagaagctatccatggattgatgtctcaggttattaaggataaactgtttaatcaaattaacatctcttaaacagtctctgagaagtactttacctgaaagacagtatgagaaaaatattcaagtaacactttaaaaccagttacccaaaatctgattagaagtataaggtgctctgaagtgtcctaaatattaatatcctgtaataaagctctttaaaatgaaa

SEQ ID NO: 278691 - DNA, 1065 bp, Homo sapiens
agcggactacctgcccatccaggaacaagcaatttacaaatttacaaaaagtagagtttatgctacagagaagacaaaaacgggagctggtcatgccagaaaaaccaaccatgtgatttgagggttgggcctttgcgccatgtgacatcagccaggcctaaggggaatgaatacagcagggctggagatcaagccaaggagcaacaattcaaccaatcattcctacataaggaaaatccagtaaaaactctggacactcaggcttagccaaagaacaccaggaaaactaccacagttaagttggatgtactactcattgcattaaggaatgcacggagaacacacaccatggggaaccctgtggtatcgtgatgttctcatttaagcaacaagaagattcgtctctcgctattactgtaactgctgtttatatcgtcatgtcccggaaaggtccctgtcttccctgaatggtctctaccaacttcacctccggttctaggtgtcatggctgccccaagagtctagagacgacaacttctccgcttcctcggcgatggcggcgtccgggagcggtatggcccagaaaacctgggaactggccaacaacatgcaggaagctcagagtatcgatgaaatctacaaatacgacaagaaacagcagcaagaaatcctggcggcgaagccctggactaaggataaagggagaagccaagatttcgattcatgtcttgacttccaacatgaggtctacacatttttcagcttttggttgaaatctggcaaagcttaggaattaaatttggattctttctgtgggcagacatctaaaaaggctttgtagagacgttgactgactgctctgtaaggctgcttaagttgcttggttatctgcttgcttctgtaacaggctgtgcattttaggttcgtgtactcttaaatatttggaaactgttggcctgcctcactgtctaattgtggctctaattatattcatcctagctgtcttgggctgcattaatgagaccaaaatgtaattttattcaagagtttaattcactgatgacc

SEQ ID NO: 278692 - DNA, 1286 bp, Homo sapiens
atacatgaggacattaataatcaagaaaagaatgcagactataccactggtcaggtctttgatttgtctgaaaagttagagcagtcagaagcccagctgggacgagggagtttcatgttgggtttagaaacgcatgaccgaaaatcagaagacaaacttgccaaagctacaagagacagctgtaaaactaccatagaagctatccatggattgatgtctcaggttattaaggataaactgtttaatcaaattaacatctcttaaacagtctctgagaagtactttacctgaaagacagtatgagaaaaatattcaagtaacactttaaaaccagttacccaaaatctgattagaagtataaggtgctctgaagtgtcctaaatattaatatcctgtaataaagctctttaaaatgaaaaaaaaaaaaaaaaaaaaaaaaaacacaaaaaaaacagaaacaaaaaaacagaaaaagacaaaaggagacacaaagatacacaagaccacgagagaacagcagcgcacaccgagcacctcacccggcgcagcggagaaaggacgacaggagcaaggacaggagggggagggagcagagacaggcacggcgtggcggaggaaaacatgagcaaccacgagaagacgaggagcgagggcggacaggcgagacagaacggctcacagaccacacacagccgaagaggcgaacaaagaaaagaagaaggagccaagcagcacgagaggcaacacaacacagactcagcacccacaccagcgagcaccgaagtacaaacaggacccccagcacacgaacagtcagctgagccagcaccaactagaacagcgagaatgagacgaaccagaccacgaggagacaacgacatgacaggcgcaacacacaaccaaagcgggtagaatagacagagaaaggcagaacgaacgcagcgagacgcaggcgacgcaacagagaagaaacagacagcgacgcgagacagagagagacctgggaggcgcgatagagagcaagaggcaaagaagaagctgagggcgaggcacagggacgaaacgaaaaacaccgaacaggagaggaagcacggtacgagcgacacaaagaggcgagacagacaggaagagagacaagagagacagagaaggcggacagacacgcgaaaacaacgccgaacgagaacaagaagaagaacagacgagaaaccgcaacgacgagggagagcacaagcagagacagcaacagaggagagaaggaacaaaaagagaaagaagcaacgaac

SEQ ID NO: 278693 - DNA, 481 bp, Homo sapiens
aagacctacttattggtattgtcatagagattaggtgagataatgtataaaaagagtcgtctagaatgtatgtaataggagcacagtaacttgtctttcttcttttctccagtaaagggagaagccaagatttcgattcatgtcttgacttccaacatgaggtctacacatttttcagcttttggttgaaatctggcaaagcttaggaattaaatttggattctttctgtgggcagacatctaaaaaggctttgtagagacgttgactgactgctctgtaaggctgcttaagttgcttggttatctgcttgcttctgtaacaggctgtgcattttaggttcgtgtactcttaaatatttggaaactgttggcctgcctcactgtctaattgtggctctaattatattcatcctagctgtcttgggctgcattaatgagaccaaaatgtaattttattcaagagtttaattcactgatgacc

SEQ ID NO: 278694 - DNA, 1514 bp, Homo sapiens
acatgcccttcttccggtgcggaagactataccactcccataccctataactttgtttgttctatttcacacatataattttccgagacaagatgttctcatttaagcaacaagaagattcgtctctcgctattactgtaactgctgtttatatcgtcatgtcccggaaaggtccctgtcttccctgaatggtctctaccaacttcacctccggttctaggtgtcatggctgccccaagagtctaggtaagagtttgttcccgtggtgcggagggtcaaggcccacacccggaaacctagcgaggtaaagttgcgtcttggttgtagagacgacaacttctccgcttcctcggcgatggcggcgtccgggagcggtatggcccagaaaacctgggaactggccaacaacatgcaggaagctcagagtatcgatgaaatctacaaatacgacaagaaacagcagcaagaaatcctggcggcgaagccctggactaaggatcaccattactttaagtactgcaaaatctcagcattggctctgctgaagatggtgatgcatgccagatcgggaggcaacttggaagtgatgggtctgatgctaggaaaggtggatggtgaaaccatgatcattatggacagttttgctttgcctgtggagggcactgaaacccgagtaaatgctcaggctgctgcatatgaatacatggctgcatacatagaaaatgcaaaacaggttggccgccttgaaaatgcaatcgggtggtatcatagccaccctggctatggctgctggctttctgggattgatgttagtactcagatgctcaatcagcagttccaggaaccatttgtagcagtggtgattgatccaacaagaacaatatccgcagggaaagtgaatcttggcgcctttaggacatacccaaagggctacaaacctcctgatgaaggaccttctgagtaccagactattccacttaataaaatagaagattttggtgtacactgcaaacaatattatgccttagaagtctcatatttcaaatcctctttggatcgcaaattgcttgagctgttgtggaataaatactgggtgaatacgttgagttcttctagcttgcttactaatgcagactataccactggtcaggtctttgatttgtctgaaaagttagagcagtcagaagcccagctgggacgagggagtttcatgttgggtttagaaacgcatgaccgaaaatcagaagacaaacttgccaaagctacaagagacagctgtaaaactaccatagaagctatccatggattgatgtctcaggttattaaggataaactgtttaatcaaattaacatctcttaaacagtctctgagaagtactttacctgaaagacagtatgagaaaaatattcaagtaacactttaaaaccagttacccaaaatctgattagaagtataaggtgctctgaagtgtcctaaatattaatatcctgtaataaagctctttaaaatgaaa

SEQ ID NO: 278695 - DNA, 2382 bp, Homo sapiens
acatgcccttcttccggtgcggaagactataccactcccataccctataactttgtttgttctatttcacacatataattttccgagacaagatgttctcatttaagcaacaagaagattcgtctctcgctattactgtaactgctgtttatatcgtcatgtcccggaaaggtccctgtcttccctgaatggtctctaccaacttcacctccggttctaggtgtcatggctgccccaagagtctaggtaagagtttgttcccgtggtgcggagggtcaaggcccacacccggaaacctagcgaggtaaagttgcgtcttggttgtagagacgacaacttctccgcttcctcggcgatggcggcgtccgggagcggtatggcccagaaaacctgggaactggccaacaacatgcaggaagctcagagtatcgatgaaatctacaaatacgacaagaaacagcagcaagaaatcctggcggcgaagccctggactaaggatcaccattactttaagtactgcaaaatctcagcattggctctgctgaagatggtgatgcatgccagatcgggaggcaacttggaagtgatgggtctgatgctaggaaaggtggatggtgaaaccatgatcattatggacagttttgctttgcctgtggagggcactgaaacccgagtaaatgctcaggctgctgcatatgaatacatggctgcatacatagaaaatgcaaaacaggttggccgccttgaaaatgcaatcgggtggtatcatagccaccctggctatggctgctggctttctgggattgatgttagtactcagatgctcaatcagcagttccaggaaccatttgtagcagtggtgattgatccaacaagaacaatatccgcagggaaagtgaatcttggcgcctttaggacatacccaaagggctacaaacctcctgatgaaggaccttctgagtaccagactattccacttaataaaatagaagattttggtgtacactgcaaacaatattatgccttagaagtctcatatttcaaatcctctttggatcgcaaattgcttgagctgttgtggaataaatactgggtgaatacgttgagttcttctagcttgcttactaatgcagactataccactggtcaggtctttgatttgtctgaaaagttagagcagtcagaagcccagctgggacgagggagtttcatgttgggtttagaaacgcatgaccgaaaatcagaagacaaacttgccaaagctacaagagacagctgtaaaactaccatagaagctatccatggattgatgtctcaggttattaaggataaactgtttaatcaaattaacatctcttaaacagtctctgagaagtactttacctgaaagacagtatgagaaaaatattcaagtaacactttaaaaccagttacccaaaatctgattagaagtataaggtgctctgaagtgtcctaaatattaatatcctgtaataaagctctttaaaatgaaaaaaaaaaaaaaaaaaaaaaaaaacacaaaaaaaacagaaacaaaaaaacagaaaaagacaaaaggagacacaaagatacacaagaccacgagagaacagcagcgcacaccgagcacctcacccggcgcagcggagaaaggacgacaggagcaaggacaggagggggagggagcagagacaggcacggcgtggcggaggaaaacatgagcaaccacgagaagacgaggagcgagggcggacaggcgagacagaacggctcacagaccacacacagccgaagaggcgaacaaagaaaagaagaaggagccaagcagcacgagaggcaacacaacacagactcagcacccacaccagcgagcaccgaagtacaaacaggacccccagcacacgaacagtcagctgagccagcaccaactagaacagcgagaatgagacgaaccagaccacgaggagacaacgacatgacaggcgcaacacacaaccaaagcgggtagaatagacagagaaaggcagaacgaacgcagcgagacgcaggcgacgcaacagagaagaaacagacagcgacgcgagacagagagagacctgggaggcgcgatagagagcaagaggcaaagaagaagctgagggcgaggcacagggacgaaacgaaaaacaccgaacaggagaggaagcacggtacgagcgacacaaagaggcgagacagacaggaagagagacaagagagacagagaaggcggacagacacgcgaaaacaacgccgaacgagaacaagaagaagaacagacgagaaaccgcaacgacgagggagagcacaagcagagacagcaacagaggagagaaggaacaaaaagagaaagaagcaacgaac

SEQ ID NO: 278696 - DNA, 1492 bp, Homo sapiens
acatgcccttcttccggtgcggaagactataccactcccataccctataactttgtttgttctatttcacacatataattttccgagacaagatgttctcatttaagcaacaagaagattcgtctctcgctattactgtaactgctgtttatatcgtcatgtcccggaaaggtccctgtcttccctgaatggtctctaccaacttcacctccggttctaggtgtcatggctgccccaagagtctaggtaagagtttgttcccgtggtgcggagggtcaaggcccacacccggaaacctagcgaggtaaagttgcgtcttggttgtagagacgacaacttctccgcttcctcggcgatggcggcgtccgggagcggtatggcccagaaaacctgggaactggccaacaacatgcaggaagctcagagtatcgatgaaatctacaaatacgacaagaaacagcagcaagaaatcctggcggcgaagccctggactaaggatcaccattactttaagtactgcaaaatctcagcattggctctgctgaagatggtgatgcatgccagatcgggaggcaacttggaagtgatgggtctgatgctaggaaaggtggatggtgaaaccatgatcattatggacagttttgctttgcctgtggagggcactgaaacccgagtaaatgctcaggctgctgcatatgaatacatggctgcatacatagaaaatgcaaaacaggttggccgccttgaaaatgcaatcgggtggtatcatagccaccctggctatggctgctggctttctgggattgatgttagtactcagatgctcaatcagcagttccaggaaccatttgtagcagtggtgattgatccaacaagaacaatatccgcagggaaagtgaatcttggcgcctttaggacatacccaaagggctacaaacctcctgatgaaggaccttctgagtaccagactattccacttaataaaatagaagattttggtgtacactgcaaacaatattatgccttagaagtctcatatttcaaatcctctttggatcgcaaattgcttgagctgttgtggaataaatactgggtgaatacgttgagttcttctagcttgcttactaatgcagactataccactggtcaggtctttgatttgtctgaaaagttagagcagtcagaagcccagctgggacgagggagtttcatgttgggtttagaaacgcatgaccgaaaatcagaagacaaacttgccaaagctacaagagacagctgtaaaactaccatagaagctatccatggattgatgtctcaggttattaaggataaactgtttaatcaaattaacatctcttaaacagtctctgagaagtactttacctgaaagacagtatgagaaaaatattcaagtaacactttaaaaccagttacccaaaatctgaagtgtcctaaatattaatatcctgtaataaagctctttaaaatgaaa

SEQ ID NO: 278697 - DNA, 1504 bp, Homo sapiens
acatgcccttcttccggtgcggaagactataccactcccataccctataactttgtttgttctatttcacacatataattttccgagacaagatgttctcatttaagcaacaagaagattcgtctctcgctattactgtaactgctgtttatatcgtcatgtcccggaaaggtccctgtcttccctgaatggtctctaccaacttcacctccggttctaggtgtcatggctgccccaagagtctaggtaagagtttgttcccgtggtgcggagggtcaaggcccacacccggaaacctagcgaggtaaagttgcgtcttggttgtagagacgacaacttctccgcttcctcggcgatggcggcgtccgggagcggtatggcccagaaaacctgggaactggccaacaacatgcaggaagctcagagtatcgatgaaatctacaaatacgacaagaaacagcagcaagaaatcctggcggcgaagccctggactaaggatcaccattactttaagtactgcaaaatctcagcattggctctgctgaagatggtgatgcatgccagatcgggaggcaacttggaagtgatgggtctgatgctaggaaaggtggatggtgaaaccatgatcattatggacagttttgctttgcctgtggagggcactgaaacccgagtaaatgctcaggctgctgcatatgaatacatggctgcatacatagaaaatgcaaaacaggttggccgccttgaaaatgcaatcgggtggtatcatagccaccctggctatggctgctggctttctgggattgatgttagtactcagatgctcaatcagcagttccaggaaccatttgtagcagtggtgattgatccaacaagaacaatatccgcagggaaagtgaatcttggcgcctttaggacatacccaaagggctacaaacctcctgatgaaggaccttctgagtaccagactattccacttaataaaatagaagattttggtgtacactgcaaacaatattatgccttagaagtctcatatttcaaatcctctttggatcgcaaattgcttgagctgttgtggaataaatactgggtgaatacgttgagttcttctagcttgcttactaatgcagactataccactggtcaggtctttgatttgtctgaaaagttagagcagtcagaagcccagctgggacgagggagtttcatgttgggtttagaaacgcatgaccgaaaatcagaagacaaacttgccaaagctacaagagacagctgtaaaactaccatagaagctatccatggattgatgtctcaggttattaaggataaactgtttaatcaaattaacatctcttaaacagtctctgagaagtactttacctgaaagacagtatgagaaaaatattcaagtaacacttttataacagagagctcagatgtgatgagtgagatatagagtcgcttgaaagcgactataatatataaagaccatatgggaata

SEQ ID NO: 278698 - DNA, 1365 bp, Homo sapiens
acatgcccttcttccggtgcggaagactataccactcccataccctataactttgtttgttctatttcacacatataattttccgagacaagatgttctcatttaagcaacaagaagattcgtctctcgctattactgtaactgctgtttatatcgtcatgtcccggaaaggtccctgtcttccctgaatggtctctaccaacttcacctccggttctaggtgtcatggctgccccaagagtctaggtaagagtttgttcccgtggtgcggagggtcaaggcccacacccggaaacctagcgaggtaaagttgcgtcttggttgtagagacgacaacttctccgcttcctcggcgatggcggcgtccgggagcggtatggcccagaaaacctgggaactggccaacaacatgcaggaagctcagagtatcgatgaaatctacaaatacgacaagaaacagcagcaagaaatcctggcggcgaagccctggactaaggatcaccattactttaagtactgcaaaatctcagcattggctctgctgaagatggtgatgcatgccagatcgggaggcaacttggaagtgatgggtctgatgctaggaaaggtggatggtgaaaccatgatcattatggacagttttgctttgcctgtggagggcactgaaacccgagtaaatgctcaggctgctgcatatgaatacatggctgcatacatagaaaatgcaaaacaggttggccgccttgaaaatgcaatcgggtggtatcatagccaccctggctatggctgctggctttctgggattgatgttagtactcagatgctcaatcagcagttccaggaaccatttgtagcagtggtgattgatccaacaagaacaatatccgcagggaaagtgaatcttggcgcctttaggacatacccaaagggctacaaacctcctgatgaaggaccttctgagtaccagactattccacttaataaaatagaagattttggtgtacactgcaaacaatattatgccttagaagtctcatatttcaaatcctctttggatcgcaaattgcttgagctgttgtggaataaatactgggtgaatacgttgagttcttctagcttgcttactctgtaaaactaccatagaagctatccatggattgatgtctcaggttattaaggataaactgtttaatcaaattaacatctcttaaacagtctctgagaagtactttacctgaaagacagtatgagaaaaatattcaagtaacactttaaaaccagttacccaaaatctgattagaagtataaggtgctctgaagtgtcctaaatattaatatcctgtaataaagctctttaaaatgaaa

SEQ ID NO: 278699 - DNA, 1433 bp, Homo sapiens
acatgcccttcttccggtgcggaagactataccactcccataccctataactttgtttgttctatttcacacatataattttccgagacaagatgttctcatttaagcaacaagaagattcgtctctcgctattactgtaactgctgtttatatcgtcatgtcccggaaaggtccctgtcttccctgaatggtctctaccaacttcacctccggttctaggtgtcatggctgccccaagagtctagagacgacaacttctccgcttcctcggcgatggcggcgtccgggagcggtatggcccagaaaacctgggaactggccaacaacatgcaggaagctcagagtatcgatgaaatctacaaatacgacaagaaacagcagcaagaaatcctggcggcgaagccctggactaaggatcaccattactttaagtactgcaaaatctcagcattggctctgctgaagatggtgatgcatgccagatcgggaggcaacttggaagtgatgggtctgatgctaggaaaggtggatggtgaaaccatgatcattatggacagttttgctttgcctgtggagggcactgaaacccgagtaaatgctcaggctgctgcatatgaatacatggctgcatacatagaaaatgcaaaacaggttggccgccttgaaaatgcaatcgggtggtatcatagccaccctggctatggctgctggctttctgggattgatgttagtactcagatgctcaatcagcagttccaggaaccatttgtagcagtggtgattgatccaacaagaacaatatccgcagggaaagtgaatcttggcgcctttaggacatacccaaagggctacaaacctcctgatgaaggaccttctgagtaccagactattccacttaataaaatagaagattttggtgtacactgcaaacaatattatgccttagaagtctcatatttcaaatcctctttggatcgcaaattgcttgagctgttgtggaataaatactgggtgaatacgttgagttcttctagcttgcttactaatgcagactataccactggtcaggtctttgatttgtctgaaaagttagagcagtcagaagcccagctgggacgagggagtttcatgttgggtttagaaacgcatgaccgaaaatcagaagacaaacttgccaaagctacaagagacagctgtaaaactaccatagaagctatccatggattgatgtctcaggttattaaggataaactgtttaatcaaattaacatctcttaaacagtctctgagaagtactttacctgaaagacagtatgagaaaaatattcaagtaacactttaaaaccagttacccaaaatctgattagaagtataaggtgctctgaagtgtcctaaatattaatatcctgtaataaagctctttaaaatgaaa

SEQ ID NO: 278700 - DNA, 1262 bp, Homo sapiens
acatgcccttcttccggtgcggaagactataccactcccataccctataactttgtttgttctatttcacacatataattttccgagacaagatgttctcatttaagcaacaagaagattcgtctctcgctattactgtaactgctgtttatatcgtcatgtcccggaaaggtccctgtcttccctgaatggtctctaccaacttcacctccggttctaggtgtcatggctgccccaagagtctagtcaccattactttaagtactgcaaaatctcagcattggctctgctgaagatggtgatgcatgccagatcgggaggcaacttggaagtgatgggtctgatgctaggaaaggtggatggtgaaaccatgatcattatggacagttttgctttgcctgtggagggcactgaaacccgagtaaatgctcaggctgctgcatatgaatacatggctgcatacatagaaaatgcaaaacaggttggccgccttgaaaatgcaatcgggtggtatcatagccaccctggctatggctgctggctttctgggattgatgttagtactcagatgctcaatcagcagttccaggaaccatttgtagcagtggtgattgatccaacaagaacaatatccgcagggaaagtgaatcttggcgcctttaggacatacccaaagggctacaaacctcctgatgaaggaccttctgagtaccagactattccacttaataaaatagaagattttggtgtacactgcaaacaatattatgccttagaagtctcatatttcaaatcctctttggatcgcaaattgcttgagctgttgtggaataaatactgggtgaatacgttgagttcttctagcttgcttactaatgcagactataccactggtcaggtctttgatttgtctgaaaagttagagcagtcagaagcccagctgggacgagggagtttcatgttgggtttagaaacgcatgaccgaaaatcagaagacaaacttgccaaagctacaagagacagctgtaaaactaccatagaagctatccatggattgatgtctcaggttattaaggataaactgtttaatcaaattaacatctcttaaacagtctctgagaagtactttacctgaaagacagtatgagaaaaatattcaagtaacactttaaaaccagttacccaaaatctgattagaagtataaggtgctctgaagtgtcctaaatattaatatcctgtaataaagctctttaaaatgaaa

SEQ ID NO: 278701 - DNA, 1482 bp, Homo sapiens
acatgcccttcttccggtgcggaagactataccactcccataccctataactttgtttgttctatttcacacatataattttccgagacaagatgttctcatttaagcaacaagaagattcgtctctcgctattactgtaactgctgtttatatcgtcatgtcccggaaaggtccctgtcttccctgaatggtctctaccaacttcacctccggttctaggtgtcatggctgccccaagagtctagagacgacaacttctccgcttcctcggcgatggcggcgtccgggagcggtatggcccagaaaacctgggaactggccaacaacatgcaggaagctcagagtatcgatgaaatctacaaatacgacaagaaacagcagcaagaaatcctggcggcgaagccctggactaaggataaagggagaagccaagatttcgattcatgtcttgacttccaacatgagtcaccattactttaagtactgcaaaatctcagcattggctctgctgaagatggtgatgcatgccagatcgggaggcaacttggaagtgatgggtctgatgctaggaaaggtggatggtgaaaccatgatcattatggacagttttgctttgcctgtggagggcactgaaacccgagtaaatgctcaggctgctgcatatgaatacatggctgcatacatagaaaatgcaaaacaggttggccgccttgaaaatgcaatcgggtggtatcatagccaccctggctatggctgctggctttctgggattgatgttagtactcagatgctcaatcagcagttccaggaaccatttgtagcagtggtgattgatccaacaagaacaatatccgcagggaaagtgaatcttggcgcctttaggacatacccaaagggctacaaacctcctgatgaaggaccttctgagtaccagactattccacttaataaaatagaagattttggtgtacactgcaaacaatattatgccttagaagtctcatatttcaaatcctctttggatcgcaaattgcttgagctgttgtggaataaatactgggtgaatacgttgagttcttctagcttgcttactaatgcagactataccactggtcaggtctttgatttgtctgaaaagttagagcagtcagaagcccagctgggacgagggagtttcatgttgggtttagaaacgcatgaccgaaaatcagaagacaaacttgccaaagctacaagagacagctgtaaaactaccatagaagctatccatggattgatgtctcaggttattaaggataaactgtttaatcaaattaacatctcttaaacagtctctgagaagtactttacctgaaagacagtatgagaaaaatattcaagtaacactttaaaaccagttacccaaaatctgattagaagtataaggtgctctgaagtgtcctaaatattaatatcctgtaataaagctctttaaaatgaaa

SEQ ID NO: 278702 - DNA, 1048 bp, Homo sapiens
ttacaacagctccagttacaacagctccagttacaacagctccagttacaacagctccagttacaacagctgctgctgaagatggtgatgcatgccagatcgggaggcaacttggaagtgatgggtctgatgctaggaaaggtggatggtgaaaccatgatcattatggacagttttgctttgcctgtggagggcactgaaacccgagtaaatgctcaggctgctgcatatgaatacatggctgcatacatagaaaatgcaaaacaggttggccgccttgaaaatgcaatcgggtggtatcatagccaccctggctatggctgctggctttctgggattgatgttagtactcagatgctcaatcagcagttccaggaaccatttgtagcagtggtgattgatccaacaagaacaatatccgcagggaaagtgaatcttggcgcctttaggacatacccaaagggctacaaacctcctgatgaaggaccttctgagtaccagactattccacttaataaaatagaagattttggtgtacactgcaaacaatattatgccttagaagtctcatatttcaaatcctctttggatcgcaaattgcttgagctgttgtggaataaatactgggtgaatacgttgagttcttctagcttgcttactaatgcagactataccactggtcaggtctttgatttgtctgaaaagttagagcagtcagaagcccagctgggacgagggagtttcatgttgggtttagaaacgcatgaccgaaaatcagaagacaaacttgccaaagctacaagagacagctgtaaaactaccatagaagctatccatggattgatgtctcaggttattaaggataaactgtttaatcaaattaacatctcttaaacagtctctgagaagtactttacctgaaagacagtatgagaaaaatattcaagtaacactttaaaaccagttacccaaaatctgattagaagtataaggtgctctgaagtgtcctaaatattaatatcctgtaataaagctctttaaaatgaaa

SEQ ID NO: 278703 - DNA, 1314 bp, Homo sapiens
agcggactacctgcccatccaggaacaagcaatttacaaatttacaaaaagtagagtttatgctacagagaagacaaaaacgggagctggtcatgccagaaaaaccaaccatgtgatttgagggttgggcctttgcgccatgtgacatcagccaggcctaaggggaatgaatacagcagggctggagatcaagccaaggagcaacaattcaaccaatcattcctacataaggaaaatccagtaaaaactctggacactcaggcttagccaaagaacaccaggaaaactaccacagttaagttggatgtactactcattgcattaaggaatgcacggagaacacacaccatggggaaccctgtggtatcgtgatgttctcatttaagcaacaagaagattcgtctctcgctattactgtaactgctgtttatatcgtcatgtcccggaaaggtccctgtcttccctgaatggtctctaccaacttcacctccggttctaggtgtcatggctgccccaagagtctaggtaagagtttgttcccgtggtgcggagggtcaaggcccacacccggaaacctagcgaggtaaagttgcgtcttggttgtagagacgacaacttctccgcttcctcggcgatggcggcgtccgggagcggtatggcccagaaaacctgggaactggccaacaacatgcaggaagctcagagtatcgatgaaatctacaaatacgacaagaaacagcagcaagaaatcctggcggcgaagccctggactaaggatcaccattactttaagtactgcaaaatctcagcattggctctgctgaagatggtgatgcatgccagatcgggaggcaacttggaagtgatgggtctgatgctaggaaaggtggatggtgaaaccatgatcattatggacagttttgctttgcctgtggagggcactgaaacccgagtaaatgctcaggctgctgcatatgaatacatggctgcatacatagaaaatgcaaaacaggttggccgccttgaaaatgcaatcgggtggtatcatagccaccctggctatggctgctggctttctgggattgatgttagtactcagatgctcaatcagcagttccaggaaccatttgtagcagtggtggttactatgggcaaggcggcatgagtggaggtggatggcgtgggatgtactgaaagcaaaaacaccaacatacaagtcttgacaacagcatctggtctactagactttcttacagatttaatttcttttgtatttaaagaactttataatgactgaagtgtcgggaccgagct

SEQ ID NO: 278704 - DNA, 328 bp, Homo sapiens
  misc_feature (27)..(27): n is a, c, g, or t
  misc_feature (32)..(32): n is a, c, g, or t
aaggaaaactaggctagtacgagcctngtgtnatcggcgaggtaagagtttgttcccgtggtgcggagggtcaaggcccacacccggaaacctagcgaggtaaagttgcgtcttggttgtagagacgacaacttctccgcttcctcggcgatggcggcgtccgggagcggtatggcccagaaaacctgggaactggccaacaacatgcaggaagctcagagtatcgatgaaatctacaaatacgacaagaaacagcagattagaagtataaggtgctctgaagtgtcctaaatattaatatcctgtaataaagctctttaaaatgaaa

SEQ ID NO: 278705 - DNA, 380 bp, Homo sapiens
acaaaaacgggagctggtcatgccagaaaaaccaaccatgtgatttgagggttgggcctttgcgccatgtgacatcagccaggcctaaggggaatgaatacagcagggctggagatcaagccaaggagcaacaattcaaccaatcattcctacataaggaaaatccagtaaaaactctggacactcaggcttaggtgaggctgattggcaatattctgtatcctgtcacatactgatgtgctaggagggtaatgtctccctgagactaacagataattaatgtttggaccgtcccagaccttaccctatgtgtctcaacctttggctatttctaatttgtatacttatgctataaaactgtgaccataagtacagcactt

SEQ ID NO: 278706 - DNA, 418 bp, Homo sapiens
atacatgaggacattaataatcaagaaaagaatgcagactataccactggtcaggtctttgatttgtctgaaaagttagagcagtcagaagcccagctgggacgagggagtttcatgttgggtttagaaacgcatgaccgaaaatcagaagacaaacttgccaaagctacaagagacagctgtaaaactaccatagaagctatccatggattgatgtctcaggttattaaggataaactgtttaatcaaattaacatctcttaaacagtctctgagaagtactttacctgaaagacagtatgagaaaaatattcaagtaacactttaaaaccagttacccaaaatctgattagaagtataaggtgctctgaagtgtcctaaatattaatatcctgtaataaagctctttaaaatgaaa

SEQ ID NO: 278707 - DNA, 526 bp, Homo sapiens
atctagaggatcctcagttgacacttcagctgctgaagatggtgatgcatgccagatcgggaggcaacttggaagtgatgggtctgatgctaggaaaggtggatggtgaaaccatgatcattatggacagttttgctttgcctgtggagggcactgaaacccgagtaaatgctcaggctgctgcatatgaatacatggctgcatacatagaaaatgcaaaacaggttggccgccttgaaaatgcaatcgggtggtatcatagccaccctggctatggctgctggctttctgggattgatgttagtactcagatgctcaatcagcagttccaggaaccatttgtagcagtggtggttactatgggcaaggcggcatgagtggaggtggatggcgtgggatgtactgaaagcaaaaacaccaacatacaagtcttgacaacagcatctggtctactagactttcttacagatttaatttcttttgtatttaaagaactttataatgactgaagtgtcgggaccgagct

SEQ ID NO: 278708 - DNA, 1309 bp, Homo sapiens
  misc_feature (27)..(27): n is a, c, g, or t
  misc_feature (32)..(32): n is a, c, g, or t
aaggaaaactaggctagtacgagcctngtgtnatcggcgaggtaagagtttgttcccgtggtgcggagggtcaaggcccacacccggaaacctagcgaggtaaagttgcgtcttggttgtagagacgacaacttctccgcttcctcggcgatggcggcgtccgggagcggtatggcccagaaaacctgggaactggccaacaacatgcaggaagctcagagtatcgatgaaatctacaaatacgacaagaaacagcagcaagaaatcctggcggcgaagccctggactaaggatcaccattactttaagtactgcaaaatctcagcattggctctgctgaagatggtgatgcatgccagatcgggaggcaacttggaagtgatgggtctgatgctaggaaaggtggatggtgaaaccatgatcattatggacagttttgctttgcctgtggagggcactgaaacccgagtaaatgctcaggctgctgcatatgaatacatggctgcatacatagaaaatgcaaaacaggttggccgccttgaaaatgcaatcgggtggtatcatagccaccctggctatggctgctggctttctgggattgatgttagtactcagatgctcaatcagcagttccaggaaccatttgtagcagtggtgattgatccaacaagaacaatatccgcagggaaagtgaatcttggcgcctttaggacatacccaaagggctacaaacctcctgatgaaggaccttctgagtaccagactattccacttaataaaatagaagattttggtgtacactgcaaacaatattatgccttagaagtctcatatttcaaatcctctttggatcgcaaattgcttgagctgttgtggaataaatactgggtgaatacgttgagttcttctagcttgcttactaatgcagactataccactggtcaggtctttgatttgtctgaaaagttagagcagtcagaagcccagctgggacgagggagtttcatgttgggtttagaaacgcatgaccgaaaatcagaagacaaacttgccaaagctacaagagacagctgtaaaactaccatagaagctatccatggattgatgtctcaggttattaaggataaactgtttaatcaaattaacatctcttaaacagtctctgagaagtactttacctgaaagacagtatgagaaaaatattcaagtaacactttaaaaccagttacccaaaatctgattagaagtataaggtgctctgaagtgtcctaaatattaatatcctgtaataaagctctttaaaatgaaa

SEQ ID NO: 278709 - DNA, 1244 bp, Homo sapiens
acatgcccttcttccggtgcggaagactataccactcccataccctataactttgtttgttctatttcacacatataattttccgagacaagatgttctcatttaagcaacaagaagattcgtctctcgctattactgtaactgctgtttatatcgtcatgtcccggaaaggtccctgtcttccctgaatggtctctaccaacttcacctccggttctaggtgtcatggctgccccaagagtctaggtaagagtttgttcccgtggtgcggagggtcaaggcccacacccggaaacctagcgaggtaaagttgcgtcttggttgtagagacgacaacttctccgcttcctcggcgatggcggcgtccgggagcggtatggcccagaaaacctgggaactggccaacaacatgcaggaagctcagagtatcgatgaaatctacaaatacgacaagaaacagcagcaagaaatcctggcggcgaagccctggactaaggatcaccattactttaagtactgcaaaatctcagcattggctctgctgaagatggtgatgcatgccagatcgggaggcaacttggaagtgatgggtctgatgctaggaaaggtggatggtgaaaccatgatcattatggacagttttgctttgcctgtggagggcactgaaacccgagtaaatgctcaggctgctgcatatgaatacatggctgcatacatagaaaatgcaaaacaggttggccgccttgaaaatgcaatcgggtggtatcatagccaccctggctatggctgctggctttctgggattgatgttagtactcagatgctcaatcagcagttccaggaaccatttgtagcagtggtgattgatccaacaagaacaatatccgcagggaaagtgaatcttggcgcctttaggacatacccaaagggctacaaacctcctgatgaaggaccttctgagtaccagactattccacttaataaaatagaagattttggtgtacactgcaaacaatattatgccttagaagtctcatatttcaaatcctctttggatcgcaaattgcttgagctgttgtggaataaatactgggtgaatacgttgagttcttctagcttgcttactgcgtaccaagcgacatcccgggcgggcttgattgcgaagttagccaaaccgggagaggggttgtggttaacgcgccataaatgctcaacaggaccaacccggggcggagagaggacac

SEQ ID NO: 278710 - DNA, 1324 bp, Homo sapiens
acctacgccccgagggagccactgcccctgcccccgctccggggcagcgaatgcagccccaggaccctccaccctcaacctacaccaccccaggccacacctcgccactcacgctccccatccgcggctggctgactcttactcaggggagcgggctcgcgtccggggagacacacagtgctctagaggatcgtcgcggaccgaagaggttacagcggccacctggagcgggaacagcatgacagacctccgggccggggctccgcccctcaggcccagccctccgctcgcccttcgccaaccgccggtcaccattactttaagtactgcaaaatctcagcattggctctgctgaagatggtgatgcatgccagatcgggaggcaacttggaagtgatgggtctgatgctaggaaaggtggatggtgaaaccatgatcattatggacagttttgctttgcctgtggagggcactgaaacccgagtaaatgctcaggctgctgcatatgaatacatggctgcatacatagaaaatgcaaaacaggttggccgccttgaaaatgcaatcgggtggtatcatagccaccctggctatggctgctggctttctgggattgatgttagtactcagatgctcaatcagcagttccaggaaccatttgtagcagtggtgattgatccaacaagaacaatatccgcagggaaagtgaatcttggcgcctttaggacatacccaaagggctacaaacctcctgatgaaggaccttctgagtaccagactattccacttaataaaatagaagattttggtgtacactgcaaacaatattatgccttagaagtctcatatttcaaatcctctttggatcgcaaattgcttgagctgttgtggaataaatactgggtgaatacgttgagttcttctagcttgcttactaatgcagactataccactggtcaggtctttgatttgtctgaaaagttagagcagtcagaagcccagctgggacgagggagtttcatgttgggtttagaaacgcatgaccgaaaatcagaagacaaacttgccaaagctacaagagacagctgtaaaactaccatagaagctatccatggattgatgtctcaggttattaaggataaactgtttaatcaaattaacatctcttaaacagtctctgagaagtactttacctgaaagacagtatgagaaaaatattcaagtaacactttaaaaccagttacccaaaatctgattagaagtataaggtgctctgaagtgtcctaaatattaatatcctgtaataaagctctttaaaatgaaa

SEQ ID NO: 278711 - DNA, 1178 bp, Homo sapiens
atagctgcccgctgctctcggttcgccagtacgctggccggggacttggtcaactcgttctcctgctgtgcccaggggctattaaactgtgggggccacttctcaggctaaatctattgcagcctctccagcctcccatgcaccagccagcttaggaacagttcaccattactttaagtactgcaaaatctcagcattggctctgctgaagatggtgatgcatgccagatcgggaggcaacttggaagtgatgggtctgatgctaggaaaggtggatggtgaaaccatgatcattatggacagttttgctttgcctgtggagggcactgaaacccgagtaaatgctcaggctgctgcatatgaatacatggctgcatacatagaaaatgcaaaacaggttggccgccttgaaaatgcaatcgggtggtatcatagccaccctggctatggctgctggctttctgggattgatgttagtactcagatgctcaatcagcagttccaggaaccatttgtagcagtggtgattgatccaacaagaacaatatccgcagggaaagtgaatcttggcgcctttaggacatacccaaagggctacaaacctcctgatgaaggaccttctgagtaccagactattccacttaataaaatagaagattttggtgtacactgcaaacaatattatgccttagaagtctcatatttcaaatcctctttggatcgcaaattgcttgagctgttgtggaataaatactgggtgaatacgttgagttcttctagcttgcttactaatgcagactataccactggtcaggtctttgatttgtctgaaaagttagagcagtcagaagcccagctgggacgagggagtttcatgttgggtttagaaacgcatgaccgaaaatcagaagacaaacttgccaaagctacaagagacagctgtaaaactaccatagaagctatccatggattgatgtctcaggttattaaggataaactgtttaatcaaattaacatctcttaaacagtctctgagaagtactttacctgaaagacagtatgagaaaaatattcaagtaacactttaaaaccagttacccaaaatctgattagaagtataaggtgctctgaagtgtcctaaatattaatatcctgtaataaagctctttaaaatgaaa

SEQ ID NO: 278712 - DNA, 1332 bp, Homo sapiens
  misc_feature (83)..(83): n is a, c, g, or t
cgtgattgcggatggtcacgggccacacccggatagactatctaggtaaagtcgtgtcttggttgtatatacaagtacttgtnccgctatccatcggggatagggggtcgtactgtgcgatcgggtactggtcacacaaagacctgggagactgtactcccagcaggcactgaagctctaaatatcgattaaatcgacaattacgagccagaaacatctacatgatattccttgtgtcgcgtgtagagctctgtggacattatggtatgagcgagttgcctacttaccttgaatgtatgtagcccaatctcacgcatatgcgctgcttgggtgtagacatggctgatgcatgtccagagtcgtgcaggcaacgttggcatatgtggatggggctggtgctaggaaatggtggatggtgaaaccatgaatctgttataggatggtttcggtttgcccgtgagggggtgccctgtaatgaccagtaaattgctcaggtctgtctgtcctttgaaatacactgtgttggcatatgtataggaatgctaaaactcgttggccgccttgaaaatgcaatcgggtggtatcatagccaccctggctatggctgctggctttctgggattgatgttagtactcagatgctcaatcagcagttccaggaaccatttgtagcagtggtgattgatccaacaagaacaatatccgcagggaaagtgaatcttggcgcctttaggacatacccaaagggctacaaacctcctgatgaaggaccttctgagtaccagactattccacttaataaaatagaagattttggtgtacactgcaaacaatattatgccttagaagtctcatatttcaaatcctctttggatcgcaaattgcttgagctgttgtggaataaatactgggtgaatacgttgagttcttctagcttgcttactaatgcagactataccactggtcaggtctttgatttgtctgaaaagttagagcagtcagaagcccagctgggacgagggagtttcatgttgggtttagaaacgcatgaccgaaaatcagaagacaaacttgccaaagctacaagagacagctgtaaaactaccatagaagctatccatggattgatgtctcaggttattaaggataaactgtttaatcaaattaacatctcttaaacagtctctgagaagtactttacctgaaagacagtatgagaaaaatattcaagtaacactttaaaaccagttacccaaaatctgattagaagtataaggtgctctgaagtgtcctaaatattaatatcctgtaataaagctctttaaaatgaaa

SEQ ID NO: 278713 - DNA, 1245 bp, Homo sapiens
agcggactacctgcccatccaggaacaagcaatttacaaatttacaaaaagtagagtttatgctacagagaagacaaaaacgggagctggtcatgccagaaaaaccaaccatgtgatttgagggttgggcctttgcgccatgtgacatcagccaggcctaaggggaatgaatacagcagggctggagatcaagccaaggagcaacaattcaaccaatcattcctacataaggaaaatccagtaaaaactctggacactcaggcttagccaaagaacaccaggaaaactaccacagttaagttggatgtactactcattgcattaaggaatgcacggagaacacacaccatggggaaccctgtggtatcgtgatgttctcatttaagcaacaagaagattcgtctctcgctattactgtaactgctgtttatatcgtcatgtcccggaaaggtccctgtcttccctgaatggtctctaccaacttcacctccggttctaggtgtcatggctgccccaagagtctaggtaagagtttgttcccgtggtgcggagggtcaaggcccacacccggaaacctagcgaggtaaagttgcgtcttggttgtagagacgacaacttctccgcttcctcggcgatggcggcgtccgggagcggtatggcccagaaaacctgggaactggccaacaacatgcaggaagctcagagtatcgatgaaatctacaaatacgacaagaaacagcagcaagaaatcctggcggcgaagccctggactaaggatcaccattactttaagtactgcaaaatctcagcattggctctgctgaagatggtgatgcatgccagatcgggaggcaacttggaagtgatgggtctgatgctaggaaaggtggatggtgaaaccatgatcattatggacagttttgctttgcctgtggagggcactgaaacccgagtaaatgctcaggctgctgcatatgaatacatggctgcatacatagaaaatgcaaaacaggttggccgccttgaaaatgcaatcgggtggtatcatagccaccctggctatggctgctggctttctgggattgatgttagtactcagatgctcaatcagcagttccaggaaccatttgtagcagtggtgattgatccaacaagaacaatatccgcagggaaagtgaatcttggcgcctttaggacatacccaaaggctacaacccccctaacgcggccggtacgtctgattca

SEQ ID NO: 278714 - DNA, 1324 bp, Homo sapiens
agcggactacctgcccatccaggaacaagcaatttacaaatttacaaaaagtagagtttatgctacagagaagacaaaaacgggagctggtcatgccagaaaaaccaaccatgtgatttgagggttgggcctttgcgccatgtgacatcagccaggcctaaggggaatgaatacagcagggctggagatcaagccaaggagcaacaattcaaccaatcattcctacataaggaaaatccagtaaaaactctggacactcaggcttagccaaagaacaccaggaaaactaccacagttaagttggatgtactactcattgcattaaggaatgcacggagaacacacaccatggggaaccctgtggtatcgtgatgttctcatttaagcaacaagaagattcgtctctcgctattactgtaactgctgtttatatcgtcatgtcccggaaaggtccctgtcttccctgaatggtctctaccaacttcacctccggttctaggtgtcatggctgccccaagagtctaggtaagagtttgttcccgtggtgcggagggtcaaggcccacacccggaaacctagcgaggtaaagttgcgtcttggttgtagagacgacaacttctccgcttcctcggcgatggcggcgtccgggagcggtatggcccagaaaacctgggaactggccaacaacatgcaggaagctcagagtatcgatgaaatctacaaatacgacaagaaacagcagcaagaaatcctggcggcgaagccctggactaaggatcaccattactttaagtactgcaaaatctcagcattggctctgctgaagatggtgatgcatgccagatcgggaggcaacttggaagtgatgggtctgatgctaggaaaggtggatggtgaaaccatgatcattatggacagttttgctttgcctgtggagggcactgaaacccgagtaaatgctcaggctgctgcatatgaatacatggctgcatacatagaaaatgcaaaacaggttggccgccttgaaaatgcaatcgggtggtatcatagccaccctggctatggctgctggctttctgggattgatgttagtactcagatgctcaatcagcagttccaggaaccatttgtagcagtggtgattgatcccccagggcaatatccgcggggaagtggatctgggggcccttatgacataccccaagggtgcaaactcctcgtgaagggctctggggccaaaattcccttataaaaaagacttggggggcccgggacatttgccgaaagctattaacccctcgggggaggcggcgggggaaacggg

SEQ ID NO: 278715 - DNA, 486 bp, Homo sapiens
accatctgtgtgaatacttcactgtgattatctctcaccatcatcaaatagttcagagcactgatcctcacgagttggacatttccccatgaaacagtagccttctgagttcttgcaaggaaatccattgaccctgaactggtccttaggacaggcaggcgagtggccagtgcacatctcaggaaaatcacattcatctttcgccggtctgcatatggaccctgctttttttatctgttgaggaaaaacaaagagactaaatcctggatacatttagggtcatactgcttccctgtactgaagtgtgatgtgagactattcaactgctgaagatctgattttaccttttgctcaagctgtccattatttcaggctgacttttattttttaatgtatcattaaataacatcaaaatggtaacttatgccctattttctcaaacaaaataaaaactcaaagaaaatggagtgtgaaaaaataaggtac

SEQ ID NO: 278716 - DNA, 2129 bp, Homo sapiens
tctttcatgtgtcttctccagactgtaagcttcctgtggacaaggcctgctccgttcaaggctcaatctccagctcctgacacaccatgcgctaggtgctcagtcactaatggtctcgcgaaggagtgatcagtgagtgaagcaggggctgctgcatgggaaaggtgagcgggctggaaatgggtagtccccgcggcgtctcccagtcgggctcctcccgaggaggaaggaaggagagaccccaggtgtagtcgaggggccgggagggaggaggggagggtcgctccaccctggagcgggaatgctgcagggcagctccgggtcgccaggcggcggtttccaggcaacgaccgaacacagacgcgggctagacgctggcgctgagcaacctgaggcctgcagactccgactgggcccctgggcgggcgggacggaccgcggccaaggcgggggcgctggacggtggcggcatggaggacgacgaggaggagaccaccgcgtccacgctgcggggcaagcccaggccgccgcccgtctcggcgcagtccgccttcagctacatcccgccgcggcgcctggaccccaaagagcacagctactactaccgcccggcgcggacaggaattatttccctctatgattgtatttttaagaggcgcctagattatgatcagaagttgcaccgagatgacagagaacatgcaaaaagcctgggacttcatgttaacgaagaggaacaggagaggccggttggagtgctgacgtcttctgtctatgggaagcgcatcaatcagcccattgagcccctaaaccgggactttggccgtgccaaccatgtgcaggctgacttctacaggaagaacgacatccccagcctcaaggaacccggctttgggcacattgctccatcctgaagcatccccgtggcccacagggcatgtccgataccctgtggcctggcaagtttgcacagcgagaaggtggcatctggagcctcctttccccttctcatgacgcctaggagcttggctatgcctgtgttgcatctctacagtgggacacatgaacacgttagcagcccccctcaggttgctgggttaggagcctgaccaacaacacctttagtacatgtgaagagtctctgatgtgatgattttcagctggaattatttttgatcaaatgaatctggagaccgattcattgtgagcacctgaataaaatgaaaactttgtttccccttggtaactgttgggttggtttctgttcactggctctctacatttgccaggattctttggggaggcagtcacaggagtgaggtgcagttgcttttcccacgagttaggggaactcctgctgcctgaacacaaacaaccctgacatgttcccttctccaagaggagatgtgatgacaattgtcttttggcacaattgaactctagaaactccatttttgtttttccagaggtctgaatcccaaataacagaattttgtgcagtagggaccaggagccctagtaaggatgggtggccctggtggccagcaatgctcactattactgctcagagagagggggccagtcatgggaagaggctagatttcggtgttcaacaaacttgggtaaaattctggttgctgcattttctagatttgtgttctagggcaagtcatatcatctacatgagcagacatttcctcatatttaaagtggaatttccaaacctagaagagttcatgcgggaggcaatgagctgctggagcacaggcataacacaggtacccagtgtgtgccccacccagtgccccgtcatcacagcaatgacttgactttaaacagtcttctttttggaagcagtcgcttgtaacctaagttggaaatacttactttggagataatttgaaacttacccaagtattaaagtatcatcagctacatttttaatgaatggatcccttggaagaaatcatctctcatctaccatgattaaatttcccacagtttagcagtgaatgggcaggtggcctaattaatttcaatactgatcgctccatcactggttttattgttttgaatatggaaaaaggattctctaaaaataaatgacactgaattccggcaatttcaag

SEQ ID NO: 278717 - DNA, 818 bp, Homo sapiens
cctggctcccagggagaggcacagcgtcggtcagcagacaaatggacaccctccccgtcataacccgccaggcactgccggagggagtgaacacgtggcctggcacatctgggcatttccaactgttggacgcagggttcttccagcatgcccgttttagaaaccccactatgaggttcgcctgcggtggtgcgaaccccaggctcactcgtcgctctgactgaaagccagggagaaaacaggaagaaagaagctgggaatgcccacaggcagagggaaggtgccagggcctggcggccgggagaggcctccccgtgtgattccagtggccgccaggcagttcagagtgttcaagtgcacagagatgaatggaaccatttctgccctccggagcttgggagttgagcatgagctgtgtcatgggtggcaaactgcatgtgcagtcagggagggcttcctggaagaggtcacccggctcccggctggcccctgaatggctgtcgctgccggaatgactgcccgagtccgagaccctgctcaggtcgctgttctgggaggaattctgagagctggggccgctgtccagctcatcccagccccctccggcctgcccaggctgatgcctcacagctggaggaaacaggacagccggtgagatccctggggcttcaggccagccccatgcccacctcccggggccctggaccaggaggcctcgggggctgagtcctgagctgaggatgggtggccaccttggctccagcttcagcaaacaccagccccatgggcatgtgcttccgccgcgggtcccacccctc

SEQ ID NO: 278718 - DNA, 2047 bp, Homo sapiens
cattgaatcggccctaacgattctcggatcgtcattaggtgtaaccatagagcatgaattacctcttgaggtcatcagcgagaatttacgactgtcaacaaaagcacgtgattccctaacgccccccacccccccaaccccccccccatatttggccgcatacatagcaaaacgaagtacagtgcatcgctataattcattaatacatcataaatcgtgaagcacagggttataacgaccacgatccacaaatcaagccctccaaaatcacccaaatgagctcgtactttgtaaactccttctcggggcgttatccaaatggcccggactatcagttgctaaattatggcagtggcagctctctgagcggctcttacagggatcccgctgccatgcacaccggctcttacggctacaattacaatgggatggacctcagcgtcaaccgctcctcggcctcctccagccactttggggcggtgggcgagagctcgcgcgccttccccgcgcccgcccaggagccccgcttcaggcaagcggcttcgagctgctccctgtcctcgcccgagtccctgccctgcaccaacggcgacagccacggcgccaagccctctgcttcgtccccctccgaccaggcgacctcagccagctccagcgccaatttcaccgaaatagacgaggccagcgcgtcctcggagcctgaggaagcggcaagccagctaagcagccccagcctagctcgggcgcagccagagcccatggccacctccacagccgcgcccgaggggcagactccgcagatattcccctggatgaggaagcttcacatcagccatgatatgaccgggccggacgggaaaagggcccggaccgcgtatacccgctaccagaccctggagctggaaaaggagttccacttcaaccgctacctgacccggcgacggcgcatcgagatcgcccacgcactctgcctgtccgagcgccagatcaagatctggttccagaaccggcgcatgaagtggaagaaggacaacaaattgaaaagtatgagcctggctacagctggcagcgccttccagccctgagcccgcccagaggagcccagcggcccaagagcccgtgccacccccagccctggcccctccaatcctccccgctctgccgccgcccgctggggaccggttcccacaagcctgcctcgccttgtgttacgatatttcgtttgatcttaggtcttcctgtggctccctctctcctggactggttatcttgttattattgttaataataataattattattattttccttccatgctcccaactcccttctgcttgtcccaaatccgccagtgtttctgaatgtttgtgtctgtggttgcagtctttcccccaggaaaaaaaaaaaaaaagaaattcgcatgtttaatgtgaactctcccctccccatctgtgttctaacttatttataaaaagatgatcgctgtattttgagtttcagctggaaacttctgtaaggggcagcagttgaggtggggtagtgccgcagtggggtcaagctgagctggcttcggagatggagtcccttttcattctcctcctcctccctcctcactccctaggcccaagtctcctaggggcttggtcctagggtgggaaggggctagggaggaccaaagggatggtattgagaagagagaaagaagatagtgagatttaagttcctgctgcctgggtaggccccacaaggcctggtctgggagtatacggaaacaaaaatgatcctcagtgcaaaatgtcttgtgtatttctctgtgaatccatgggtctggctagagggcccaaagcttgtaaatatggggatagtctgggtcagacccatctctcccttacccatcttgcttccaagaccatttgtagtgagcgagtggatgctgtgctacgtgtgaaatctgtctttgcggggcctgtctcagtgattcgcttttggtatttgtttgtagctttcctggaagtcaaataaatgtttcccccactcaaaaaaaaat

SEQ ID NO: 278719 - DNA, 1240 bp, Homo sapiens
cattgaatcggccctaacgattctcggatcgtcattaggtgtaaccatagagcatgaattacctcttgaggtcatcagcgagaatttacgactgtcaacaaaagcacgtgattccctaacgccccccacccccccaaccccccccccatatttggccgcatacatagcaaaacgaagtacagtgcatcgctataattcattaatacatcataaatcgtgaagcacagggttataacgaccacgatccacaaatcaagccctccaaaatcacccaaatgagctcgtactttgtaaactccttctcggggcgttatccaaatggcccggactatcagttgctaaattatggcagtggcagctctctgagcggctcttacagggatcccgctgccatgcacaccggctcttacggctacaattacaatgggatggacctcagcgtcaaccgctcctcggcctcctccagccactttggggcggtgggcgagagctcgcgcgccttccccgcgcccgcccaggagccccgcttcaggcaagcggcttcgagctgctccctgtcctcgcccgagtccctgccctgcaccaacggcgacagccacggcgccaagccctctgcttcgtccccctccgaccaggcgacctcagccagctccagcgccaatttcaccgaaatagacgaggccagcgcgtcctcggagcctgaggaagcggcaagccagctaagcagccccagcctagctcgggcgcagccagagcccatggccacctccacagccgcgcccgaggggcagactccgcagatattcccctggatgaggaagcttcacatcagccatggtaattctctctctcttttttgtcttctcggctttccttctctgcgttttggggtgggatgggggggacaaggagagcttggctttaccctaaatatagattcatttttctaagggggagaagtatctaagaggggcctcatagcttcgtagacagagccaaaaagggtctctctgttaagaggggggtatttttaataatttgtttccagcttcggcttaggtttttattagcgcagctgaaccagctttaggataaaggatggggttcatataatgtggggaagggtcctgcttacccctgaaattttgagactgtcgctagcaaagaaggggtgaacagtaaaaggagctttccggggcaaaagtgcaaccgctctcctccctcccggggcgagcggccg

SEQ ID NO: 278720 - DNA, 525 bp, Homo sapiens
aagagtccccaccagcaagaaggctctaccagatgtgtccccttgaccttggggtccccagcctccagaactgaaatgaaaccaatttctacaacataggaatgatttcggcatgtctaggagagtcagagaaaagacgggagggaaatgggggagaaagaaaaacgtgagagaaccttctacttcctgaaaggcaccatgactctggaatgttacctgtaattaagaatgtcagaagaaccgagcctccattctaaagtttctgtggtgaagtcatctgtatttcctaggaaacttgaagaggaacaaactgaaacttgacaaaactcggaagagacttacaagaatcagaagtgcacacatggtgccatatttggaagtcatgaagaaaaactgaacagcattaccgaggaaaaacttcttactcctaaatatgcaacgctgtcagtaagaagcacattaaggctaagggttactaataatatttaaataaatgtggccattatgcttctaggaaattaaaaa

SEQ ID NO: 278721 - DNA, 464 bp, Homo sapiens
gctcaccacctctaaggaggagcactgactgaagacaggaatgatttcggcatgtctaggagagtcagagaaaagacgggagggaaatgggggagaaagaaaaacgtgagagaaccttctacttcctgaaaggcaccatgactctggaatgttacctgtaattaagaatgtcagaagaaccgagcctccattctaaagtttctgtggtgaagtcatctgtatttcctaggaaacttgaagaggaacaaactgaaacttgacaaaactcggaagagacttacaagaatcagaagtgcacacatggtgccatatttggaagtcatgaagaaaaactgaacagcattaccgaggaaaaacttcttactcctaaatatgcaacgctgtcagtaagaagcacattaaggctaagggttactaataatatttaaataaatgtggccattatgcttctaggaaattaaaaa

SEQ ID NO: 278722 - DNA, 435 bp, Homo sapiens
cttcaaaatatataactttatttaataaatattaatattttatgttaatattaaggaaatgaaaccaatttctacaacataggaatgatttcggcatgtctaggagagtcagagaaaagacgggagggaaatgggggagaaagaaaaacgtgagagaaccttctacttcctgaaaggcaccatgactctggaatggtaagtgcacaattttacctgttacttttgcaaatcaagaaaaggcaaaaaagacaagatgatatgctctgatttgtggaattagataaattatttgtctgaagaagtggacaaagaaatggaagttggattttagattgttttcaaactaaaactgttcttcatagcaagcaatgtaagctaggcatagaaacctttttctattcatcagcctctataagtaaaacagaaatatccatg

SEQ ID NO: 278723 - DNA, 522 bp, Homo sapiens
tggcttgacccagcagggaactaggtggcttcagtacaactcaggcatgaagaaccaccaggggaagcacacttaagtcatcatctaatggcttcccagtgtatttcacaataacagctattggcaacaagtaagcaatgctggcacatgggtacatgccaacttgcaagcacacaatagtccttaacagggaccatcaccaccctcataatccctcagtttggaggagcctgggcctgccccaagtgtatagtaatcctacccagccagatccaaactctagtcaaagaagggtccccaaatgtcccagaacactgacctctggagggtgggtggggggtggaaagggacagggaagggcagcaggttgtagggtctgctgtcaaaggtcccattccggaccgtccttctccatcccaccccccgggtctccattgccgcggccctgccccaccactttcagctgaggggtagttcggagctccatggtcccttccctagagcggccgccccctcgggcct

SEQ ID NO: 278724 - DNA, 628 bp, Homo sapiens
gcagaccaaacgccaatgcagaaggctcaagaaagaggcaaacagactagccactgctccaggatgactgtggctctttatgagtgaagagaaagggtggagactgaagacagaactggggacagtgacaggcttggggaagaacagctgattcagcagtcccaagcatctgaacacaaggtggacattctccagggtgacatcgcaaaatacatgggtgaagacaacctagtggccgtgacttggagcacccttcctcacaatgaaggcattctgggccagcctgaaaaacagcatggaaataaatcacctaagtacaagggacctcggtgacaacgctgtgaacatctatggattccgcattcaagtactttgtcacaactgtctccacaagttggtacatcttctgtacaaggcaaagaaaactctaaaaacatacaaaaagtcaatgttaataatgagacattattattaaacatcaacaaagtgccatgttcttcaggctccctaaggaatgctagcactttcagactataaatttttgtatccacataatcattgggaaaaattaactttaatgaaaataatccctaatatttgtgaagtttatggtttttaaaaagaaatt

SEQ ID NO: 278725 - DNA, 599 bp, Homo sapiens
gcagaccaaacgccaatgcagaaggctcaagaaagaggcaaacagactagccactgctccaggatgactgtggctctttatgagtgaagagaaagggtggagactgaagacagaactggggacagtgacaggcttggggaagaacagctgattcagcagtcccaagggtgacatcgcaaaatacatgggtgaagacaacctagtggccgtgacttggagcacccttcctcacaatgaaggcattctgggccagcctgaaaaacagcatggaaataaatcacctaagtacaagggacctcggtgacaacgctgtgaacatctatggattccgcattcaagtactttgtcacaactgtctccacaagttggtacatcttctgtacaaggcaaagaaaactctaaaaacatacaaaaagtcaatgttaataatgagacattattattaaacatcaacaaagtgccatgttcttcaggctccctaaggaatgctagcactttcagactataaatttttgtatccacataatcattgggaaaaattaactttaatgaaaataatccctaatatttgtgaagtttatggtttttaaaaagaaatt

SEQ ID NO: 278726 - DNA, 890 bp, Homo sapiens
gtttttagttagtatgaacgggaaggcgagggtaccatttacagcgacgggtaaccacgcgggaggagcaggtcaactcccgacagtggaggtgaagatgcgtgcgcctccgttgtctccctcgcgcgacgcgtccgccgcccgcggttcggtcgggagcggcagcccgtgctccggttccgttccggttccggctggcgtctgcacctgcgaccaccgtgagcagtcatggcgtactccacagtgcagagagtcgctctggcttctgggcttgtcctggctctgtcgctgctgctgcccaaggccttcctgtcccgcgggaagcggcaggagccgccgccgacacctgaaggaaaattgggccgatttccacctatgatgcatcatcaccaggcaccctcagatggccagactcctggggctcgtttccagaggtctcaccttgccgaggcatttgcaaaggccaaaggatcaggtggaggtgctggaggaggaggtagtggaagaggtctgatggggcagattattccaatctacggttttgggatttttttatatatactgtacattctatttaaggtaagtagaatcatcctaatcatattacatcaatgaaaatctaatatggcaataaaaatcattgtctacattaaaacttcttatagttcataaaattatttcaaatccatcatctctttaaatcctgcctcctcttcatgaggtacttaggatagccattatttcagtttcacataagaaatgtttactcaatgtttaagtgttttgccccaaaattcacaactaacaaggcagaactaggacttgaacatggatcttttggttcttaatccagtgagtgatacaattcaatgcactcccctgccaaaaaa

SEQ ID NO: 278727 - DNA, 5032 bp, Homo sapiens
caaaggaaggaggaactaacttgtggaatgctgagaaaggtaaaaacaccttcatataaggaagaggaacaggctatgacctcatgcttgctttgacaagtataagcatgccagggcaaatatttaggctaaactgtgggagctaagaacagttgatttctttattatggctagcagatatctaagcatgttagcacaggttcttgaataaattttgcttctaagagaagttactattcctaattatatggggagtaaagtctctttgaagaggaatctctactttactttttacacttgtgctttgataattttttacttggaaacctcatcttttggcgttttttttttttgagctatttctctagtgttgctatttgatttaatttctgaccttcatttttgtttcccaaccttttttttttgtttgatatgaggggttccgtgactgaggttctgagctgctgttgatgtgctatacctccttcaattctcagctctcaaaggggaaaacaactgcagaggatgggaaatgctatactgccatgcctggaaacacccacaggaaaattaccagttttgagcttgctcaactgcaagaaaaactgaaggagacagaagcagccatggaaaaattaatcaacagagtgggacctaatggtgagaggataagggcttctgatttcccatgacttaggaaacagaattaagactgtttcattcattgaagatcagaatgccctgcgtacagtctggaaaagtaacatgtgccgcctgaagagacaagagtttgtgataagcagagcacagactgtgacttctgaccaagagaaacggttgctacatcagctccgagaaatcaccagggtcatgaaagaaggaaaattcattgacagattttctccagagaaagaagctgaggaggccccttacatggaggactgggaaggttaccctgaagagacttacccaatttatgacctttcagactgtatcaagcgtaggcaagaaacaatcttggtggattaccctgacccaaaagaactttctgctgaagaaatagctgaaagaatgggaatgatagaagaggaagaatcagatcatttgggttgggaaagtctgcccactgaccccagagcccaggaagataattctgttacctcgtgtgatccaaagccagaaacatgttcctgctgttttcatgaagacgaggatcctgctgtcttggcagagaatgctggattcagtgcagatagctaccctgagcaagaggaaaccaccaaagaagagtggtcccaagactttaaagatgaagggttgggcatcagcaccgataaagcatatacaggcagcatgctgaggaagcgtaacccccagggtttagagtgaaaacagccagtctgaagtatccattactcaagtcccaaggtgacctctctctcctcagatttccttcttggccctgtgccctgcactttcttcactgtgttcaagtgtcatagctatcaggccactatcatggatatcatgtatccttcctggtgctcacacacctgtcaccttgtaaaacacggacattagtgtgaacacaggacagcttcgctctttctcttcctgccctagctcttggttggtttatatataaggaatatatttgtgtatttatatatcagacatttggatgtacctttcagttatttaggatttagaaaattctttttggattttccagaattattttatccttcggggatgacagttatatgtgtatatacaacccaggatgacaaaatcatgggtccggtttttgttgccagggctgctgtctcttttcttgcggtcttcatttctcacgagggtgctgggaacttgatcagtcccctggccttttggcactgtggcagagtacacaagtcatacctttatggacagttagctcacaaaacaactgcataatctgggatcactcttggtaaatcaggtgggtggtgcagccaggagatcccctttcctggtcacaacaggagcacaaagaaaccattatctccatgactagctccagaagctgggcccagggagtcgtgatgaggagtggaggtgtatttggcctgtagaatcaacggcctttgagaaccatacaatgcaccttatatggcttgggtgatcaaataacttaaggtccaaattcaaacactttggaaaaagggagctttaatataattatgccaaggtgataggcataaactaagactgtcctggacgtagggtcacccctgtctatagccatttaagatttttgaacctgatgactaaacaaacaaaaccctctttcctttttagaatatcctgtatgcgctatttcccaccagaggcagaggccacaggagataggccatggttcaggtaggaaatgctcttggtcacatcagaactctagatctgggggaataaacaaacccgaattattaccacactctcaaagttctcttcaatctggactatttgtattccaaagaaaaatttagtgctttagctattcagcaatattgagaaaaaacatgaacacatttatgactttgccttgaccattgacttttctaaaatgtgcttccttttcctttatttccctttttttatacaaagaaaatagcccaaatttctcctcttaggtcattccttaacctctcagagaaccagtttccccatgaattgggaataatgctctatttacagggctgtttggattaaataagatgctgtttataaagtgtctgtgccagggcaaagcatgtggtaggtgcttggtgacagcatgatccctgtcaccactctgtcaagtccagtgttgctgagatgtcacacctgacaccctctaaggctaccctgattgccaggagtggcccagggcccttctgcagtctccgggtgcctttagttataacctcttgtctgggtcagaccattagctttcatgtctgcttctagctacaactgtagcctcccttccttttgccttcaaatctgccacagctgcccggcaacaaaaaagattcctaagcatctcgaggtcctgtttaaatgggttagggtccaagcaagccctgagacatcaagtggttgggtcttttatacctttttcatctctacagccctgttctcttcctaaggccaggcccacaggggatactgaggaaccaccagccccttcaggcggcacagcagaccctgaagagaactgctctaacttaagtaccttctgacttcaccatttttccagcctctgggtgtggttctgatgaaccttaaacttgaaaggcacaggccagaggaaggacagtgttgacccacatgtcattggtgaggttatgatctctttgctattatcacctacttacccacctgaggctcctaggaaacaatgaatgaaaggtatagaaaaaaattaggaagtaaacagggcttttttcccctttatgaaaaaagtacacagaagtgttgaaacgattcaagtttaatttgttgatatatgtgtgtacttagacaaacactaaattctacaacatacataatgtcaacatgggaaaataccaagtttgtcattgcacataccaataaataaatacatttgctccagaataccaaagtttattcaaaaagtcaataaaagcacagttttgcaaatttgtctaaaacgccagataatcttgaacaaaaataaaatgtctgaccactccaaaataggaaaagacaatcttgtgcaaatagacatacacagtctaggcattgtggaaactggctgtgttcccagcaagagatactgcaccctcctgaccgagcagtcaggcttccctttcctagccatcctaagttgcgttctaggaaactctggatctcagcctcatctccagctttgcctggaccttgctagggggagggagggacaggagcacagaggaggagaggagagggatgtgatgtctttcttaggaaagaaaaaaaggcacagtgatgagctataaaggtagtgatgagagctataaaggtagtgatgaaagcaaggaataattttcattcaccccaaatcctacggcaagctttgacaatgtaacatctttatcttgtggttaggaaaatggacctagagagattatgtggtttgctcaaaatcacatagctactaagtgcagtagtgctttctataagaccaacttgcctttccacttggttggaaaatttaaaaaccaaacctgtcgtaatctatctgttctgcccctcccgcctgtatcatgagatgactgaaaattccaggtggccataaactcaaacaagagcctagcccttggcttattaccggtggctactacaaacctacagaccagagcccagggtagtatagagtcccaactctgggccctgactgcaggtcattcaggtcccagtcacagtgaaagcagactcattcagctatctggagaagtgtaatctgagggccacttggcatcctgagttaacacagggatgccgcagctggggtaaggaattagagaagggaaggccagtgttactgcagtaagagaaaaccaggaagtccatctaggagatgaaatttgtgcttgcataacagagccatggaaatggctatcccagcatctcccctcactgcagactccattgtaagcaaagcatggacctttttctttgaaaccaaccctgtcacttgttaaatttagaattacctctaaatgctaagtttatttaagaggtaaatgtcctgctattttcagaatggagaaaaaaaaaaaaaaaaaaaccttctgcttctagaattttgtgccctacttgtcactgaaggaggcaggctccgaaagttctcttatagcttctgattatcacagtcctggcttccaacacctgtgttcgccatagatctggacattatgtgcttcctctgaactagtgtcttgatttttaaggcacattcactagagtatgttcaatttcaaccaaaagcatacgtgcaacataccagttt

SEQ ID NO: 278728 - DNA, 4978 bp, Homo sapiens
gtttttagttagtatgaacgggaaggcgagggtaccatttacagcgacgggtaaccacgcgggaggagcaggtcaactcccgacagtggaggtgaagatgcgtgcgcctccgttgtctccctcgcgcgacgcgtccgccgcccgcggttcggtcgggagcggcagcccgtgctccggttccgttccggttccggctggcgtctgcacctgcgaccaccgtgagcagtcatggcgtactccacagtgcagagagtcgctctggcttctgggcttgtcctggctctgtcgctgctgctgcccaaggccttcctgtcccgcgggaagcggcaggagccgccgccgacacctgaaggaaaattgggccgatttccacctatgatgcatcatcaccaggcaccctcagatggccagactcctggggctcgtttccagaggtctcaccttgccgaggcatttgcaaaggccaaaggatcaggtggaggtgctggaggaggaggtagtggaagaggtctgatggggcagattattccaatctacggttttgggatttttttatatatactgtacattctatttaagctctcaaaggggaaaacaactgcagaggatgggaaatgctatactgccatgcctggaaacacccacaggaaaattaccagttttgagcttgctcaactgcaagaaaaactgaaggagacagaagcagccatggaaaaattaatcaacagagtgggacctaatggtgagagagcacagactgtgacttctgaccaagagaaacggttgctacatcagctccgagaaatcaccagggtcatgaaagaaggaaaattcattgacagattttctccagagaaagaagctgaggaggccccttacatggaggactgggaaggttaccctgaagagacttacccaatttatgacctttcagactgtatcaagcgtaggcaagaaacaatcttggtggattaccctgacccaaaagaactttctgctgaagaaatagctgaaagaatgggaatgatagaagaggaagaatcagatcatttgggttgggaaagtctgcccactgaccccagagcccaggaagataattctgttacctcgtgtgatccaaagccagaaacatgttcctgctgttttcatgaagacgaggatcctgctgtcttggcagagaatgctggattcagtgcagatagctaccctgagcaagaggaaaccaccaaagaagagtggtcccaagactttaaagatgaagggttgggcatcagcaccgataaagcatatacaggcagcatgctgaggaagcgtaacccccagggtttagagtgaaaacagccagtctgaagtatccattactcaagtcccaaggtgacctctctctcctcagatttccttcttggccctgtgccctgcactttcttcactgtgttcaagtgtcatagctatcaggccactatcatggatatcatgtatccttcctggtgctcacacacctgtcaccttgtaaaacacggacattagtgtgaacacaggacagcttcgctctttctcttcctgccctagctcttggttggtttatatataaggaatatatttgtgtatttatatatcagacatttggatgtacctttcagttatttaggatttagaaaattctttttggattttccagaattattttatccttcggggatgacagttatatgtgtatatacaacccaggatgacaaaatcatgggtccggtttttgttgccagggctgctgtctcttttcttgcggtcttcatttctcacgagggtgctgggaacttgatcagtcccctggccttttggcactgtggcagagtacacaagtcatacctttatggacagttagctcacaaaacaactgcataatctgggatcactcttggtaaatcaggtgggtggtgcagccaggagatcccctttcctggtcacaacaggagcacaaagaaaccattatctccatgactagctccagaagctgggcccagggagtcgtgatgaggagtggaggtgtatttggcctgtagaatcaacggcctttgagaaccatacaatgcaccttatatggcttgggtgatcaaataacttaaggtccaaattcaaacactttggaaaaagggagctttaatataattatgccaaggtgataggcataaactaagactgtcctggacgtagggtcacccctgtctatagccatttaagatttttgaacctgatgactaaacaaacaaaaccctctttcctttttagaatatcctgtatgcgctatttcccaccagaggcagaggccacaggagataggccatggttcaggtaggaaatgctcttggtcacatcagaactctagatctgggggaataaacaaacccgaattattaccacactctcaaagttctcttcaatctggactatttgtattccaaagaaaaatttagtgctttagctattcagcaatattgagaaaaaacatgaacacatttatgactttgccttgaccattgacttttctaaaatgtgcttccttttcctttatttccctttttttatacaaagaaaatagcccaaatttctcctcttaggtcattccttaacctctcagagaaccagtttccccatgaattgggaataatgctctatttacagggctgtttggattaaataagatgctgtttataaagtgtctgtgccagggcaaagcatgtggtaggtgcttggtgacagcatgatccctgtcaccactctgtcaagtccagtgttgctgagatgtcacacctgacaccctctaaggctaccctgattgccaggagtggcccagggcccttctgcagtctccgggtgcctttagttataacctcttgtctgggtcagaccattagctttcatgtctgcttctagctacaactgtagcctcccttccttttgccttcaaatctgccacagctgcccggcaacaaaaaagattcctaagcatctcgaggtcctgtttaaatgggttagggtccaagcaagccctgagacatcaagtggttgggtcttttatacctttttcatctctacagccctgttctcttcctaaggccaggcccacaggggatactgaggaaccaccagccccttcaggcggcacagcagaccctgaagagaactgctctaacttaagtaccttctgacttcaccatttttccagcctctgggtgtggttctgatgaaccttaaacttgaaaggcacaggccagaggaaggacagtgttgacccacatgtcattggtgaggttatgatctctttgctattatcacctacttacccacctgaggctcctaggaaacaatgaatgaaaggtatagaaaaaaattaggaagtaaacagggcttttttcccctttatgaaaaaagtacacagaagtgttgaaacgattcaagtttaatttgttgatatatgtgtgtacttagacaaacactaaattctacaacatacataatgtcaacatgggaaaataccaagtttgtcattgcacataccaataaataaatacatttgctccagaataccaaagtttattcaaaaagtcaataaaagcacagttttgcaaatttgtctaaaacgccagataatcttgaacaaaaataaaatgtctgaccactccaaaataggaaaagacaatcttgtgcaaatagacatacacagtctaggcattgtggaaactggctgtgttcccagcaagagatactgcaccctcctgaccgagcagtcaggcttccctttcctagccatcctaagttgcgttctaggaaactctggatctcagcctcatctccagctttgcctggaccttgctagggggagggagggacaggagcacagaggaggagaggagagggatgtgatgtctttcttaggaaagaaaaaaaggcacagtgatgagctataaaggtagtgatgagagctataaaggtagtgatgaaagcaaggaataattttcattcaccccaaatcctacggcaagctttgacaatgtaacatctttatcttgtggttaggaaaatggacctagagagattatgtggtttgctcaaaatcacatagctactaagtgcagtagtgctttctataagaccaacttgcctttccacttggttggaaaatttaaaaaccaaacctgtcgtaatctatctgttctgcccctcccgcctgtatcatgagatgactgaaaattccaggtggccataaactcaaacaagagcctagcccttggcttattaccggtggctactacaaacctacagaccagagcccagggtagtatagagtcccaactctgggccctgactgcaggtcattcaggtcccagtcacagtgaaagcagactcattcagctatctggagaagtgtaatctgagggccacttggcatcctgagttaacacagggatgccgcagctggggtaaggaattagagaagggaaggccagtgttactgcagtaagagaaaaccaggaagtccatctaggagatgaaatttgtgcttgcataacagagccatggaaatggctatcccagcatctcccctcactgcagactccattgtaagcaaagcatggacctttttctttgaaaccaaccctgtcacttgttaaatttagaattacctctaaatgctaagtttatttaagaggtaaatgtcctgctattttcagaatggagaaaaaaaaaaaaaaaaaaaccttctgcttctagaattttgtgccctacttgtcactgaaggaggcaggctccgaaagttctcttatagcttctgattatcacagtcctggcttccaacacctgtgttcgccatagatctggacattatgtgcttcctctgaactagtgtcttgatttttaaggcacattcactagagtatgttcaatttcaaccaaaagcatacgtgcaacataccagttt

SEQ ID NO: 278729 - DNA, 4286 bp, Homo sapiens
caaaggaaggaggaactaacttgtggaatgctgagaaaggtaaaaacaccttcatataaggaagaggaacaggctatgacctcatgcttgctttgacaagtataagcatgccagggcaaatatttaggctaaactgtgggagctaagaacagttgatttctttattatggctagcagatatctaagcatgttagcacaggttcttgaataaattttgcttctaagagaagttactattcctaattatatggggagtaaagtctctttgaagaggaatctctactttactttttacacttgtgctttgataattttttacttggaaacctcatcttttggcgttttttttttttgagctatttctctagtgttgctatttgatttaatttctgaccttcatttttgtttcccaaccttttttttttgtttgatatgaggggttccgtgactgaggttctgagctgctgttgatgtgctatacctccttcaattctcagctctcaaaggggaaaacaactgcagaggatgggaaatgctatactgccatgcctggaaacacccacaggaaaattaccagttttgagcttgctcaactgcaagaaaaactgaaggagacagaagcagccatggaaaaattaatcaacagagtgggacctaatggtgagaggataagggcttctgatttcccatgacttaggaaacagaattaagactgtttcattcattgaagatcagaatgccctgcgtacagtctggaaaagtaacatgtgccgcctgaagagacaagagtttgtgataagcagagcacagactgtgacttctgaccaagagaaacggttgctacatcagctccgagaaatcaccagggtcatgaaagaaggaaaattcattgacagattttctccagagaaagaagctgaggaggccccttacatggaggactgggaaggttaccctgaagagacttacccaatttatgacctttcagactgtatcaagcgtaggcaagaaacaatcttggtggattaccctgacccaaaagaactttctgctgaagaaatagctgaaagaatgggaatgatagaagaggaagaatcagatcatttgggttgggaaagtctgcccactgaccccagagcccaggaagataattctgttacctcgtgtgatccaaagccagaaacatgttcctgctgttttcatgaagacgaggatcctgctgtcttggcagagaatgctggattcagtgcagatagctaccctgagcaagaggaaaccaccaaagaagagtggtcccaagactttaaagatgaagggttgggcatcagcaccgataaagcatatacaggcagcatgctgaggaagcgtaacccccagggtttagagtgaaaacagccagtctgaagtatccattactcaagtcccaaggtgacctctctctcctcagatttccttcttggccctgtgccctgcactttcttcactgtgttcaagtgtcatagctatcaggccactatcatggatatcatgtatccttcctggtgctcacacacctgtcaccttgtaaaacacggacattagtgtgaacacaggacagcttcgctctttctcttcctgccctagctcttggttggtttatatataaggaatatatttgtgtatttatatatcagacatttggatgtacctttcagttatttaggatttagaaaattctttttggattttccagaattattttatccttcggggatgacagttatatgtgtatatacaacccaggatgacaaaatcatgggtccggtttttgttgccagggctgctgtctcttttcttgcggtcttcatttctcacgagggtgctgggaacttgatcagtcccctggccttttggcactgtggcagagtacacaagtcatacctttatggacagttagctcacaaaacaactgcataatctgggatcactcttggtaaatcaggtgggtggtgcagccaggagatcccctttcctggtcacaacaggagcacaaagaaaccattatctccatgactagctccagaagctgggcccagggagtcgtgatgaggagtggaggtgtatttggcctgtagaatcaacggcctttgagaaccatacaatgcaccttatatggcttgggtgatcaaataacttaaggtccaaattcaaacactttggaaaaagggagctttaatataattatgccaaggtgataggcataaactaagactgtcctggacgtagggtcacccctgtctatagccatttaagatttttgaacctgatgactaaacaaacaaaaccctctttcctttttagaatatcctgtatgcgctatttcccaccagaggcagaggccacaggagataggccatggttcagccctgttctcttcctaaggccaggcccacaggggatactgaggaaccaccagccccttcaggcggcacagcagaccctgaagagaactgctctaacttaagtaccttctgacttcaccatttttccagcctctgggtgtggttctgatgaaccttaaacttgaaaggcacaggccagaggaaggacagtgttgacccacatgtcattggtgaggttatgatctctttgctattatcacctacttacccacctgaggctcctaggaaacaatgaatgaaaggtatagaaaaaaattaggaagtaaacagggcttttttcccctttatgaaaaaagtacacagaagtgttgaaacgattcaagtttaatttgttgatatatgtgtgtacttagacaaacactaaattctacaacatacataatgtcaacatgggaaaataccaagtttgtcattgcacataccaataaataaatacatttgctccagaataccaaagtttattcaaaaagtcaataaaagcacagttttgcaaatttgtctaaaacgccagataatcttgaacaaaaataaaatgtctgaccactccaaaataggaaaagacaatcttgtgcaaatagacatacacagtctaggcattgtggaaactggctgtgttcccagcaagagatactgcaccctcctgaccgagcagtcaggcttccctttcctagccatcctaagttgcgttctaggaaactctggatctcagcctcatctccagctttgcctggaccttgctagggggagggagggacaggagcacagaggaggagaggagagggatgtgatgtctttcttaggaaagaaaaaaaggcacagtgatgagctataaaggtagtgatgagagctataaaggtagtgatgaaagcaaggaataattttcattcaccccaaatcctacggcaagctttgacaatgtaacatctttatcttgtggttaggaaaatggacctagagagattatgtggtttgctcaaaatcacatagctactaagtgcagtagtgctttctataagaccaacttgcctttccacttggttggaaaatttaaaaaccaaacctgtcgtaatctatctgttctgcccctcccgcctgtatcatgagatgactgaaaattccaggtggccataaactcaaacaagagcctagcccttggcttattaccggtggctactacaaacctacagaccagagcccagggtagtatagagtcccaactctgggccctgactgcaggtcattcaggtcccagtcacagtgaaagcagactcattcagctatctggagaagtgtaatctgagggccacttggcatcctgagttaacacagggatgccgcagctggggtaaggaattagagaagggaaggccagtgttactgcagtaagagaaaaccaggaagtccatctaggagatgaaatttgtgcttgcataacagagccatggaaatggctatcccagcatctcccctcactgcagactccattgtaagcaaagcatggacctttttctttgaaaccaaccctgtcacttgttaaatttagaattacctctaaatgctaagtttatttaagaggtaaatgtcctgctattttcagaatggagaaaaaaaaaaaaaaaaaaaccttctgcttctagaattttgtgccctacttgtcactgaaggaggcaggctccgaaagttctcttatagcttctgattatcacagtcctggcttccaacacctgtgttcgccatagatctggacattatgtgcttcctctgaactagtgtcttgatttttaaggcacattcactagagtatgttcaatttcaaccaaaagcatacgtgcaacataccagttt

SEQ ID NO: 278730 - DNA, 4473 bp, Homo sapiens
gtttttagttagtatgaacgggaaggcgagggtaccatttacagcgacgggtaaccacgcgggaggagcaggtcaactcccgacagtggaggtgaagatgcgtgcgcctccgttgtctccctcgcgcgacgcgtccgccgcccgcggttcggtcgggagcggcagcccgtgctccggttccgttccggttccggctggcgtctgcacctgcgaccaccgtgagcagtcatggcgtactccacagtgcagagagtcgctctggcttctgggcttgtcctggctctgtcgctgctgctgcccaaggccttcctgtcccgcgggaagcggcaggagccgccgccgacacctgaaggaaaattgggccgatttccacctatgatgcatcatcaccaggcaccctcagatggccagactcctggggctcgtttccagaggtctcaccttgccgaggcatttgcaaaggccaaaggatcaggtggaggtgctggaggaggaggtagtggaagaggtctgatggggcagattattccaatctacggttttgggatttttttatatatactgtacattctatttaagctctcaaaggggaaaacaactgcagaggatgggaaatgctatactgccatgcctggaaacacccacaggaaaattaccagttttgagcttgctcaactgcaagaaaaactgaaggagacagaagcagccatggaaaaattaatcaacagagtgggacctaatggtgagagagcacagactgtgacttctgaccaagagaaacggttgctacatcagctccgagaaatcaccagggtcatgaaagaaggaaaattcattgacagattttctccagagaaagaagctgaggaggccccttacatggaggactgggaaggttaccctgaagagacttacccaatttatgacctttcagactgtatcaagcgtaggcaagaaacaatcttggtggattaccctgacccaaaagaactttctgctgaagaaatagctgaaagaatgggaatgatagaagaggaagaatcagatcatttgggttgggaaagtctgcccactgaccccagagcccaggaagataattctgttacctcgtgtgatccaaagccagaaacatgttcctgctgttttcatgaagacgaggatcctgctgtcttggcagagaatgctggattcagtgcagatagctaccctgagcaagaggaaaccaccaaagaagagtggtcccaagactttaaagatgaagggttgggcatcagcaccgataaagcatatacaggcagcatgctgaggaagcgtaacccccagggtttagagtgaaaacagccagtctgaagtatccattactcaagtcccaaggtgacctctctctcctcagatttccttcttggccctgtgccctgcactttcttcactgtgttcaagtgtcatagctatcaggccactatcatggatatcatgtatccttcctggtgctcacacacctgtcaccttgtaaaacacggacattagtgtgaacacaggacagcttcgctctttctcttcctgcctttcctctatcagagaagttgatccattaagtaattatgtttggtctattgtaattacagatgggaccactcaggggcaaaggtctgactcttcctggtaggtgtaacagatagttcacctgtgaacgaacatcagcttacagatgatgaggacttaaggttgcaagaatgaagatttcagactccaagatcccttattctttgggccttgagcagaatatcctgtatgcgctatttcccaccagaggcagaggccacaggagataggccatggttcaggtaggaaatgctcttggtcacatcagaactctagatctgggggaataaacaaacccgaattattaccacactctcaaagttctcttcaatctggactatttgtattccaaagaaaaatttagtgctttagctattcagcaatattgagaaaaaacatgaacacatttatgactttgccttgaccattgacttttctaaaatgtgcttccttttcctttatttccctttttttatacaaagaaaatagcccaaatttctcctcttaggtcattccttaacctctcagagaaccagtttccccatgaattgggaataatgctctatttacagggctgtttggattaaataagatgctgtttataaagtgtctgtgccagggcaaagcatgtggtaggtgcttggtgacagcatgatccctgtcaccactctgtcaagtccagtgttgctgagatgtcacacctgacaccctctaaggctaccctgattgccaggagtggcccagggcccttctgcagtctccgggtgcctttagttataacctcttgtctgggtcagaccattagctttcatgtctgcttctagctacaactgtagcctcccttccttttgccttcaaatctgccacagctgcccggcaacaaaaaagattcctaagcatctcgaggtcctgtttaaatgggttagggtccaagcaagccctgagacatcaagtggttgggtcttttatacctttttcatctctacagccctgttctcttcctaaggccaggcccacaggggatactgaggaaccaccagccccttcaggcggcacagcagaccctgaagagaactgctctaacttaagtaccttctgacttcaccatttttccagcctctgggtgtggttctgatgaaccttaaacttgaaaggcacaggccagaggaaggacagtgttgacccacatgtcattggtgaggttatgatctctttgctattatcacctacttacccacctgaggctcctaggaaacaatgaatgaaaggtatagaaaaaaattaggaagtaaacagggcttttttcccctttatgaaaaaagtacacagaagtgttgaaacgattcaagtttaatttgttgatatatgtgtgtacttagacaaacactaaattctacaacatacataatgtcaacatgggaaaataccaagtttgtcattgcacataccaataaataaatacatttgctccagaataccaaagtttattcaaaaagtcaataaaagcacagttttgcaaatttgtctaaaacgccagataatcttgaacaaaaataaaatgtctgaccactccaaaataggaaaagacaatcttgtgcaaatagacatacacagtctaggcattgtggaaactggctgtgttcccagcaagagatactgcaccctcctgaccgagcagtcaggcttccctttcctagccatcctaagttgcgttctaggaaactctggatctcagcctcatctccagctttgcctggaccttgctagggggagggagggacaggagcacagaggaggagaggagagggatgtgatgtctttcttaggaaagaaaaaaaggcacagtgatgagctataaaggtagtgatgagagctataaaggtagtgatgaaagcaaggaataattttcattcaccccaaatcctacggcaagctttgacaatgtaacatctttatcttgtggttaggaaaatggacctagagagattatgtggtttgctcaaaatcacatagctactaagtgcagtagtgctttctataagaccaacttgcctttccacttggttggaaaatttaaaaaccaaacctgtcgtaatctatctgttctgcccctcccgcctgtatcatgagatgactgaaaattccaggtggccataaactcaaacaagagcctagcccttggcttattaccggtggctactacaaacctacagaccagagcccagggtagtatagagtcccaactctgggccctgactgcaggtcattcaggtcccagtcacagtgaaagcagactcattcagctatctggagaagtgtaatctgagggccacttggcatcctgagttaacacagggatgccgcagctggggtaaggaattagagaagggaaggccagtgttactgcagtaagagaaaaccaggaagtccatctaggagatgaaatttgtgcttgcataacagagccatggaaatggctatcccagcatctcccctcactgcagactccattgtaagcaaagcatggacctttttctttgaaaccaaccctgtcacttgttaaatttagaattacctctaaatgctaagtttatttaagaggtaaatgtcctgctattttcagaatggagaaaaaaaaaaaaaaaaaaaccttctgcttctagaattttgtgccctacttgtcactgaaggaggcaggctccgaaagttctcttatagcttctgattatcacagtcctggcttccaacacctgtgttcgccatagatctggacattatgtgcttcctctgaactagtgtcttgatttttaaggcacattcactagagtatgttcaatttcaaccaaaagcatacgtgcaacataccagttt

SEQ ID NO: 278731 - DNA, 4222 bp, Homo sapiens
gtttttagttagtatgaacgggaaggcgagggtaccatttacagcgacgggtaaccacgcgggaggagcaggtcaactcccgacagtggaggtgaagatgcgtgcgcctccgttgtctccctcgcgcgacgcgtccgccgcccgcggttcggtcgggagcggcagcccgtgctccggttccgttccggttccggctggcgtctgcacctgcgaccaccgtgagcagtcatggcgtactccacagtgcagagagtcgctctggcttctgggcttgtcctggctctgtcgctgctgctgcccaaggccttcctgtcccgcgggaagcggcaggagccgccgccgacacctgaaggaaaattgggccgatttccacctatgatgcatcatcaccaggcaccctcagatggccagactcctggggctcgtttccagaggtctcaccttgccgaggcatttgcaaaggccaaaggatcaggtggaggtgctggaggaggaggtagtggaagaggtctgatggggcagattattccaatctacggttttgggatttttttatatatactgtacattctatttaagctctcaaaggggaaaacaactgcagaggatgggaaatgctatactgccatgcctggaaacacccacaggaaaattaccagttttgagcttgctcaactgcaagaaaaactgaaggagacagaagcagccatggaaaaattaatcaacagagtgggacctaatggtgagagagcacagactgtgacttctgaccaagagaaacggttgctacatcagctccgagaaatcaccagggtcatgaaagaaggaaaattcattgacagattttctccagagaaagaagctgaggaggccccttacatggaggactgggaaggttaccctgaagagacttacccaatttatgacctttcagactgtatcaagcgtaggcaagaaacaatcttggtggattaccctgacccaaaagaactttctgctgaagaaatagctgaaagaatgggaatgatagaagaggaagaatcagatcatttgggttgggaaagtctgcccactgaccccagagcccaggaagataattctgttacctcgtgtgatccaaagccagaaacatgttcctgctgttttcatgaagacgaggatcctgctgtcttggcagagaatgctggattcagtgcagatagctaccctgagcaagaggaaaccaccaaagaagagtggtcccaagactttaaagatgaagggttgggcatcagcaccgataaagcatatacaggcagcatgctgaggaagcgtaacccccagggtttagagtgaaaacagccagtctgaagtatccattactcaagtcccaagatgggaccactcaggggcaaaggtctgactcttcctggtaggtgtaacagatagttcacctgtgaacgaacatcagcttacagatgatgaggacttaaggttgcaagaatgaagatttcagactccaagatcccttattctttgggccttgagcagaatatcctgtatgcgctatttcccaccagaggcagaggccacaggagataggccatggttcaggtaggaaatgctcttggtcacatcagaactctagatctgggggaataaacaaacccgaattattaccacactctcaaagttctcttcaatctggactatttgtattccaaagaaaaatttagtgctttagctattcagcaatattgagaaaaaacatgaacacatttatgactttgccttgaccattgacttttctaaaatgtgcttccttttcctttatttccctttttttatacaaagaaaatagcccaaatttctcctcttaggtcattccttaacctctcagagaaccagtttccccatgaattgggaataatgctctatttacagggctgtttggattaaataagatgctgtttataaagtgtctgtgccagggcaaagcatgtggtaggtgcttggtgacagcatgatccctgtcaccactctgtcaagtccagtgttgctgagatgtcacacctgacaccctctaaggctaccctgattgccaggagtggcccagggcccttctgcagtctccgggtgcctttagttataacctcttgtctgggtcagaccattagctttcatgtctgcttctagctacaactgtagcctcccttccttttgccttcaaatctgccacagctgcccggcaacaaaaaagattcctaagcatctcgaggtcctgtttaaatgggttagggtccaagcaagccctgagacatcaagtggttgggtcttttatacctttttcatctctacagccctgttctcttcctaaggccaggcccacaggggatactgaggaaccaccagccccttcaggcggcacagcagaccctgaagagaactgctctaacttaagtaccttctgacttcaccatttttccagcctctgggtgtggttctgatgaaccttaaacttgaaaggcacaggccagaggaaggacagtgttgacccacatgtcattggtgaggttatgatctctttgctattatcacctacttacccacctgaggctcctaggaaacaatgaatgaaaggtatagaaaaaaattaggaagtaaacagggcttttttcccctttatgaaaaaagtacacagaagtgttgaaacgattcaagtttaatttgttgatatatgtgtgtacttagacaaacactaaattctacaacatacataatgtcaacatgggaaaataccaagtttgtcattgcacataccaataaataaatacatttgctccagaataccaaagtttattcaaaaagtcaataaaagcacagttttgcaaatttgtctaaaacgccagataatcttgaacaaaaataaaatgtctgaccactccaaaataggaaaagacaatcttgtgcaaatagacatacacagtctaggcattgtggaaactggctgtgttcccagcaagagatactgcaccctcctgaccgagcagtcaggcttccctttcctagccatcctaagttgcgttctaggaaactctggatctcagcctcatctccagctttgcctggaccttgctagggggagggagggacaggagcacagaggaggagaggagagggatgtgatgtctttcttaggaaagaaaaaaaggcacagtgatgagctataaaggtagtgatgagagctataaaggtagtgatgaaagcaaggaataattttcattcaccccaaatcctacggcaagctttgacaatgtaacatctttatcttgtggttaggaaaatggacctagagagattatgtggtttgctcaaaatcacatagctactaagtgcagtagtgctttctataagaccaacttgcctttccacttggttggaaaatttaaaaaccaaacctgtcgtaatctatctgttctgcccctcccgcctgtatcatgagatgactgaaaattccaggtggccataaactcaaacaagagcctagcccttggcttattaccggtggctactacaaacctacagaccagagcccagggtagtatagagtcccaactctgggccctgactgcaggtcattcaggtcccagtcacagtgaaagcagactcattcagctatctggagaagtgtaatctgagggccacttggcatcctgagttaacacagggatgccgcagctggggtaaggaattagagaagggaaggccagtgttactgcagtaagagaaaaccaggaagtccatctaggagatgaaatttgtgcttgcataacagagccatggaaatggctatcccagcatctcccctcactgcagactccattgtaagcaaagcatggacctttttctttgaaaccaaccctgtcacttgttaaatttagaattacctctaaatgctaagtttatttaagaggtaaatgtcctgctattttcagaatggagaaaaaaaaaaaaaaaaaaaccttctgcttctagaattttgtgccctacttgtcactgaaggaggcaggctccgaaagttctcttatagcttctgattatcacagtcctggcttccaacacctgtgttcgccatagatctggacattatgtgcttcctctgaactagtgtcttgatttttaaggcacattcactagagtatgttcaatttcaaccaaaagcatacgtgcaacataccagttt

SEQ ID NO: 278732 - DNA, 4399 bp, Homo sapiens
ctaacatctctagttcccagctatgcagttggaggatcaattcctagaataattatctgctgcaattgcactttctattccagtacccagacagaccatagtgatgtttacgtccattgcctaggagtatttaccactaaatggttggattgtctgatatttctaagcagagcacagactgtgacttctgaccaagagaaacggttgctacatcagctccgagaaatcaccagggtcatgaaagaaggaaaattcattgacagattttctccagagaaagaagctgaggaggccccttacatggaggactgggaaggttaccctgaagagacttacccaatttatgacctttcagactgtatcaagcgtaggcaagaaacaatcttggtggattaccctgacccaaaagaactttctgctgaagaaatagctgaaagaatgggaatgatagaagaggaagaatcagatcatttgggttgggaaagtctgcccactgaccccagagcccaggaagataattctgttacctcgtgtgatccaaagccagaaacatgttcctgctgttttcatgaagacgaggatcctgctgtcttggcagagaatgctggattcagtgcagatagctaccctgagcaagaggaaaccaccaaagaagagtggtcccaagactttaaagatgaagggttgggcatcagcaccgataaagcatatacaggcagcatgctgaggaagcgtaacccccagggtttagagtgaaaacagccagtctgaagtatccattactcaagtcccaaggtgacctctctctcctcagatttccttcttggccctgtgccctgcactttcttcactgtgttcaagtgtcatagctatcaggccactatcatggatatcatgtatccttcctggtgctcacacacctgtcaccttgtaaaacacggacattagtgtgaacacaggacagcttcgctctttctcttcctgccctagctcttggttggtttatatataaggaatatatttgtgtatttatatatcagacatttggatgtacctttcagttatttaggatttagaaaattctttttggattttccagaattattttatccttcggggatgacagttatatgtgtatatacaacccaggatgacaaaatcatgggtccggtttttgttgccagggctgctgtctcttttcttgcggtcttcatttctcacgagggtgctgggaacttgatcagtcccctggccttttggcactgtggcagagtacacaagtcatacctttatggacagttagctcacaaaacaactgcataatctgggatcactcttggtaaatcaggtgggtggtgcagccaggagatcccctttcctggtcacaacaggagcacaaagaaaccattatctccatgactagctccagaagctgggcccagggagtcgtgatgaggagtggaggtgtatttggcctgtagaatcaacggcctttgagaaccatacaatgcaccttatatggcttgggtgatcaaataacttaaggtccaaattcaaacactttggaaaaagggagctttaatataattatgccaaggtgataggcataaactaagactgtcctggacgtagggtcacccctgtctatagccatttaagatttttgaacctgatgactaaacaaacaaaaccctctttcctttttagaatatcctgtatgcgctatttcccaccagaggcagaggccacaggagataggccatggttcaggtaggaaatgctcttggtcacatcagaactctagatctgggggaataaacaaacccgaattattaccacactctcaaagttctcttcaatctggactatttgtattccaaagaaaaatttagtgctttagctattcagcaatattgagaaaaaacatgaacacatttatgactttgccttgaccattgacttttctaaaatgtgcttccttttcctttatttccctttttttatacaaagaaaatagcccaaatttctcctcttaggtcattccttaacctctcagagaaccagtttccccatgaattgggaataatgctctatttacagggctgtttggattaaataagatgctgtttataaagtgtctgtgccagggcaaagcatgtggtaggtgcttggtgacagcatgatccctgtcaccactctgtcaagtccagtgttgctgagatgtcacacctgacaccctctaaggctaccctgattgccaggagtggcccagggcccttctgcagtctccgggtgcctttagttataacctcttgtctgggtcagaccattagctttcatgtctgcttctagctacaactgtagcctcccttccttttgccttcaaatctgccacagctgcccggcaacaaaaaagattcctaagcatctcgaggtcctgtttaaatgggttagggtccaagcaagccctgagacatcaagtggttgggtcttttatacctttttcatctctacagccctgttctcttcctaaggccaggcccacaggggatactgaggaaccaccagccccttcaggcggcacagcagaccctgaagagaactgctctaacttaagtaccttctgacttcaccatttttccagcctctgggtgtggttctgatgaaccttaaacttgaaaggcacaggccagaggaaggacagtgttgacccacatgtcattggtgaggttatgatctctttgctattatcacctacttacccacctgaggctcctaggaaacaatgaatgaaaggtatagaaaaaaattaggaagtaaacagggcttttttcccctttatgaaaaaagtacacagaagtgttgaaacgattcaagtttaatttgttgatatatgtgtgtacttagacaaacactaaattctacaacatacataatgtcaacatgggaaaataccaagtttgtcattgcacataccaataaataaatacatttgctccagaataccaaagtttattcaaaaagtcaataaaagcacagttttgcaaatttgtctaaaacgccagataatcttgaacaaaaataaaatgtctgaccactccaaaataggaaaagacaatcttgtgcaaatagacatacacagtctaggcattgtggaaactggctgtgttcccagcaagagatactgcaccctcctgaccgagcagtcaggcttccctttcctagccatcctaagttgcgttctaggaaactctggatctcagcctcatctccagctttgcctggaccttgctagggggagggagggacaggagcacagaggaggagaggagagggatgtgatgtctttcttaggaaagaaaaaaaggcacagtgatgagctataaaggtagtgatgagagctataaaggtagtgatgaaagcaaggaataattttcattcaccccaaatcctacggcaagctttgacaatgtaacatctttatcttgtggttaggaaaatggacctagagagattatgtggtttgctcaaaatcacatagctactaagtgcagtagtgctttctataagaccaacttgcctttccacttggttggaaaatttaaaaaccaaacctgtcgtaatctatctgttctgcccctcccgcctgtatcatgagatgactgaaaattccaggtggccataaactcaaacaagagcctagcccttggcttattaccggtggctactacaaacctacagaccagagcccagggtagtatagagtcccaactctgggccctgactgcaggtcattcaggtcccagtcacagtgaaagcagactcattcagctatctggagaagtgtaatctgagggccacttggcatcctgagttaacacagggatgccgcagctggggtaaggaattagagaagggaaggccagtgttactgcagtaagagaaaaccaggaagtccatctaggagatgaaatttgtgcttgcataacagagccatggaaatggctatcccagcatctcccctcactgcagactccattgtaagcaaagcatggacctttttctttgaaaccaaccctgtcacttgttaaatttagaattacctctaaatgctaagtttatttaagaggtaaatgtcctgctattttcagaatggagaaaaaaaaaaaaaaaaaaaccttctgcttctagaattttgtgccctacttgtcactgaaggaggcaggctccgaaagttctcttatagcttctgattatcacagtcctggcttccaacacctgtgttcgccatagatctggacattatgtgcttcctctgaactagtgtcttgatttttaaggcacattcactagagtatgttcaatttcaaccaaaagcatacgtgcaacataccagttt

SEQ ID NO: 278733 - DNA, 3379 bp, Homo sapiens
gtttttagttagtatgaacgggaaggcgagggtaccatttacagcgacgggtaaccacgcgggaggagcaggtcaactcccgacagtggaggtgaagatgcgtgcgcctccgttgtctccctcgcgcgacgcgtccgccgcccgcggttcggtcgggagcggcagcccgtgctccggttccgttccggttccggctggcgtctgcacctgcgaccaccgtgagcagtcatggcgtactccacagtgcagagagtcgctctggcttctgggcttgtcctggctctgtcgctgctgctgcccaaggccttcctgtcccgcgggaagcggcaggagccgccgccgacacctgaaggaaaattgggccgatttccacctatgatgcatcatcaccaggcaccctcagatggccagactcctggggctcgtttccagaggtctcaccttgccgaggcatttgcaaaggccaaaggatcaggtggaggtgctggaggaggaggtagtggaagaggtctgatggggcagattattccaatctacggttttgggatttttttatatatactgtacattctatttaagctctcaaaggggaaaacaactgcagaggatgggaaatgctatactgccatgcctggaaacacccacaggaaaattaccagttttgagcttgctcaactgcaagaaaaactgaaggagacagaagcagccatggaaaaattaatcaacagagtgggacctaatggtgagagagcacagactgtgacttctgaccaagagaaacggttgctacatcagctccgagaaatcaccagggtcatgaaagaaggaaaattcattgacagattttctccagagaaagaagctgaggaggccccttacatggaggactgggaaggttaccctgaagagacttacccaatttatgacctttcagactgtatcaagcgtaggcaagaaacaatcttggtggattaccctgacccaaaagaactttctgctgaagaaatagctgaaagaatgggaatgatagaagaggaagaatcagatcatttgggttgggaaagtctgcccactgaccccagagcccaggaagataattctgttacctcgtgtgatccaaagccagaaacatgttcctgctgttttcatgaagacgaggatcctgctgtcttggcagagaatgctggattcagtgcagatagctaccctgagcaagaggaaaccaccaaagaagagtggtcccaagactttaaagatgaagggttgggcatcagcaccgataaagcatatacaggcagcatgctgaggaagcgtaacccccagggtttagagtgaaaacagccagtctgaagtatccattactcaagtcccaaggtgacctctctctcctcagatttccttcttggccctgtgccctgcactttcttcactgtgttcaagtgtcatagctatcaggccactatcatggatatcatgtatccttcctggtgctcacacacctgtcaccttgtaaaacacggacattagtgtgaacacaggacagcttcgctctttctcttcctgcctttcctctatcagagaagttgatccattaagtaattatgtttggtctattgtaattacagatgggaccactcaggggcaaaggtctgactcttcctggtaggtgtaacagatagttcacctgtgaacgaacatcagcttacagatgatgaggacttaaggttgcaagaatgaagatttcagactccaagatcccttattctttgggccttgagcaggttagtagtcccctggtgagaagagaacattttgtttgtggggctaatgggcccagaggagggtaagactctgctgtctaagctgaagcctcttcctcgcagcgagggtcttcctaggaacattgatgctgcctcagacatcctcttttctccagagtagggaagactcccactgatctgagaatgagcccagacgcttgtttggggactgttttactctgatactacctggatatctagcttcctttacccctgttctgcttaacagaactgccaagcccagaagtacctttgcactcctggttttcagtggacagaggaagctttagatagagactttagaccctgccctgcagagtcaagacttgaggccattgaagctgcaggaagccctgcccagggatggtcctgccatgaggaggctgcaaccctataagagggctcaagattgtgaattctgctcctgccatgaggagctcagaaggccaggaagccagcaataggggagagaatctgtgtgcttatggacagtccttacctaaagctgtttctgaatgttgcaccctttgagaaatttcttctcagaaccataaattgaaacaaatgaggactgatcttgtatacaaagtgccaactcaagagggaagttggagtatgtctgttgcagagaaccaatatagcagtgcccaggggtagagaccatgtgttccatactcggatatttgggtctttttgagagagctggggaaagtagcagcaactagattaagactgggaggattttgaccaaactaaaggccttttctccttactgcatctgacgtgtgtcttcttgagacaagatagcacccatgaattacatcatgaggtatgtgtgaattcagtttacatgtaagacctgagagttcgaagagggcacattcccaaagacattcccagtcatgaaatgtagaagactggaaaattaagacattatgtaaaggtagatatggcttttagagttacattatgcttggcatgaataaggtgccaggaaaacagtttaaaattatacatcagcatacagactgctgttagaaggtatgggatcatattaagataatctgtcagctactactaggcatttattgttaattgagttacagaaagtcattcaagactgagtttatagaaagcatattgcatctatctctgtgtagaacatttgattcacattgtgaagaatgcagtttaaaatatactgaatgcaatctagatgtattgtacacgaaaggtgaaaaataacaggtgctctttactgtttagataaattgttttctgtgttatttcccttcgttcactgtgaggggttgattcatgaggagagccctgggttcctggctcaggtttacttttggccttaggataggattcccttattagagataaatactgctgttctcttctagctcattcattcatttagcagtcaattgctcagtgccaggtgctaggaacagaggctcaatctctaccctcagaaaactcagtgtgacgagagagagcctgacagataaaatgaactatgaccctgtaagagggctcaggatcgtgaatcc

SEQ ID NO: 278734 - DNA, 578 bp, Homo sapiens
gcctggtttttcctaggttataattgtagaacaaagattattataatattggaataaagagttatgctataaactaatgattagtaatatatataatcatagctataatctatttctagtataactattcttattctatgtattttctttattatactggaacagcttgtgccctcggtctcttgccttggcagctgggtggcttgcctcccacatggcactgctgggcattgtctgttaatattgaataattgttttaagattattttcaataaggctttaccttttttaacttgcactgtggccatgagctctgccggaagtgacttgttggtgttatctcctcagttataaagtgaagggatttttctttttcagattactgagagtcttccgttactagggcagaggactgctgtttgctgacacaatcttggtgcgttggaagtgaaagggaagaggcactggtggctgtgctttgggcccgagcagccagaagccagttgccatcacctatgacgaggagacagcgcctggggcagagcccagtatggggtgcgttcagggtagatcaggag

SEQ ID NO: 278735 - DNA, 537 bp, Homo sapiens
gcctggtttttcctaggttataattgtagaacaaagattattataatattggaataaagagttatgctataaactaatgattagtaatatatataatcatagctataatctatttctagtataactattcttattctatgtattttctttattatactggaacagcttgtgccctcggtctcttgccttggcagctgggtggcttgcctcccacatggcactgctgggcattgtctgttaatattgaataattgttttaagattattttcaataaggctttaccttttttaacttgcactgtggccatgagctctgccggaagtgacttgttggtgttatctcctcagttataaagtgaagggatttttctttttcagattactgagagtcttccgttactaggtaagtcgccccatccttataactccaggtgacactgactggggtttatgggatgaaagaggagtgtgtgcttggatgatggggtgtgatagtgaaggggtgaaaggtttcttctcacacatagacatcgtgag

SEQ ID NO: 278736 - DNA, 1905 bp, Homo sapiens
gggatttggatggcagagagaaacaggcactgaagatttttggtcaggacagggcagagaaataagaagagttgaaaattcaccaaaggatagataaacccagggcgtttagagaaaacctgtagtgtgcaaaggagcccagaatcctggggcaacttggagggaaatatacttaatttgattcactaagttaggcccagtgaagggattgggtggcataggtagaagccgaaaaataaagtatcttgtattgctggagtagcctctgtttctgaggtcacatccaaacttagcgaggcagcttaacctggtgagagacatgggttcaactcctggcttctgcactgctagggcagaggactgctgtttgctgacacaatcttggtgcgttggaagtgaaagggaagaggcactggtggctgtgctttgggcccgagcagccagaagccagttgccatcacctatgacgaggagacagcgcctggggcagagcccagtatggggcctagccagggctgggttctcacccacctgtgccgccctgccttgttacctggaagcacagccttggggactgagcaggccctcactgtcactttaagaagggaatcagccactttgtgctcaccacctctggggaaggtgtgagaggagagaaggaagtggctgtttggctgctgacaacatgaagacttcctgcgatgagaacagaggcacaggtgccggccctgcagcccccagaacctggactggagggggccatggggcaccggaccctggtcctgccctgggtgctgctgaccttgtgtgtcactgcggggaccccggaggtgtgggttcaagttcggatggaggccaccgagctctcgtccttcaccatccgttgtgggttcctggggtctggctccatctccctggtgactgtgagctgggggggccccgacggtgctggggggaccacgctggctgtgttgcacccagaacgtggcatccggcaatgggcccctgctcgccaggcccgctgggaaacccagagcagcatctctctcatcctggaaggctctggggccagcagcccctgcgccaacaccaccttctgctgcaagtttgcgtccttccctgagggctcctgggaggcctgtgggagcctcccgcccagctcagacccagggctctctgccccgccgactcctgcccccattctgcgggcagacctggccgggatcttgggggtctcaggagtcctcctctttggctgtgtctacctccttcatctgctgcgccgacataagcaccgccctgcccctaggctccagccgtcccgcaccagcccccaggcaccgagagcacgagcatgggcaccaagccaggcctcccaggctgctcttcacgtcccttatgccactatcaacaccagctgccgcccagctactttggacacagctcacccccatggggggccgtcctggtgggcgtcactccccacccacgctgcacaccggccccagggccctgccgcctgggcctccacacccatccctgcacgtggcagctttgtctctgttgagaatggactctacgctcaggcaggggagaggcctcctcacactggtcccggcctcactcttttccctgaccctcgggggcccagggccatggaaggacccttaggagttcgatgagagagaccatgaggccactgggctttccccctcccaggcctcctgggtgtcatccccttactttaattcttgggcctccaataagtgtcccataggtgtctggccaggcccacctgctgcggatgtggtctgtgtgcgtgtgtgggcacaggtgtgagtgtgtgagtgacagttaccccatttcagtcatttcctgctgcaactaagtcagcaacacagtttc

SEQ ID NO: 278737 - DNA, 1245 bp, Homo sapiens
agggggtggaatagaacttaggctaggtacgaggctgggtggtctagagagaggcacaggtgccggccctgcagcccccagaacctggactggagggggccatggggcaccggaccctggtcctgccctgggtgctgctgaccttgtgtgtcactgcggggaccccggaggtgtgggttcaagttcggatggaggccaccgagctctcgtccttcaccatccgttgtgggttcctggggtctggctccatctccctggtgactgtgagctgggggggccccgacggtgctggggggaccacgctggctgtgttgcacccagaacgtggcatccggcaatgggcccctgctcgccaggcccgctgggaaacccagagcagcatctctctcatcctggaaggctctggggccagcagcccctgcgccaacaccaccttctgctgcaagtttgcgtccttccctgagggctcctgggaggcctgtgggagcctcccgcccagctcagacccagggctctctgccccgccgactcctgcccccattctgcgggcagacctggccgggatcttgggggtctcaggagtcctcctctttggctgtgtctacctccttcatctgctgcgccgacataagcaccgccctgcccctaggctccagccgtcccgcaccagcccccaggcaccgagagcacgagcatgggcaccaagccaggcctcccaggctgctcttcacgtcccttatgccactatcaacaccagctgccgcccagctactttggacacagctcacccccatggggggccgtcctggtgggcgtcactccccacccacgctgcacaccggccccagggccctgccgcctgggcctccacacccatccctgcacgtggcagctttgtctctgttgagaatggactctacgctcaggcaggggagaggcctcctcacactggtcccggcctcactcttttccctgaccctcgggggcccagggccatggaaggacccttaggagttcgatgagagagaccatgaggccactgggctttccccctcccaggcctcctgggtgtcatccccttactttaattcttgggcctccaataagtgtcccataggtgtctggccaggcccacctgctgcggatgtggtctgtgtgcgtgtgtgggcacaggtgtgagtgtgtgagtgacagttaccccatttcagtcatttcctgctgcaactaagtcagcaacacagtttc

SEQ ID NO: 278738 - DNA, 777 bp, Homo sapiens
ccaggggcccagcagcagcacaagccagcttcctcccctccggcctcagtcctcttacctctccaggctcgtccaagatcgacatccatcccttcttgaagttgagcagatcgggctgtggggagatgaggagggagagatggggtctccctatgtttcccaggttggtttcaaactcctgagctcaagtgatccgctcacctcggcctccaaaaatgctgggattataggtgtgagccaatgtgcccggccaaccaatgtgtgggcgtgcacccgttgctcaggttcccagaacgctgggccgtttgttagatgctcttttcctgcagataaagaaatggaggcccagggagctgaagttctttcccagcatttgctgccaggagtctctccaccatgaggaatgaggccaaggttaagtccatctaactctagaaactggccttctggcaccccgggctgagttttctcaccctacccttgcacctcactcaggcagtcagtccttgggagagtgaatgaacacgcaggagacctcacctaccaccagggtcctggtccagtgccctgggcacctaacagcaccagcctcctccaggcttttctggcccctgcgactcctcctagtacccgcaacacagtgaccagaccacttccctgctcaaagttcttccacacatcaccaatgctgacagatcagtgctacattcctcttctaggcagtcaggaaccatcacaacctggctcctgcctgtcatcctggccttccagattctc

SEQ ID NO: 278739 - DNA, 949 bp, Homo sapiens
attaatcgagccggtacccggcgccggggagcgaagttctttcccatgcatttgtgcaggagtctctccaccatgaggaatgaggccaaggttaagtccatctaactctagaaactggccttctggctccccgggaggctcggcgccgtgatttggcggggaccggggcaaagcacccagtactaacgactcagcgggtcccactcgccaagagtcgattttcgtcctcaccacagacttgggagggaggtcttattttgctaatgagaaaacggaggctcagaggggtgagccgatttgcccgaggtcacacaggaagaggcggaattcctagcgagtaagctggacacaaagtgagttcttggatggcagggtctctcccaaatgcccactcctcacaaatgggtcttttttggtttggggtttttcaggtgtgggcgtgcacccgttgctcaggttcccagaacgctgggccgtttgttagatgctcttttcctgcagataaagaaatggaggcccagggagctgaagttctttcccagcatttgctgccaggagtctctccaccatgaggaatgaggccaaggttaagtccatctaactctagaaactggccttctggcaccccgggctgagttttctcaccctacccttgcacctcactcaggcagtcagtccttgggagagtgaatgaacacgcaggagacctcacctaccaccagggtcctggtccagtgccctgggcacctaacagcaccagcctcctccaggcttttctggcccctgcgactcctcctagtacccgcaacacagtgaccagaccacttccctgctcaaagttcttccacacatcaccaatgctgacagatcagtgctacattcctcttctaggcagtcaggaaccatcacaacctggctcctgcctgtcatcctggccttccagattctc

SEQ ID NO: 278740 - DNA, 417 bp, Homo sapiens
ccaggggcccagcagcagcacaagccagcttcctcccctccggcctcagtcctcttacctctccaggctcgtccaagatcgacatccatcccttcttgaagttgagcagatcgggctgtggggagatgaggagggagagatggggtctccctatgtttcccaggttggtttcaaactcctgagctcaagtgatccgctcacctcggcctccaaaaatgctgggattataggtgtgagccaatgtgcccggccaaccaatgtgagtttttaaactggcagggaaacctgtccccagggtcaaaaggtccgatcatctaaatctcccacgatgccccttcatacagggctcttcaggcccagctacctcttcttcacctgctagaagctcagtttctccttccgcctttcgggagtact

SEQ ID NO: 278741 - DNA, 479 bp, Homo sapiens
ccaggggcccagcagcagcacaagccagcttcctcccctccggcctcagtcctcttacctctccaggctcgtccaagatcgacatccatcccttcttgaagttgagcagatcgggctgtggggagatgaggagggagagatggggtctccctatgtttcccaggttggtttcaaactcctgagctcaagtgatccgctcacctcggcctccaaaaatgctgggattataggtgtgagccaatgtgcccggccaaccaattccatctccacctgacaaggccctataatcacaggaggacacctccctcaggaaggctgctgccaccagcagggatgtgctgtccatcttccaagcaccccacacgctgcttccggcagccttacccttgctcagcacgtgctgcccccaggacaggcaactgtgaaagaaagctggaacggacctggatacaaattctggcttagcctgggactcactg

SEQ ID NO: 278742 - DNA, 1341 bp, Homo sapiens
ggcacgaggggtcgacccctccgggatgggggccagggcagcctccgcggctatcccgggagtcctgctccgacaccacctccacaggggaagccgctcggagagacgcagggacccaggcaagggatgcgggcaaacgcgccaagggttcggcagaggggcgtgaccgccagttggccgggctgagcgaggcgccagagggaagcctgcaaggtacgtctgcgagagccgggtgcgggcgcggcaggggaaaaggggggcgctggctctcttaccgccaggtccggattgcggctgtccctgtgtgacacggctcggatgacccccgctcgccagcttcgccagccgcgtccgctctcccagcgctccgaacgtgcctcgtcgccgaccgccacacacaggaaccgcttacccaccagctctgcccgcgtctctaccgccatagctgtcgctgccgaagcggccgctgcctcctccagtgcgagggaaccgatgaaacctcactcttaccggccgctcatgctgaggagagcggaccgggacacagcagcggacccgaaagagcgcagactcgggacgaaccggccgctctgccccggacacagcgacctcgggccctccccgcaaacactcctttggactcccagattcgcagccttgtgctgcagcgccacacaagaaaactgaaacaaaacccaacgcggccgtcgaagaccccgaggcagcccagccgccgccaccgcgccgcggccagtactgctccgtctccctccccgggcagcggcggcgcgcagcgcgtctccttccgccggcgcgggcggggcagcagccgcgggagggtcggcggaaccaccgcagacggaaagtagtgcccggccctgcggaggcggcagcggccactgggtccgtccagatccagaggcggcggcggcggcggcagcgggagacgaaaaaatgaagagggccgcgggaaagtaggcgacagctattcaaagcttttgggggtctacctttgtattcgttgctccctcagaggtggaggtgaggggaaagtgaagtgtagtggttccactctgatcacaaaataaactcctgggttgacgcctcacccgcggtttgatgttcagagcacacagcgcccgccgcctgagttagcctgaattagcagtcccgcagtaacagcagcagagcaggacaacacttctactgaaaactaagccccaaagtcacagcagaaccaaccgttcatgacttcaagggaaaacgagggggaaaatgtgatcctttcattcttctcatttgtggtgatactaattacatgtttaagctattcacagattt

SEQ ID NO: 278743 - DNA, 1227 bp, Homo sapiens
ggcacgagggaaagcgcctcttccccgtccctctcctacctccgccaggcaggaagagagctttctccttagagccgtgacttaggggtgcccagccccaggcaccttgagccccatcctcctgcgatgccccctcggagtgtggctcttcgggctccatcttaatgtgcagtgactcctgagcgtcccctgaaggtaccgcctcccccagcttagaaggcatttcctgatgaggatgtccacgatctggaacctagaaaggacagccccatcagcacccagatgagtgggagagacacccagggccacatggcagtgcgctccggcagcgtcggaaaccaacatgcaagacgcagcttgaaggactgtccttgctgcattcatccagctcaccccagcaaggacgggcggcaagaggaggaatattcaccaagccgcctccacagtgccggtgggcgtggtgcccaagggcagctaccccttctcagctccagcctcacactgacctcagcagtgtagactgctgtctattagtgtatgaagaaaccaagtgtagtggcttgaatagtgtcctctaagaatccgtgtcctccctggacctcagaatgggaccttattggggaaaagggtctttatacagaataggagaggacacagagacacagagaaggaagcagagactggagggatgcccacaccaaggacaccaggagcccccaaggagttggaagagacggagtttcgctcttcttcccatgctggagtgcaatggcgcaatctcggctcaccccaacctccgcctcctgggttcaggcgattctcctgcctcagcctcctgattacctgggattacaggcatgtgccaccacacctggctagttttgtgtttttagtagagatggggtttctccatgtcggtcaggctggtctggaactcctgacctcaggtgatccgcccacctcagcctcctaaaatgctgggattacaggcgtgagccaccgcgcccagcctataaaattgattctttaaaaaaaattagaacatttaccgatgctggacccaccttccccaccttcagggtccactttctaggtggccacagtgcctgcttggcccctgtagcatttgagtttgcaactctgcttttggagttaaacatgttttaggagtcctgggattctgattgatgctattgtcaatttgatgaaagaaaaattactcctggg

SEQ ID NO: 278744 - DNA, 867 bp, Homo sapiens
ggcagtgggggccccctcccccgggaagggagtctccacagcctgcacggggcgggcgggggagttgggtggagactgggagtagggaagacaggaagtccctcccagatcccattccccatgcagccgcagccctacagcgttcccggttttgagggttccgggtgtggagtctcgagcctgggttgcacctgctcttggccgggaggtgactcccagagccgcaatgccagctcatgaggatggctttacccaggacgcgttcatgatgccagcaaggcagagccaccaaaacagaaaaatggaagatgcattttgtggaaagattgtgttatttgaaatttcaaagcgagcactgcagttgtcctcacagacggagtttcgctcttcttcccatgctggagtgcaatggcgcaatctcggctcaccccaacctccgcctcctgggttcaggcgattctcctgcctcagcctcctgattacctgggattacaggcatgtgccaccacacctggctagttttgtgtttttagtagagatggggtttctccatgtcggtcaggctggtctggaactcctgacctcaggtgatccgcccacctcagcctcctaaaatgctgggattacaggcgtgagccaccgcgcccagcctataaaattgattctttaaaaaaaattagaacatttaccgatgctggacccaccttccccaccttcagggtccactttctaggtggccacagtgcctgcttggcccctgtagcatttgagtttgcaactctgcttttggagttaaacatgttttaggagtcctgggattctgattgatgctattgtcaatttgatgaaagaaaaattactcctggg

SEQ ID NO: 278745 - DNA, 1195 bp, Homo sapiens
cacctgacccggggcacccagacatggactgccttgaaggctgtctcttttctctctgcctgaccctgagtgtcaaggagcagtactccaagcccaggctttaagcccaggacctctttcccctccctgccccccttaccttccacctactcacctgtgcagccccgggaggagggaatggggtgggagcccaggggctccgctgcctcaccaggtatccatcagttctgccaggtctggctttggccaagacccaaacacaccacagggatggcacaggatgttggggcagggagatgagcaggtggggctcaggaagaggagaggcaaaggaataagaaaggaaaaggaggaaaaagagaaaaaggcaagatggggcaggggcaagggagagatggggaggtataggagacagacagaaaaaggaaagagaaagcaaagaaaaagagaaagaactacaaggcaaaaaagcatctagaaaaatgagggagaaaagggagaaagacaccctgacacagccctttctttcagctgccccatccctgtggtccaaggtagaaatgagaaacaaatccttgctgtggtgagtgggcacttgctgttggccaggtctctgtctgctacctgggtcccgatctgaactgggcgtgggaagcaaagcagccatgggggcaggagacctccctcagaaggtgtgagggttcaggcccctgtaggattgtgggggtgagggtccatgccccacctctgttgcccccaagttctctcctgatggcccctctgcgactgtgcctgtcttaggttgttccttccctgaggaatcttacccgtctctggctaaccagccatccaccggggccaaacagggtgacgtgcagtgtgtgagtgagggagaggcagcgcccccgagggggtcagttctctgtctccttggtagcctatgcccccgtggcctccacgcccagcacctgccttgggattccctcgcctgctggcggggccccagctctggtcacatcttggggaacccaggtttcttcttcagggagagcccagctcatagcactgggcaagagagacagattgcatgccaccagcccctaggaggcctcaacctcagcatggacagcaacagcctgggcaagtggatcctgagaaaagggtccctcttggcgcaagggcaagaggggccatc

SEQ ID NO: 278746 - DNA, 911 bp, Homo sapiens
tcactctttatattaaaaagtgcagaacacgaaatacaacatcactctttatattaaaaagtaaggaggaaaaagagaaaaaggcaagatggggcaggggcaagggagagatggggaggtataggagacagacagaaaaaggaaagagaaagcaaagaaaaagagaaagaactacaaggcaaaaaagcatctagaaaaatgagggagaaaagggagaaagacaccctgacacagccctttctttcagctgccccatccctgtggtccaaggtagaaatgagaaacaaatccttgctgtggtgagtgggcacttgctgttggccaggtctctgtctgctacctgggtcccgatctgaactgggcgtgggaagcaaagcagccatgggggcaggagacctccctcagaaggtgtgagggttcaggcccctgtaggattgtgggggtgagggtccatgccccacctctgttgcccccaagttctctcctgatggcccctctgcgactgtgcctgtcttaggttgttccttccctgaggaatcttacccgtctctggctaaccagccatccaccggggccaaacagggtgacgtgcagtgtgtgagtgagggagaggcagcgcccccgagggggtcagttctctgtctccttggtagcctatgcccccgtggcctccacgcccagcacctgccttgggattccctcgcctgctggcggggccccagctctggtcacatcttggggaacccaggtttcttcttcagggagagcccagctcatagcactgggcaagagagacagattgcatgccaccagcccctaggaggcctcaacctcagcatggacagcaacagcctgggcaagtggatcctgagaaaagggtccctcttggcgcaagggcaagaggggccatc

SEQ ID NO: 278747 - DNA, 876 bp, Homo sapiens
acgaacttcgagactcggtacacaaggcgtctggaaaaagagaaaaaggcaagatggggcaggggcaagggagagatggggaggtataggagacagacagaaaaaggaaagagaaagcaaagaaaaagagaaagaactacaaggcaaaaaagcatctagaaaaatgagggagaaaagggagaaagacaccctgacacagccctttctttcagctgccccatccctgtggtccaaggtagaaatgagaaacaaatccttgctgtggtgagtgggcacttgctgttggccaggtctctgtctgctacctgggtcccgatctgaactgggcgtgggaagcaaagcagccatgggggcaggagacctccctcagaaggtgtgagggttcaggcccctgtaggattgtgggggtgagggtccatgccccacctctgttgcccccaagttctctcctgatggcccctctgcgactgtgcctgtcttaggttgttccttccctgaggaatcttacccgtctctggctaaccagccatccaccggggccaaacagggtgacgtgcagtgtgtgagtgagggagaggcagcgcccccgagggggtcagttctctgtctccttggtagcctatgcccccgtggcctccacgcccagcacctgccttgggattccctcgcctgctggcggggccccagctctggtcacatcttggggaacccaggtttcttcttcagggagagcccagctcatagcactgggcaagagagacagattgcatgccaccagcccctaggaggcctcaacctcagcatggacagcaacagcctgggcaagtggatcctgagaaaagggtccctcttggcgcaagggcaagaggggccatc

SEQ ID NO: 278748 - DNA, 2848 bp, Homo sapiens
ccaaacacttcccactaagccctacctctgaacactgcagcaatgagggattaaggttccaacacgtgaacttttgagggacacacttaaatcataacaggtagttatttcctgaggattaaagcagtttcacagacagatgaagaagaactttttcttctattacttagtaatcgaccaggagacctattctttgaaagagaatattctttggttccagtacacatggtgggggcgggaatccatgaactaaaatgggctaatgacagtgatggcagacctaagattctttttccctccaaagccatccccaaatcccttaagacctatacttccaagcctcacctgtctgtgtctctttgcagtggcagtgaccctggacccagacacagcacatcccaaactcatcctttctgaggaccaaagatgtgtaaggcttggagacagacggcagcctgtacctgacaacccccagagatttgatttcgttgtcagcatcctaggctctgagtacttcacgactggctgccactactgggaggtgtatgtgggagacaagaccaaatggattcttggagtatgtagtgagtcagtgagcaggaaggggaaggttactgcctcacctgccaatggacactggcttctgcgacagagtcgtgggaatgagtatgaagctctcacatccccgcagacctccttccgccttaaagagcctccacggtgtgtggggattttcctggactatgaagcaggagtcatctctttctacaatgtgaccaacaagtcccacatctttactttcacccacaatttctctggcccccttcgccctttctttgaaccttgccttcatgatggaggaaaaaacacagcacctctagtcatttgttcagaactacacaaatcagaggaatcaattgtccccaggccagaagggaaaggccatgctaatggagatgtgtccctcaaggtgaactcttctttactacccccgaaggccccagagctgaaggatataatcctgtccttgccccctgaccttggcccagcccttcaggagctcaaggctccttctttttagggatatgccacattacctgctcccatcaccatccagcccagcaccctggacttcagtcgcctggcccaaccccatgattatggaacgtctcttcaccttaacccaaatccagacccttttgtggtttctatttgtaccacttttctcccaggcctcagttctgaagcttacctttcttctaaggaattgaagctcccagtgacctggagggaggattcctggaaaccaaacaatcagtttaggtgcaggtggagatgttgaatatgtgttaccaagatacagcacaggttcagggaaaagagttcgctactccaggggttatttagaagacactttctctgcctcatcctgccctcaagctttagtcaagaagttatggcccccagtccctgacttcttacttatcccattgaggactgcctttctctctctcagttctggcctctgccccccaaagtcagctctctaaaagcaagcatgttttagaccactcactctttccctctttcttcaggaatgaattgggaaaggctgatgagtaaaacataccatccttttctattttcttgatgctgtttacaacatagtttggtgatatccagagctaatgtacatgctttcaaaagctaatctgcctgttgatgataactaggtacagcgactttaaatacagttgctataatcctgaaaagccccaggagcacatcagggagctgggaaacacagttgcagagaactcagctgtatgttgccctctgaccttggcccagaccttcagaggctcagtctgttgagtctgttgtgactgtcttatgaatcaatctgttgtgccaaccctttctgagattcagagaggtccagctagaaaaagtggcagttttaaccaccaacgtagaagcttttttttccccacaagaccattgtactgcaatacttgactatttgtgtagcaaacagcctcttaggttggagagtattgatttcaaataggaagttggtagactaggtgtgaggatgaaataatgaccttgatttttgggtgtgtattgcagaagcctcgtcgctttcaagtcacatcatatatgcgatctggcctaaccatggagatattggttatcagtttgcagatgaatacacagttctatccaacagaaactgtatctttctgtttgtcagaagttctccgttagttcctgtattagtcaaggttttccagagaaacagaatcaatatatattggggcaggggggcggtggttattataaggaattggctcacgtgattatggaggcggttaaatcccaagatctgcaggataagtcagcaagatggagtcccatgagagctgatggtttagttccagtctgatggcagcaggcttgacgccaaggaagagatgatgtttaattcaagtccgaaggcaaggaaaaagctgatggtcctgtccaaaggctattaggcaggaagaattctcttagggcagagttagctcttttgttctattcaggccttcaactgattcagcaaggcccgcccacatttgggaggacagtctgcattactcagtctactgatttgaatgttaatgtcattgagaaacaccctcacaggaacactcagaataatgtttgaccaaatagctgggcatcttgtgacccagttaagtggatacataagattaactatcacagtgactcagtggaattttttgtttgcttttgtacagttttaaaataaaagtttggtatttgtgttttgaaaaaaaat

SEQ ID NO: 278749 - DNA, 2851 bp, Homo sapiens
ccaaacacttcccactaagccctacctctgaacactgcagcaatgagggattaaggttccaacacgtgaacttttgagggacacacttaaatcataacaggtagttatttcctgaggattaaagcagtttcacagacagatgaagaagaactttttcttctattacttagtaatcgaccaggagacctattctttgaaagagaatattctttggttccagtacacatggtgggggcgggaatccatgaactaaaatgggctaatgacagtgatggcagacctaagattctttttccctccaaagccatccccaaatcccttaagacctatacttccaagcctcacctgtctgtgtctctttgcagtggcagtgaccctggacccagacacagcacatcccaaactcatcctttctgaggaccaaagatgtgtaaggcttggagacagacggcagcctgtacctgacaacccccagagatttgatttcgttgtcagcatcctaggctctgagtacttcacgactggctgccactactgggaggtgtatgtgggagacaagaccaaatggattcttggagtatgtagtgagtcagtgagcaggaaggggaaggttactgcctcacctgccaatggacactggcttctgcgacagagtcgtgggaatgagtatgaagctctcacatccccgcagacctccttccgccttaaagagcctccacggtgtgtggggattttcctggactatgaagcaggagtcatctctttctacaatgtgaccaacaagtcccacatctttactttcacccacaatttctctggcccccttcgccctttctttgaaccttgccttcatgatggaggaaaaaacacagcacctctagtcatttgttcagaactacacaaatcagaggaatcaattgtccccaggccagaagggaaaggccatgctaatggagatgtgtccctcaaggtgaactcttctttactacccccgaaggccccagagctgaaggatataatcctgtccttgccccctgaccttggcccagcccttcaggagctcaaggctccttctttttagggatatgccacattacctgctcccatcaccatccagcccagcaccctggacttcagtcgcctggcccaaccccatgattatggaacgtctcttcaccttaacccaaatccagacccttttgtggtttctatttgtaccacttttctcccaggcctcagttctgaagcttacctttcttctaaggaattgaagctcccagtgacctggagggaggattcctggaaaccaaacaatcagtttaggtgcaggtggagatgttgaatatgtgttaccaagatacagcacaggttcagggaaaagagttcgctactccaggggttatttagaagacactttctctgcctcatcctgccctcaagctttagtcaagaagttatggcccccagtccctgacttcttacttatcccattgaggactgcctttctctctctcagttctggcctctgccccccaaagtcagctctctaaaagcaagcatgttttagaccactcactctttccctctttcttcaggaatgaattgggaaaggctgatgagtaaaacataccatccttttctattttcttgatgctgtttacaacatagtttggtgatatccagagctaatgtacatgctttcaaaagctaatctgcctgttgatgataactaggtacagcgactttaaatacagttgctataatcctgaaaagccccaggagcacatcagggagctgggaaacacagttgcagagaactcagctgtatgttgccctctgaccttggcccagaccttcagaggctcagtctgttgagtctgttgtgactgtcttatgaatcaatctgttgtgccaaccctttctgagattcagagaggtccagctagaaaaagtggcagttttaaccaccaacgtagaagcttttttttccccacaagaccattgtactgcaatacttgactatttgtgtagcaaacagcctcttaggttggagagtattgatttcaaataggaagttggtagactaggtgtgaggatgaaataatgaccttgatttttgggtgtgtattgcagaagcctcgtcgctttcaagtcacatcatatatgcgatctggcctaaccatggagatattggttatcagtttgcagatgaatacacagttctatccaacagaaactgtatctttctgtttgtcagaagttctccgttagttcctgtattagtcaaggttttccagagaaacagaatcaatatatattggggcaggggggcggtggttattataaggaattggctcacgtgattatggaggcggttaaatcccaagatctgcaggataagtcagcaagatggagtcccatgagagctgatggtttagttccagtctgatggcagcaggcttgacgccaaggaagagatgatgtttaattcaagtccgaaggcaaggaaaaagctgatggtcctgtccaaaggctattaggcaggaagaattctcttagggcagagttagctcttttgttctattcaggccttcaactgattcagcaaggcccgcccacatttgggaggacagtctgcattactcagtctactgatttgaatgttaatgtcattgagaaacaccctcacaggaacactcagaataatgtttgaccaaatagctgggcatcttgtgacccagttaagtggatacataagattaactatcacagtgactcagtggaattttttgtttgcttttgtacagttttaaaataaaaaattccactgagtcactgtgattggtcgacg

SEQ ID NO: 278750 - DNA, 4152 bp, Homo sapiens
  misc_feature (158)..(158): n is a, c, g, or t
gcgcttgcggaggattgcgttgacgagactcttatttattgtcaccaacctgtggtggaatttgcagttgcacattggatctgattcgccccgccccgaatgacgcctgcccggaggcagtgaaagtacagccgcgccgccccaagtcagcccggacncataaatcagcacgcggccggagaaccccgcaatctctgcgcccacaaaatacaccgacgatgcccgatctactttaagggctgaaacccacgggcctgagagactataagagcgttccctaccgccatggaacaacggggacagaacgccccggccgcttcgggggcccggaaaaggcacggcccaggacccagggaggcgcggggagccaggcctgggctccgggtccccaagacccttgtgctcgttgtcgccgcggtcctgctgttggtctcagctgagtctgctctgatcacccaacaagacctagctccccagcagagagcggccccacaacaaaagaggtccagcccctcagagggattgtgtccacctggacaccatatctcagaagacggtagagattgcatctcctgcaaatatggacaggactatagcactcactggaatgacctccttttctgcttgcgctgcaccaggtgtgattcaggtgaagtggagctaagtccctgcaccacgaccagaaacacagtgtgtcagtgcgaagaaggcaccttccgggaagaagattctcctgagatgtgccggaagtgccgcacagggtgtcccagagggatggtcaaggtcggtgattgtacaccctggagtgacatcgaatgtgtccacaaagaatcaggtacaaagcacagtggggaagccccagctgtggaggagacggtgacctccagcccagggactcctgcctctccctgttctctctcaggcatcatcataggagtcacagttgcagccgtagtcttgattgtggctgtgtttgtttgcaagtctttactgtggaagaaagtccttccttacctgaaaggcatctgctcaggtggtggtggggaccctgagcgtgtggacagaagctcacaacgacctggggctgaggacaatgtcctcaatgagatcgtgagtatcttgcagcccacccaggtccctgagcaggaaatggaagtccaggagccagcagagccaacaggtgtcaacatgttgtcccccggggagtcagagcatctgctggaaccggcagaagctgaaaggtctcagaggaggaggctgctggttccagcaaatgaaggtgatcccactgagactctgagacagtgcttcgatgactttgcagacttggtgccctttgactcctgggagccgctcatgaggaagttgggcctcatggacaatgagataaaggtggctaaagctgaggcagcgggccacagggacaccttgtacacgatgctgataaagtgggtcaacaaaaccgggcgagatgcctctgtccacaccctgctggatgccttggagacgctgggagagagacttgccaagcagaagattgaggaccacttgttgagctctggaaagttcatgtatctagaaggtaatgcagactctgccatgtcctaagtgtgattctcttcaggaagtgagaccttccctggtttaccttttttctggaaaaagcccaactggactccagtcagtaggaaagtgccacaattgtcacatgaccggtactggaagaaactctcccatccaacatcacccagtggatggaacatcctgtaacttttcactgcacttggcattatttttataagctgaatgtgataataaggacactatggaaatgtctggatcattccgtttgtgcgtactttgagatttggtttgggatgtcattgttttcacagcacttttttatcctaatgtaaatgctttatttatttatttgggctacattgtaagatccatctacacagtcgttgtccgacttcacttgatactatatgatatgaaccttttttgggtggggggtgcggggcagttcactctgtctcccaggctggagtgcaatggtgcaatcttggctcactatagccttgacctctcaggctcaagcgattctcccacctcagccatccaaatagctgggaccacaggtgtgcaccaccacgcccggctaattttttgtattttgtctagatataggggctctctatgttgctcagggtggtctcgaattcctggactcaagcagtctgcccacctcagactcccaaagcggtggaattagaggcgtgagcccccatgcttggccttacctttctacttttataattctgtatgttattattttatgaacatgaagaaactttagtaaatgtacttgtttacatagttatgtgaatagattagataaacataaaaggaggagacatacaatgggggaagaagaagaagtcccctgtaagatgtcactgtctgggttccagccctccctcagatgtactttggcttcaatgattggcaacttctacaggggccagtcttttgaactggacaaccttacaagtatatgagtattatttataggtagttgtttacatatgagtcgggaccaaagagaactggatccacgtgaagtcctgtgtgtggctggtccctacctgggcagtctcatttgcacccatagcccccatctatggacaggctgggacagaggcagatgggttagatcacacataacaatagggtctatgtcatatcccaagtgaacttgagccctgtttgggctcaggagatagaagacaaaatctgtctcccacgtctgccatggcatcaagggggaagagtagatggtgcttgagaatggtgtgaaatggttgccatctcaggagtagatggcccggctcacttctggttatctgtcaccctgagcccatgagctgccttttagggtacagattgcctacttgaggaccttggccgctctgtaagcatctgactcatctcagaaatgtcaattcttaaacactgtggcaacaggacctagaatggctgacgcattaaggttttcttcttgtgtcctgttctattattgttttaagacctcagtaaccatttcagcctctttccagcaaacccttctccatagtatttcagtcatggaaggatcatttatgcaggtagtcattccaggagtttttggtcttttctgtctcaaggcattgtgtgttttgttccgggactggtttgggtgggacaaagttagaattgcctgaagatcacacattcagactgttgtgtctgtggagttttaggagtggggggtgacctttctggtctttgcacttccatcctctcccacttccatctggcatcccacgcgttgtcccctgcacttctggaaggcacagggtgctgctgcctcctggtctttgcctttgctgggccttctgtgcaggacgctcagcctcagggctcagaaggtgccagtccggtcccaggtcccttgtcccttccacagaggccttcctagaagatgcatctagagtgtcagccttatcagtgtttaagatttttcttttatttttaatttttttgagacagaatctcactctctcgcccaggctggagtgcaacggtacgatcttggctcagtgcaacctccgcctcctgggttcaagcgattctcgtgcctcagcctccggagtagctgggattgcaggcacccgccaccacgcctggctaatttttgtatttttagtagagacggggtttcaccatgttggtcaggctggtctcgaactcctgacctcaggtgatccaccttggcctccgaaagtgctgggattacaggcgtgagccaccagccaggccaagctattcttttaaagtaagcttcctgacgacatgaaataattgggggttttgttgtttagttacattaggctttgctatatccccaggccaaatagcatgtgacacaggacagccatagtatagtgtgtcactcgtggttggtgtcctttcatgcttctgccctgtcaaaggtccctatttgaaatgtgttataatacaaacaaggaagcacattgtgtacaaaatacttatgtatttatgaatccatgaccaaattaaatatgaaaccttatataaaaaaaggtg

SEQ ID NO: 278751 - DNA, 4065 bp, Homo sapiens
  misc_feature (158)..(158): n is a, c, g, or t
gcgcttgcggaggattgcgttgacgagactcttatttattgtcaccaacctgtggtggaatttgcagttgcacattggatctgattcgccccgccccgaatgacgcctgcccggaggcagtgaaagtacagccgcgccgccccaagtcagcccggacncataaatcagcacgcggccggagaaccccgcaatctctgcgcccacaaaatacaccgacgatgcccgatctactttaagggctgaaacccacgggcctgagagactataagagcgttccctaccgccatggaacaacggggacagaacgccccggccgcttcgggggcccggaaaaggcacggcccaggacccagggaggcgcggggagccaggcctgggctccgggtccccaagacccttgtgctcgttgtcgccgcggtcctgctgttggtctcagctgagtctgctctgatcacccaacaagacctagctccccagcagagagcggccccacaacaaaagaggtccagcccctcagagggattgtgtccacctggacaccatatctcagaagacggtagagattgcatctcctgcaaatatggacaggactatagcactcactggaatgacctccttttctgcttgcgctgcaccaggtgtgattcaggtgaagtggagctaagtccctgcaccacgaccagaaacacagtgtgtcagtgcgaagaaggcaccttccgggaagaagattctcctgagatgtgccggaagtgccgcacagggtgtcccagagggatggtcaaggtcggtgattgtacaccctggagtgacatcgaatgtgtccacaaagaatcaggcatcatcataggagtcacagttgcagccgtagtcttgattgtggctgtgtttgtttgcaagtctttactgtggaagaaagtccttccttacctgaaaggcatctgctcaggtggtggtggggaccctgagcgtgtggacagaagctcacaacgacctggggctgaggacaatgtcctcaatgagatcgtgagtatcttgcagcccacccaggtccctgagcaggaaatggaagtccaggagccagcagagccaacaggtgtcaacatgttgtcccccggggagtcagagcatctgctggaaccggcagaagctgaaaggtctcagaggaggaggctgctggttccagcaaatgaaggtgatcccactgagactctgagacagtgcttcgatgactttgcagacttggtgccctttgactcctgggagccgctcatgaggaagttgggcctcatggacaatgagataaaggtggctaaagctgaggcagcgggccacagggacaccttgtacacgatgctgataaagtgggtcaacaaaaccgggcgagatgcctctgtccacaccctgctggatgccttggagacgctgggagagagacttgccaagcagaagattgaggaccacttgttgagctctggaaagttcatgtatctagaaggtaatgcagactctgccatgtcctaagtgtgattctcttcaggaagtgagaccttccctggtttaccttttttctggaaaaagcccaactggactccagtcagtaggaaagtgccacaattgtcacatgaccggtactggaagaaactctcccatccaacatcacccagtggatggaacatcctgtaacttttcactgcacttggcattatttttataagctgaatgtgataataaggacactatggaaatgtctggatcattccgtttgtgcgtactttgagatttggtttgggatgtcattgttttcacagcacttttttatcctaatgtaaatgctttatttatttatttgggctacattgtaagatccatctacacagtcgttgtccgacttcacttgatactatatgatatgaaccttttttgggtggggggtgcggggcagttcactctgtctcccaggctggagtgcaatggtgcaatcttggctcactatagccttgacctctcaggctcaagcgattctcccacctcagccatccaaatagctgggaccacaggtgtgcaccaccacgcccggctaattttttgtattttgtctagatataggggctctctatgttgctcagggtggtctcgaattcctggactcaagcagtctgcccacctcagactcccaaagcggtggaattagaggcgtgagcccccatgcttggccttacctttctacttttataattctgtatgttattattttatgaacatgaagaaactttagtaaatgtacttgtttacatagttatgtgaatagattagataaacataaaaggaggagacatacaatgggggaagaagaagaagtcccctgtaagatgtcactgtctgggttccagccctccctcagatgtactttggcttcaatgattggcaacttctacaggggccagtcttttgaactggacaaccttacaagtatatgagtattatttataggtagttgtttacatatgagtcgggaccaaagagaactggatccacgtgaagtcctgtgtgtggctggtccctacctgggcagtctcatttgcacccatagcccccatctatggacaggctgggacagaggcagatgggttagatcacacataacaatagggtctatgtcatatcccaagtgaacttgagccctgtttgggctcaggagatagaagacaaaatctgtctcccacgtctgccatggcatcaagggggaagagtagatggtgcttgagaatggtgtgaaatggttgccatctcaggagtagatggcccggctcacttctggttatctgtcaccctgagcccatgagctgccttttagggtacagattgcctacttgaggaccttggccgctctgtaagcatctgactcatctcagaaatgtcaattcttaaacactgtggcaacaggacctagaatggctgacgcattaaggttttcttcttgtgtcctgttctattattgttttaagacctcagtaaccatttcagcctctttccagcaaacccttctccatagtatttcagtcatggaaggatcatttatgcaggtagtcattccaggagtttttggtcttttctgtctcaaggcattgtgtgttttgttccgggactggtttgggtgggacaaagttagaattgcctgaagatcacacattcagactgttgtgtctgtggagttttaggagtggggggtgacctttctggtctttgcacttccatcctctcccacttccatctggcatcccacgcgttgtcccctgcacttctggaaggcacagggtgctgctgcctcctggtctttgcctttgctgggccttctgtgcaggacgctcagcctcagggctcagaaggtgccagtccggtcccaggtcccttgtcccttccacagaggccttcctagaagatgcatctagagtgtcagccttatcagtgtttaagatttttcttttatttttaatttttttgagacagaatctcactctctcgcccaggctggagtgcaacggtacgatcttggctcagtgcaacctccgcctcctgggttcaagcgattctcgtgcctcagcctccggagtagctgggattgcaggcacccgccaccacgcctggctaatttttgtatttttagtagagacggggtttcaccatgttggtcaggctggtctcgaactcctgacctcaggtgatccaccttggcctccgaaagtgctgggattacaggcgtgagccaccagccaggccaagctattcttttaaagtaagcttcctgacgacatgaaataattgggggttttgttgtttagttacattaggctttgctatatccccaggccaaatagcatgtgacacaggacagccatagtatagtgtgtcactcgtggttggtgtcctttcatgcttctgccctgtcaaaggtccctatttgaaatgtgttataatacaaacaaggaagcacattgtgtacaaaatacttatgtatttatgaatccatgaccaaattaaatatgaaaccttatataaaaaaaggtg

SEQ ID NO: 278752 - DNA, 4179 bp, Homo sapiens
  misc_feature (158)..(158): n is a, c, g, or t
gcgcttgcggaggattgcgttgacgagactcttatttattgtcaccaacctgtggtggaatttgcagttgcacattggatctgattcgccccgccccgaatgacgcctgcccggaggcagtgaaagtacagccgcgccgccccaagtcagcccggacncataaatcagcacgcggccggagaaccccgcaatctctgcgcccacaaaatacaccgacgatgcccgatctactttaagggctgaaacccacgggcctgagagactataagagcgttccctaccgccatggaacaacggggacagaacgccccggccgcttcgggggcccggaaaaggcacggcccaggacccagggaggcgcggggagccaggcctgggctccgggtccccaagacccttgtgctcgttgtcgccgcggtcctgctgttggtctcagctgagtctgctctgatcacccaacaagacctagctccccagcagagagcggccccacaacaaaagaggtccagcccctcagagggattgtgtccacctggacaccatatctcagaagacggtagagattgcatctcctgcaaatatggacaggactatagcactcactggaatgacctccttttctgcttgcgctgcaccaggtgtgattcaggtgaagtggagctaagtccctgcaccacgaccagaaacacagtgtgtcagtgcgaagaaggcaccttccgggaagaagattctcctgagatgtgccggaagtgccgcacagggtgtcccagagggatggtcaaggtcggtgattgtacaccctggagtgacatcgaatgtgtccacaaagaatcaggcatcatcataggagtcacagttgcagccgtagtcttgattgtggctgtgtttgtttgcaagtctttactgtggaagaaagtccttccttacctgaaaggcatctgctcaggtggtggtggggaccctgagcgtgtggacagaagctcacaacgacctggggctgaggacaatgtcctcaatgagatcgtgagtatcttgcagcccacccaggtccctgagcaggaaatggaagtccaggagccagcagagccaacaggtgtcaacatgttgtcccccggggagtcagagcatctgctggaaccggcagaagctgaaaggtctcagaggaggaggctgctggttccagcaaatgaaggtgatcccactgagactctgagacagtgcttcgatgactttgcagacttggtgccctttgactcctgggagccgctcatgaggaagttgggcctcatggacaatgagataaaggtggctaaagctgaggcagcgggccacagggacaccttgtacacgatgctgataaagtgggtcaacaaaaccgggcgagatgcctctgtccacaccctgctggatgccttggagacgctgggagagagacttgccaagcagaagattgaggaccacttgttgagctctggaaagttcatgtatctagaaggtaatgcagactctgccatgtcctaagtgtgattctcttcaggaagtgagaccttccctggtttaccttttttctggaaaaagcccaactggactccagtcagtaggaaagtgccacaattgtcacatgaccggtactggaagaaactctcccatccaacatcacccagtggatggaacatcctgtaacttttcactgcacttggcattatttttataagctgaatgtgataataaggacactatggaaatgtctggatcattccgtttgtgcgtactttgagatttggtttgggatgtcattgttttcacagcacttttttatcctaatgtaaatgctttatttatttatttgggctacattgtaagatccatctacacagtcgttgtccgacttcacttgatactatatgatatgaaccttttttgggtggggggtgcggggcagttcactctgtctcccaggctggagtgcaatggtgcaatcttggctcactatagccttgacctctcaggctcaagcgattctcccacctcagccatccaaatagctgggaccacaggtgtgcaccaccacgcccggctaattttttgtattttgtctagatataggggctctctatgttgctcagggtggtctcgaattcctggactcaagcagtctgcccacctcagactcccaaagcggtggaattagaggcgtgagcccccatgcttggccttacctttctacttttataattctgtatgttattattttatgaacatgaagaaactttagtaaatgtacttgtttacatagttatgtgaatagattagataaacataaaaggaggagacatacaatgggggaagaagaagaagtcccctgtaagatgtcactgtctgggttccagccctccctcagatgtactttggcttcaatgattggcaacttctacaggggccagtcttttgaactggacaaccttacaagtatatgagtattatttataggtagttgtttacatatgagtcgggaccaaagagaactggatccacgtgaagtcctgtgtgtggctggtccctacctgggcagtctcatttgcacccatagcccccatctatggacaggctgggacagaggcagatgggttagatcacacataacaatagggtctatgtcatatcccaagtgaacttgagccctgtttgggctcaggagatagaagacaaaatctgtctcccacgtctgccatggcatcaagggggaagagtagatggtgcttgagaatggtgtgaaatggttgccatctcaggagtagatggcccggctcacttctggttatctgtcaccctgagcccatgagctgccttttagggtacagattgcctacttgaggaccttggccgctctgtaagcatctgactcatctcagaaatgtcaattcttaaacactgtggcaacaggacctagaatggctgacgcattaaggttttcttcttgtgtcctgttctattattgttttaagacctcagtaaccatttcagcctctttccagcaaacccttctccatagtatttcagtcatggaaggatcatttatgcaggtagtcattccaggagtttttggtcttttctgtctcaaggcattgtgtgttttgttccgggactggtttgggtgggacaaagttagaattgcctgaagatcacacattcagactgttgtgtctgtggagttttaggagtggggggtgacctttctggtctttgcacttccatcctctcccacttccatctggcatcccacgcgttgtcccctgcacttctggaaggcacagggtgctgctgcctcctggtctttgcctttgctgggccttctgtgcaggacgctcagcctcagggctcagaaggtgccagtccggtcccaggtcccttgtcccttccacagaggccttcctagaagatgcatctagagtgtcagccttatcagtgtttaagatttttcttttatttttaatttttttgagacagaatctcactctctcgcccaggctggagtgcaacggtacgatcttggctcagtgcaacctccgcctcctgggttcaagcgattctcgtgcctcagcctccggagtagctgggattgcaggcacccgccaccacgcctggctaatttttgtatttttagtagagacggggtttcaccatgttggtcaggctggtctcgaactcctgacctcaggtgatccaccttggcctccgaaagtgctgggattacaggcgtgagccaccagccaggccaagctattcttttaaagtaagcttcctgacgacatgaaataattgggggttttgttgtttagttacattaggctttgctatatccccaggccaaatagcatgtgacacaggacagccatagtatagtgtgtcactcgtggttggtgtcctttcatgcttctgccctgtcaaaggtccctatttgaaatgtgttataatacaaccaggagccttggtcacatactttggtttgatcctgacaattattgaactttttaaaaaaaaagggccgctagaacccaggccactaccgtccttttgtaaggccaagggataaaaacggcggacacccgaacgcatggctgggacctgtgggttggcacccaaacgattttcgctttcgtactatctcacggactcatc

SEQ ID NO: 278753 - DNA, 3638 bp, Homo sapiens
  misc_feature (158)..(158): n is a, c, g, or t
gcgcttgcggaggattgcgttgacgagactcttatttattgtcaccaacctgtggtggaatttgcagttgcacattggatctgattcgccccgccccgaatgacgcctgcccggaggcagtgaaagtacagccgcgccgccccaagtcagcccggacncataaatcagcacgcggccggagaaccccgcaatctctgcgcccacaaaatacaccgacgatgcccgatctactttaagggctgaaacccacgggcctgagagactataagagcgttccctaccgccatggaacaacggggacagaacgccccggccgcttcgggggcccggaaaaggcacggcccaggacccagggaggcgcggggagccaggcctgggctccgggtccccaagacccttgtgctcgttgtcgccgcggtcctgctgttggtctcagctgagtctgctctgatcacccaacaagacctagctccccagcagagagcggccccacaacaaaagaggtccagcccctcagagggattgtgtccacctggacaccatatctcagaagacggtagagattgcatctcctgcaaatatggacaggactatagcactcactggaatgacctccttttctgcttgcgctgcaccaggtgtgattcaggtgaagtggagctaagtccctgcaccacgaccagaaacacagtgtgtcagtgcgaagaaggcaccttccgggaagaagattctcctgagatgtgccggaagtgccgcacagggtgtcccagagggatggtcaaggtcggtgattgtacaccctggagtgacatcgaatgtgtccacaaagaatcaggcatcatcataggagtcacagttgcagccgtagtcttgattgtggctgtgtttgtttgcaagtctttactgtggaagaaagtccttccttacctgaaaggcatctgctcaggtggtggtggggaccctgagcgtgtggacagaagctcacaacgacctggggctgaggacaatgtcctcaatgagatcgtgagtatcttgcagcccacccaggtccctgagcaggaaatggaagtccaggagccagcagagccaacaggtgtcaacatgttgtcccccggggagtcagagcatctgctggaaccggcagaagctgaaaggtctcagaggaggaggctgctggttccagcaaatgaaggtgatcccactgagactctgagacagtgcttcgatgactttgcagacttggtgccctttgactcctgggagccgctcatgaggaagttgggcctcatggacaatgagataaaggtggctaaagctgaggcagcgggccacagggacaccttgtacacgatgctgataaagtgggtcaacaaaaccgggcgagatgcctctgtccacaccctgctggatgccttggagacgctgggagagagacttgccaagcagaagattgaggaccacttgttgagctctggaaagttcatgtatctagaaggtaatgcagactctgccatgtcctaagtgtgattctcttcaggaagtgagaccttccctggtttaccttttttctggaaaaagcccaactggactccagtcagtaggaaagtgccacaattgtcacatgaccggtactggaagaaactctcccatccaacatcacccagtggatggaacatcctgtaacttttcactgcacttggcattatttttataagctgaatgtgataataaggacactatggaaatgtctggatcattccgtttgtgcgtactttgagatttggtttgggatgtcattgttttcacagcacttttttatcctaatgtaaatgctttatttatttatttgggctacattgtaagatccatctacacagtcgttgtccgacttcacttgatactatatgatatgaaccttttttgggtggggggtgcggggcagttcactctgtctcccaggctggagtgcaatggtgcaatcttggctcactatagccttgacctctcaggctcaagcgattctcccacctcagccatccaaatagctgggaccacaggtgtgcaccaccacgcccggctaattttttgtattttgtctagatataggggctctctatgttgctcagggtggtctcgaattcctggactcaagcagtctgcccacctcagactcccaaagcggtggaattagaggcgtgagcccccatgcttggccttacctttctacttttataattctgtatgttattattttatgaacatgaagaaactttagtaaatgtacttgtttacatagttatgtgaatagattagataaacataaaaggaggagacatacaatgggggaagaagaagaagtcccctgtaagatgtcactgtctgggttccagccctccctcagatgtactttggcttcaatgattggcaacttctacaggggccagtcttttgaactggacaaccttacaagtatatgagtattatttataggtagttgtttacatatgagtcgggaccaaagagaactggatccacgtgaagtcctgtgtgtggctggtccctacctgggcagtctcatttgcacccatagcccccatctatggacaggctgggacagaggcagatgggttagatcacacataacaatagggtctatgtcatatcccaagtgaacttgagccctgtttgggctcaggagatagaagacaaaatctgtctcccacgtctgccatggcatcaagggggaagagtagatggtgcttgagaatggtgtgaaatggttgccatctcaggagtagatggcccggctcacttctggttatctgtcaccctgagcccatgagctgccttttagggtacagattgcctacttgaggaccttggccgctctgtaagcatctgactcatctcagaaatgtcaattcttaaacactgtggcaacaggacctagaatggctgacgcattaaggttttcttcttgtgtcctgttctattattgttttaagacctcagtaaccatttcagcctctttccagcaaacccttctccatagtatttcagtcatggaaggatcatttatgcaggtagtcattccaggagtttttggtcttttctgtctcaaggcattgtgtgttttgttccgggactggtttgggtgggacaaagttagaattgcctgaagatcacacattcagactgttgtgtctgtggagttttaggagtggggggtgacctttctggtctttgcacttccatcctctcccacttccatctggcatcccacgcgttgtcccctgcacttctggaaggcacagggtgctgctgcctcctggtctttgcctttgctgggccttctgtgcaggacgctcagcctcagggctcagaaggtgccagtccggtcccaggtcccttgtcccttccacagaggccttcctagaagatgcatctagagtgtcagccttatcagtgtttaagatttttcttttatttttaatttttttgagacagaatctcactctctcgcccaggctggagtgcaacggtacgataatcacttgaacccgggaggcagaggttgcggtgagccgagatcgtgccattgcactccagcctgggcaacaagagtgaaactccgtctc

SEQ ID NO: 278754 - DNA, 2508 bp, Homo sapiens
  misc_feature (158)..(158): n is a, c, g, or t
gcgcttgcggaggattgcgttgacgagactcttatttattgtcaccaacctgtggtggaatttgcagttgcacattggatctgattcgccccgccccgaatgacgcctgcccggaggcagtgaaagtacagccgcgccgccccaagtcagcccggacncataaatcagcacgcggccggagaaccccgcaatctctgcgcccacaaaatacaccgacgatgcccgatctactttaagggctgaaacccacgggcctgagagactataagagcgttccctaccgccatggaacaacggggacagaacgccccggccgcttcgggggcccggaaaaggcacggcccaggacccagggaggcgcggggagccaggcctgggctccgggtccccaagacccttgtgctcgttgtcgccgcggtcctgctgttggtctcagctgagtctgctctgatcacccaacaagacctagctccccagcagagagcggccccacaacaaaagaggtccagcccctcagagggattgtgtccacctggacaccatatctcagaagacggtagagattgcatctcctgcaaatatggacaggactatagcactcactggaatgacctccttttctgcttgcgctgcaccaggtgtgattcaggtgaagtggagctaagtccctgcaccacgaccagaaacacagtgtgtcagtgcgaagaaggcaccttccgggaagaagattctcctgagatgtgccggaagtgccgcacagggtgtcccagagggatggtcaaggtcggtgattgtacaccctggagtgacatcgaatgtgtccacaaagaatcaggcatcatcataggagtcacagttgcagccgtagtcttgattgtggctgtgtttgtttgcaagtctttactgtggaagaaagtccttccttacctgaaaggcatctgctcaggtggtggtggggaccctgagcgtgtggacagaagctcacaacgacctggggctgaggacaatgtcctcaatgagatcgtgagtatcttgcagcccacccaggtccctgagcaggaaatggaagtccaggagccagcagagccaacaggtgtcaacatgttgtcccccggggagtcagagcatctgctggaaccggcagaagctgaaaggtctcagaggaggaggctgctggttccagcaaatgaaggtgatcccactgagactctgagacagtgcttcgatgactttgcagacttggtgccctttgactcctgggagccgctcatgaggaagttgggcctcatggacaatgagataaaggtggctaaagctgaggcagcgggccacagggacaccttgtacacgatgctgataaagtgggtcaacaaaaccgggcgagatgcctctgtccacaccctgctggatgccttggagacgctgggagagagacttgccaagcagaagattgaggaccacttgttgagctctggaaagttcatgtatctagaaggtaatgcagactctgccatgtcctaagtgtgattctcttcaggaagtgagaccttccctggtttaccttttttctggaaaaagcccaactggactccagtcagtaggaaagtgccacaattgtcacatgaccggtactggaagaaactctcccatccaacatcacccagtggatggaacatcctgtaacttttcactgcacttggcattatttttataagctgaatgtgataataaggacactatggaaatgtctggatcattccgtttgtgcgtactttgagatttggtttgggatgtcattgttttcacagcacttttttatcctaatgtaaatgctttatttatttatttgggctacattgtaagatccatctacacagtcgttgtccgacttcacttgatactatatgatatgaaccttttttgggtggggggtgcggggcagttcactctgtctcccaggctggagtgcaatggtgcaatcttggctcactatagccttgacctctcaggctcaagcgattctcccacctcagccatccaaatagctgggaccacaggtgtgcaccaccacgcccggctaattttttgtattttgtctagatataggggctctctatgttgctcagggtggtctcgaattcctggactcaagcagtctgcccacctcagactcccaaagcggtggaattagagttacaggcgtgagccaccagccaggccaagctattcttttaaagtaagcttcctgacgacatgaaataattgggggttttgttgtttagttacattaggctttgctatatccccaggccaaatagcatgtgacacaggacagccatagtatagtgtgtcactcgtggttggtgtcctttcatgcttctgccctgtcaaaggtccctatttgaaatgtgttataatacaaacaaggaagcacattgtgtacaaaatacttatgtatttatgaatccatgaccaaattaaatatgaaaccttatataaaaaaaggtg

SEQ ID NO: 278755 - DNA, 1981 bp, Homo sapiens
  misc_feature (158)..(158): n is a, c, g, or t
gcgcttgcggaggattgcgttgacgagactcttatttattgtcaccaacctgtggtggaatttgcagttgcacattggatctgattcgccccgccccgaatgacgcctgcccggaggcagtgaaagtacagccgcgccgccccaagtcagcccggacncataaatcagcacgcggccggagaaccccgcaatctctgcgcccacaaaatacaccgacgatgcccgatctactttaagggctgaaacccacgggcctgagagactataagagcgttccctaccgccatggaacaacggggacagaacgccccggccgcttcgggggcccggaaaaggcacggcccaggacccagggaggcgcggggagccaggcctgggctccgggtccccaagacccttgtgctcgttgtcgccgcggtcctgctgttggtctcagctgagtctgctctgatcacccaacaagacctagctccccagcagagagcggccccacaacaaaagaggtccagcccctcagagggattgtgtccacctggacaccatatctcagaagacggtagagattgcatctcctgcaaatatggacaggactatagcactcactggaatgacctccttttctgcttgcgctgcaccaggtgtgattcaggtgaagtggagctaagtccctgcaccacgaccagaaacacagtgtgtcagtgcgaagaaggcaccttccgggaagaagattctcctgagatgtgccggaagtgccgcacagggtgtcccagagggatggtcaaggtcggtgattgtacaccctggagtgacatcgaatgtgtccacaaagaatcaggcatcatcataggagtcacagttgcagccgtagtcttgattgtggctgtgtttgtttgcaagtctttactgtggaagaaagtccttccttacctgaaaggcatctgctcaggtggtggtggggaccctgagcgtgtggacagaagctcacaacgacctggggctgaggacaatgtcctcaatgagatcgtgagtatcttgcagcccacccaggtccctgagcaggaaatggaagtccaggagccagcagagccaacaggtgtcaacatgttgtcccccggggagtcagagcatctgctggaaccggcagaagctgaaaggtctcagaggaggaggctgctggttccagcaaatgaaggtgatcccactgagactctgagacagtgcttcgatgactttgcagacttggtgccctttgactcctgggagccgctcatgaggaagttgggcctcatggacaatgagataaaggtggctaaagctgaggcagcgggccacagggacaccttgtacacgatgctgataaagtgggtcaacaaaaccgggcgagatgcctctgtccacaccctgctggatgccttggagacgctgggagagagacttgccaagcagaagattgaggaccacttgttgagctctggaaagttcatgtatctagaaggtaatgcagactctgccatgtcctaagtgtgattctcttcaggaagtgagaccttccctggtttaccttttttctggaaaaagcccaactggactccagtcagtaggaaagtgccacaattgtcacatgaccggtactggaagaaactctcccatccaacatcacccagtggatggaacatcctgtaacttttcactgcacttggcattatttttataagctgaatgtgataataaggacactatggaaatgtctggatcattccgtttgtgcgtactttgagatttggtttgggatgtcattgttttcacagcacttttttatcctaatgtaaatgctttatttatttatttgggctacattgtaagatccatctacacagtcgttgtccgacttcacttgatactatatgatatgaacctttttgagcaggggtggccgtgtagcagtggtgccgtgtagcaggggtgccgtgaagatcctgga

SEQ ID NO: 278756 - DNA, 3272 bp, Homo sapiens
tgatcgagctcggcactgattattcgtgtcacaaagaatcaggcatcatcataggagtcacagttgcagccgtagtcttgattgtggctgtgtttgtttgcaagtctttactgtggaagaaagtccttccttacctgaaaggcatctgctcaggtggtggtggggaccctgagcgtgtggacagaagctcacaacgacctggggctgaggacaatgtcctcaatgagatcgtgagtatcttgcagcccacccaggtccctgagcaggaaatggaagtccaggagccagcagagccaacaggtgtcaacatgttgtcccccggggagtcagagcatctgctggaaccggcagaagctgaaaggtctcagaggaggaggctgctggttccagcaaatgaaggtgatcccactgagactctgagacagtgcttcgatgactttgcagacttggtgccctttgactcctgggagccgctcatgaggaagttgggcctcatggacaatgagataaaggtggctaaagctgaggcagcgggccacagggacaccttgtacacgatgctgataaagtgggtcaacaaaaccgggcgagatgcctctgtccacaccctgctggatgccttggagacgctgggagagagacttgccaagcagaagattgaggaccacttgttgagctctggaaagttcatgtatctagaaggtaatgcagactctgccatgtcctaagtgtgattctcttcaggaagtgagaccttccctggtttaccttttttctggaaaaagcccaactggactccagtcagtaggaaagtgccacaattgtcacatgaccggtactggaagaaactctcccatccaacatcacccagtggatggaacatcctgtaacttttcactgcacttggcattatttttataagctgaatgtgataataaggacactatggaaatgtctggatcattccgtttgtgcgtactttgagatttggtttgggatgtcattgttttcacagcacttttttatcctaatgtaaatgctttatttatttatttgggctacattgtaagatccatctacacagtcgttgtccgacttcacttgatactatatgatatgaaccttttttgggtggggggtgcggggcagttcactctgtctcccaggctggagtgcaatggtgcaatcttggctcactatagccttgacctctcaggctcaagcgattctcccacctcagccatccaaatagctgggaccacaggtgtgcaccaccacgcccggctaattttttgtattttgtctagatataggggctctctatgttgctcagggtggtctcgaattcctggactcaagcagtctgcccacctcagactcccaaagcggtggaattagaggcgtgagcccccatgcttggccttacctttctacttttataattctgtatgttattattttatgaacatgaagaaactttagtaaatgtacttgtttacatagttatgtgaatagattagataaacataaaaggaggagacatacaatgggggaagaagaagaagtcccctgtaagatgtcactgtctgggttccagccctccctcagatgtactttggcttcaatgattggcaacttctacaggggccagtcttttgaactggacaaccttacaagtatatgagtattatttataggtagttgtttacatatgagtcgggaccaaagagaactggatccacgtgaagtcctgtgtgtggctggtccctacctgggcagtctcatttgcacccatagcccccatctatggacaggctgggacagaggcagatgggttagatcacacataacaatagggtctatgtcatatcccaagtgaacttgagccctgtttgggctcaggagatagaagacaaaatctgtctcccacgtctgccatggcatcaagggggaagagtagatggtgcttgagaatggtgtgaaatggttgccatctcaggagtagatggcccggctcacttctggttatctgtcaccctgagcccatgagctgccttttagggtacagattgcctacttgaggaccttggccgctctgtaagcatctgactcatctcagaaatgtcaattcttaaacactgtggcaacaggacctagaatggctgacgcattaaggttttcttcttgtgtcctgttctattattgttttaagacctcagtaaccatttcagcctctttccagcaaacccttctccatagtatttcagtcatggaaggatcatttatgcaggtagtcattccaggagtttttggtcttttctgtctcaaggcattgtgtgttttgttccgggactggtttgggtgggacaaagttagaattgcctgaagatcacacattcagactgttgtgtctgtggagttttaggagtggggggtgacctttctggtctttgcacttccatcctctcccacttccatctggcatcccacgcgttgtcccctgcacttctggaaggcacagggtgctgctgcctcctggtctttgcctttgctgggccttctgtgcaggacgctcagcctcagggctcagaaggtgccagtccggtcccaggtcccttgtcccttccacagaggccttcctagaagatgcatctagagtgtcagccttatcagtgtttaagatttttcttttatttttaatttttttgagacagaatctcactctctcgcccaggctggagtgcaacggtacgatcttggctcagtgcaacctccgcctcctgggttcaagcgattctcgtgcctcagcctccggagtagctgggattgcaggcacccgccaccacgcctggctaatttttgtatttttagtagagacggggtttcaccatgttggtcaggctggtctcgaactcctgacctcaggtgatccaccttggcctccgaaagtgctgggattacaggcgtgagccaccagccaggccaagctattcttttaaagtaagcttcctgacgacatgaaataattgggggttttgttgtttagttacattaggctttgctatatccccaggccaaatagcatgtgacacaggacagccatagtatagtgtgtcactcgtggttggtgtcctttcatgcttctgccctgtcaaaggtccctatttgaaatgtgttataatacaaacaaggaagcacattgtgtacaaaatacttatgtatttatgaatccatgaccaaattaaatatgaaaccttatataaaaaaaggtg

SEQ ID NO: 278757 - DNA, 2684 bp, Homo sapiens
gactcttgaggatccccaccggcctggatgccttggagacgctgggagagagacttgccaagcagaagattgaggaccacttgttgagctctggaaagttcatgtatctagaaggtaatgcagactctgccatgtcctaagtgtgattctcttcaggaagtgagaccttccctggtttaccttttttctggaaaaagcccaactggactccagtcagtaggaaagtgccacaattgtcacatgaccggtactggaagaaactctcccatccaacatcacccagtggatggaacatcctgtaacttttcactgcacttggcattatttttataagctgaatgtgataataaggacactatggaaatgtctggatcattccgtttgtgcgtactttgagatttggtttgggatgtcattgttttcacagcacttttttatcctaatgtaaatgctttatttatttatttgggctacattgtaagatccatctacacagtcgttgtccgacttcacttgatactatatgatatgaaccttttttgggtggggggtgcggggcagttcactctgtctcccaggctggagtgcaatggtgcaatcttggctcactatagccttgacctctcaggctcaagcgattctcccacctcagccatccaaatagctgggaccacaggtgtgcaccaccacgcccggctaattttttgtattttgtctagatataggggctctctatgttgctcagggtggtctcgaattcctggactcaagcagtctgcccacctcagactcccaaagcggtggaattagaggcgtgagcccccatgcttggccttacctttctacttttataattctgtatgttattattttatgaacatgaagaaactttagtaaatgtacttgtttacatagttatgtgaatagattagataaacataaaaggaggagacatacaatgggggaagaagaagaagtcccctgtaagatgtcactgtctgggttccagccctccctcagatgtactttggcttcaatgattggcaacttctacaggggccagtcttttgaactggacaaccttacaagtatatgagtattatttataggtagttgtttacatatgagtcgggaccaaagagaactggatccacgtgaagtcctgtgtgtggctggtccctacctgggcagtctcatttgcacccatagcccccatctatggacaggctgggacagaggcagatgggttagatcacacataacaatagggtctatgtcatatcccaagtgaacttgagccctgtttgggctcaggagatagaagacaaaatctgtctcccacgtctgccatggcatcaagggggaagagtagatggtgcttgagaatggtgtgaaatggttgccatctcaggagtagatggcccggctcacttctggttatctgtcaccctgagcccatgagctgccttttagggtacagattgcctacttgaggaccttggccgctctgtaagcatctgactcatctcagaaatgtcaattcttaaacactgtggcaacaggacctagaatggctgacgcattaaggttttcttcttgtgtcctgttctattattgttttaagacctcagtaaccatttcagcctctttccagcaaacccttctccatagtatttcagtcatggaaggatcatttatgcaggtagtcattccaggagtttttggtcttttctgtctcaaggcattgtgtgttttgttccgggactggtttgggtgggacaaagttagaattgcctgaagatcacacattcagactgttgtgtctgtggagttttaggagtggggggtgacctttctggtctttgcacttccatcctctcccacttccatctggcatcccacgcgttgtcccctgcacttctggaaggcacagggtgctgctgcctcctggtctttgcctttgctgggccttctgtgcaggacgctcagcctcagggctcagaaggtgccagtccggtcccaggtcccttgtcccttccacagaggccttcctagaagatgcatctagagtgtcagccttatcagtgtttaagatttttcttttatttttaatttttttgagacagaatctcactctctcgcccaggctggagtgcaacggtacgatcttggctcagtgcaacctccgcctcctgggttcaagcgattctcgtgcctcagcctccggagtagctgggattgcaggcacccgccaccacgcctggctaatttttgtatttttagtagagacggggtttcaccatgttggtcaggctggtctcgaactcctgacctcaggtgatccaccttggcctccgaaagtgctgggattacaggcgtgagccaccagccaggccaagctattcttttaaagtaagcttcctgacgacatgaaataattgggggttttgttgtttagttacattaggctttgctatatccccaggccaaatagcatgtgacacaggacagccatagtatagtgtgtcactcgtggttggtgtcctttcatgcttctgccctgtcaaaggtccctatttgaaatgtgttataatacaaacaaggaagcacattgtgtacaaaatacttatgtatttatgaatccatgaccaaattaaatatgaaaccttatataaaaaaaggtg

SEQ ID NO: 278758 - DNA, 1655 bp, Homo sapiens
gagtcatttcaaccggggtaaagttcttatgaacggcagcacccctacacggtttacatcttattacttgatgccctagcttgctagcgttatcaatcgcgaccacatagtcctggttctaccttaagtccttttgttaaaattttttctccataagaggggtctcatttgcacccatagcccccatctatggacaggctgggacagaggcagatgggttagatcacacataacaatagggtctatgtcatatcccaagtgaacttgagccctgtttgggctcaggagatagaagacaaaatctgtctcccacgtctgccatggcatcaagggggaagagtagatggtgcttgagaatggtgtgaaatggttgccatctcaggagtagatggcccggctcacttctggttatctgtcaccctgagcccatgagctgccttttagggtacagattgcctacttgaggaccttggccgctctgtaagcatctgactcatctcagaaatgtcaattcttaaacactgtggcaacaggacctagaatggctgacgcattaaggttttcttcttgtgtcctgttctattattgttttaagacctcagtaaccatttcagcctctttccagcaaacccttctccatagtatttcagtcatggaaggatcatttatgcaggtagtcattccaggagtttttggtcttttctgtctcaaggcattgtgtgttttgttccgggactggtttgggtgggacaaagttagaattgcctgaagatcacacattcagactgttgtgtctgtggagttttaggagtggggggtgacctttctggtctttgcacttccatcctctcccacttccatctggcatcccacgcgttgtcccctgcacttctggaaggcacagggtgctgctgcctcctggtctttgcctttgctgggccttctgtgcaggacgctcagcctcagggctcagaaggtgccagtccggtcccaggtcccttgtcccttccacagaggccttcctagaagatgcatctagagtgtcagccttatcagtgtttaagatttttcttttatttttaatttttttgagacagaatctcactctctcgcccaggctggagtgcaacggtacgatcttggctcagtgcaacctccgcctcctgggttcaagcgattctcgtgcctcagcctccggagtagctgggattgcaggcacccgccaccacgcctggctaatttttgtatttttagtagagacggggtttcaccatgttggtcaggctggtctcgaactcctgacctcaggtgatccaccttggcctccgaaagtgctgggattacaggcgtgagccaccagccaggccaagctattcttttaaagtaagcttcctgacgacatgaaataattgggggttttgttgtttagttacattaggctttgctatatccccaggccaaatagcatgtgacacaggacagccatagtatagtgtgtcactcgtggttggtgtcctttcatgcttctgccctgtcaaaggtccctatttgaaatgtgttataatacaaacaaggaagcacattgtgtacaaaatacttatgtatttatgaatccatgaccaaattaaatatgaaaccttatataaaaaaaggtg

SEQ ID NO: 278759 - DNA, 1415 bp, Homo sapiens
gacccacgcgtccgcggacgcgtggggagccctgtttgggctcaggagatagaagacaaaatctgtctcccacgtctgccatggcatcaagggggaagagtagatggtgcttgagaatggtgtgaaatggttgccatctcaggagtagatggcccggctcacttctggttatctgtcaccctgagcccatgagctgccttttagggtacagattgcctacttgaggaccttggccgctctgtaagcatctgactcatctcagaaatgtcaattcttaaacactgtggcaacaggacctagaatggctgacgcattaaggttttcttcttgtgtcctgttctattattgttttaagacctcagtaaccatttcagcctctttccagcaaacccttctccatagtatttcagtcatggaaggatcatttatgcaggtagtcattccaggagtttttggtcttttctgtctcaaggcattgtgtgttttgttccgggactggtttgggtgggacaaagttagaattgcctgaagatcacacattcagactgttgtgtctgtggagttttaggagtggggggtgacctttctggtctttgcacttccatcctctcccacttccatctggcatcccacgcgttgtcccctgcacttctggaaggcacagggtgctgctgcctcctggtctttgcctttgctgggccttctgtgcaggacgctcagcctcagggctcagaaggtgccagtccggtcccaggtcccttgtcccttccacagaggccttcctagaagatgcatctagagtgtcagccttatcagtgtttaagatttttcttttatttttaatttttttgagacagaatctcactctctcgcccaggctggagtgcaacggtacgatcttggctcagtgcaacctccgcctcctgggttcaagcgattctcgtgcctcagcctccggagtagctgggattgcaggcacccgccaccacgcctggctaatttttgtatttttagtagagacggggtttcaccatgttggtcaggctggtctcgaactcctgacctcaggtgatccaccttggcctccgaaagtgctgggattacaggcgtgagccaccagccaggccaagctattcttttaaagtaagcttcctgacgacatgaaataattgggggttttgttgtttagttacattaggctttgctatatccccaggccaaatagcatgtgacacaggacagccatagtatagtgtgtcactcgtggttggtgtcctttcatgcttctgccctgtcaaaggtccctatttgaaatgtgttataatacaaacaaggaagcacattgtgtacaaaatacttatgtatttatgaatccatgaccaaattaaatatgaaaccttatataaaaaaaggtg

SEQ ID NO: 278760 - DNA, 1344 bp, Homo sapiens
aggctgaatggaggctgaatggagaggctgaatggacagaggtgaatggtgtgaaatggttgccatctcaggagtagatggcccggctcacttctggttatctgtcaccctgagcccatgagctgccttttagggtacagattgcctacttgaggaccttggccgctctgtaagcatctgactcatctcagaaatgtcaattcttaaacactgtggcaacaggacctagaatggctgacgcattaaggttttcttcttgtgtcctgttctattattgttttaagacctcagtaaccatttcagcctctttccagcaaacccttctccatagtatttcagtcatggaaggatcatttatgcaggtagtcattccaggagtttttggtcttttctgtctcaaggcattgtgtgttttgttccgggactggtttgggtgggacaaagttagaattgcctgaagatcacacattcagactgttgtgtctgtggagttttaggagtggggggtgacctttctggtctttgcacttccatcctctcccacttccatctggcatcccacgcgttgtcccctgcacttctggaaggcacagggtgctgctgcctcctggtctttgcctttgctgggccttctgtgcaggacgctcagcctcagggctcagaaggtgccagtccggtcccaggtcccttgtcccttccacagaggccttcctagaagatgcatctagagtgtcagccttatcagtgtttaagatttttcttttatttttaatttttttgagacagaatctcactctctcgcccaggctggagtgcaacggtacgatcttggctcagtgcaacctccgcctcctgggttcaagcgattctcgtgcctcagcctccggagtagctgggattgcaggcacccgccaccacgcctggctaatttttgtatttttagtagagacggggtttcaccatgttggtcaggctggtctcgaactcctgacctcaggtgatccaccttggcctccgaaagtgctgggattacaggcgtgagccaccagccaggccaagctattcttttaaagtaagcttcctgacgacatgaaataattgggggttttgttgtttagttacattaggctttgctatatccccaggccaaatagcatgtgacacaggacagccatagtatagtgtgtcactcgtggttggtgtcctttcatgcttctgccctgtcaaaggtccctatttgaaatgtgttataatacaaacaaggaagcacattgtgtacaaaatacttatgtatttatgaatccatgaccaaattaaatatgaaaccttatataaaaaaaggtg

SEQ ID NO: 278761 - DNA, 1025 bp, Homo sapiens
cggacgcgtgggcgaccacgcgtccggtcttttctgtctcaaggcattgtgtgttttgttccgggactggtttgggtgggacaaagttagaattgcctgaagatcacacattcagactgttgtgtctgtggagttttaggagtggggggtgacctttctggtctttgcacttccatcctctcccacttccatctggcatcccacgcgttgtcccctgcacttctggaaggcacagggtgctgctgcctcctggtctttgcctttgctgggccttctgtgcaggacgctcagcctcagggctcagaaggtgccagtccggtcccaggtcccttgtcccttccacagaggccttcctagaagatgcatctagagtgtcagccttatcagtgtttaagatttttcttttatttttaatttttttgagacagaatctcactctctcgcccaggctggagtgcaacggtacgatcttggctcagtgcaacctccgcctcctgggttcaagcgattctcgtgcctcagcctccggagtagctgggattgcaggcacccgccaccacgcctggctaatttttgtatttttagtagagacggggtttcaccatgttggtcaggctggtctcgaactcctgacctcaggtgatccaccttggcctccgaaagtgctgggattacaggcgtgagccaccagccaggccaagctattcttttaaagtaagcttcctgacgacatgaaataattgggggttttgttgtttcttcctgacgacatgaaataattgggggttttgttgtttagttacattaggctttgctatatccccaggccaaatagcatgtgacacaggacagccatagtatagtgtgtcactcgtggttggtgtcctttcatgcttctgccctgtcaaaggtccctatttgaaatgtgttataatacaaacaaggaagcacattgtgtacaaaatacttatgtatttatgaatccatgaccaaattaaatatgaaaccttatataaaaaaaggtg

SEQ ID NO: 278762 - DNA, 2000 bp, Homo sapiens
  misc_feature (158)..(158): n is a, c, g, or t
gcgcttgcggaggattgcgttgacgagactcttatttattgtcaccaacctgtggtggaatttgcagttgcacattggatctgattcgccccgccccgaatgacgcctgcccggaggcagtgaaagtacagccgcgccgccccaagtcagcccggacncataaatcagcacgcggccggagaaccccgcaatctctgcgcccacaaaatacaccgacgatgcccgatctactttaagggctgaaacccacgggcctgagagactataagagcgttccctaccgccatggaacaacggggacagaacgccccggccgcttcgggggcccggaaaaggcacggcccaggacccagggaggcgcggggagccaggcctgggctccgggtccccaagacccttgtgctcgttgtcgccgcggtcctgctgttggtctcagctgagtctgctctgatcacccaacaagacctagctccccagcagagagcggccccacaacaaaagaggtccagcccctcagagggattgtgtccacctggacaccatatctcagaagacggtagagattgcatctcctgcaaatatggacaggactatagcactcactggaatgacctccttttctgcttgcgctgcaccaggtgtgattcaggtgaagtggagctaagtccctgcaccacgaccagaaacacagtgtgtcagtgcgaagaaggcaccttccgggaagaagattctcctgagatgtgccggaagtgccgcacagggtgtcccagagggatggtcaaggtcggtgattgtacaccctggagtgacatcgaatgtgtccacaaagaatcaggtacaaagcacagtggggaagccccagctgtggaggagacggtgacctccagcccagggactcctgcctctccctgttctctctcaggcatcatcataggagtcacagttgcagccgtagtcttgattgtggctgtgtttgtttgcaagtctttactgtggaagaaagtccttccttacctgaaaggcatctgctcaggtggtggtggggaccctgagcgtgtggacagaagctcacaacgacctggggctgaggacaatgtcctcaatgagatcgtgagtatcttgcagcccacccaggtccctgagcaggaaatggaagtccaggagccagcagagccaacaggtgtcaacatgttgtcccccggggagtcagagcatctgctggaaccggcagaagctgaaaggtctcagaggaggaggctgctggttccagcaaatgaaggtgatcccactgagactctgagacagtgcttcgatgactttgcagacttggtgccctttgactcctgggagccgctcatgaggaagttgggcctcatggacaatgagataaaggtggctaaagctgaggcagcgggccacagggacaccttgtacacgatgctgataaagtgggtcaacaaaaccgggcgagatgcctctgtccacaccctgctggatgccttggagacgctgggagagagacttgccaagcagaagattgaggaccacttgttgagctctggaaagttcatgtatctagaaggtaatgcagactctgccatgtcctaagtgtgattctcttcaggaagtgagaccttccctggtttaccttttttctggaaaaagcccaactggactccagtcagtaggaaagtgccacaattgtcacatgaccggtactggaagaaactctcccatccaacatcacccagtggatggaacatcctgtaacttttcactgcacttggcattatttttataagctgaatgtgataataaggacactatggaaatgtctggatcattccgtttgtgcgtactttgagatttggtttgggatgtcattgttttcacagcacttttttatcctaatgtaaatgctttatttatttatttgggctacattgtaagatccagcaggtcgtctcgtttcaagatctgtttaaactagttagctaggc

SEQ ID NO: 278763 - DNA, 3942 bp, Homo sapiens
  misc_feature (158)..(158): n is a, c, g, or t
gcgcttgcggaggattgcgttgacgagactcttatttattgtcaccaacctgtggtggaatttgcagttgcacattggatctgattcgccccgccccgaatgacgcctgcccggaggcagtgaaagtacagccgcgccgccccaagtcagcccggacncataaatcagcacgcggccggagaaccccgcaatctctgcgcccacaaaatacaccgacgatgcccgatctactttaagggctgaaacccacgggcctgagagactataagagcgttccctaccgccatggaacaacggggacagaacgccccggccgcttcgggggcccggaaaaggcacggcccaggacccagggaggcgcggggagccaggcctgggctccgggtccccaagacccttgtgctcgttgtcgccgcggtcctgctgttggtctcagctgagtctgctctgatcacccaacaagacctagctccccagcagagagcggccccacaacaaaagaggtccagcccctcagagggattgtgtccacctggacaccatatctcagaagacggtagagattgcatctcctgcaaatatggacaggactatagcactcactggaatgacctccttttctgcttgcgctgcaccaggtgtgattcaggtgaagtggagctaagtccctgcaccacgaccagaaacacagtgtgtcagtgcgaagaaggcaccttccgggaagaagattctcctgagatgtgccggaagtgccgcacagggtgtcccagagggatggtcaaggtcggtgattgtacaccctggagtgacatcgaatgtgtccacaaagaatcaggcatcatcataggagtcacagttgcagccgtagtcttgattgtggctgtgtttgtttgcaagtctttactgtggaagaaagtccttccttacctgaaaggcatctgctcaggtggtggtggggaccctgagcgtgtggacagaagctcacaacgacctggggctgaggacaatgtcctcaatgagatcgtgagtatcttgcagcccacccaggtccctgagcaggaaatggaagtccaggagccagcagagccaacaggtgtcaacatgttgtcccccggggagtcagagcatctgctggaaccggcagaagctgaaaggtctcagaggaggaggctgctggttccagcaaatgaaggtgatcccactgagactctgagacagtgcttcgatgactttgcagacttggtgccctttgactcctgggagccgctcatgaggaagttgggcctcatggacaatgagataaaggtggctaaagctgaggcagcgggccacagggacaccttgtacacgatgctgataaagtgggtcaacaaaaccgggcgagatgcctctgtccacaccctgctggatgccttggagacgctgggagagagacttgccaagcagaagattgaggaccacttgttgagctctggaaagttcatgtatctagaaggtaatgcagactctgccatgtcctaagtgtgattctcttcaggaagtgagaccttccctggtttaccttttttctggaaaaagcccaactggactccagtcagtaggaaagtgccacaattgtcacatgaccggtactggaagaaactctcccatccaacatcacccagtggatggaacatcctgtaacttttcactgcacttggcattatttttataagctgaatgtgataataaggacactatggaaatgtctggatcattccgtttgtgcgtactttgagatttggtttgggatgtcattgttttcacagcacttttttatcctaatgtaaatgctttatttatttatttgggctacattgtaagatccatctacacagtcgttgtccgacttcacttgatactatatgatatgaaccttttttgggtggggggtgcggggcagttcactctgtctcccaggctggagtgcaatggtgcaatcttggctcactatagccttgacctctcaggctcaagcgattctcccacctcagccatccaaatagctgggaccacaggtgtgcaccaccacgcccggctaattttttgtattttgtctagatataggggctctctatgttgctcagggtggtctcgaattcctggactcaagcagtctgcccacctcagactcccaaagcggtggaattagaggcgtgagcccccatgcttggccttacctttctacttttataattctgtatgttattattttatgaacatgaagaaactttagtaaatgtacttgtttacatagttatgtgaatagattagataaacataaaaggaggagacatacaatgggggaagaagaagaagtcccctgtaagatgtcactgtctgggttccagccctccctcagatgtactttggcttcaatgattggcaacttctacaggggccagtcttttgaactggacaaccttacaagtatatgagtattatttataggtagttgtttacatatgagtcgggaccaaagagaactggatccacgtgaagtcctgtgtgtggctggtccctacctgggcagtctcatttgcacccatagcccccatctatggacaggctgggacagaggcagatgggttagatcacacataacaatagggtctatgtcatatcccaagtgaacttgagccctgtttgggctcaggagatagaagacaaaatctgtctcccacgtctgccatggcatcaagggggaagagtagatggtgcttgagaatggtgtgaaatggttgccatctcaggagtagatggcccggctcacttctggttatctgtcaccctgagcccatgagctgccttttagggtacagattgcctacttgaggaccttggccgctctgtaagcatctgactcatctcagaaatgtcaattcttaaacactgtggcaacaggacctagaatggctgacgcattaaggttttcttcttgtgtcctgttctattattgttttaagacctcagtaaccatttcagcctctttccagcaaacccttctccatagtatttcagtcatggaaggatcatttatgcaggtagtcattccaggagtttttggtcttttctgtctcaaggcattgtgtgttttgttccgggactggtttgggtgggacaaagttagaattgcctgaagatcacacattcagactgttgtgtctgtggagttttaggagtggggggtgacctttctggtctttgcacttccatcctctcccacttccatctggcatcccacgcgttgtcccttccacagaggccttcctagaagatgcatctagagtgtcagccttatcagtgtttaagatttttcttttatttttaatttttttgagacagaatctcactctctcgcccaggctggagtgcaacggtacgatcttggctcagtgcaacctccgcctcctgggttcaagcgattctcgtgcctcagcctccggagtagctgggattgcaggcacccgccaccacgcctggctaatttttgtatttttagtagagacggggtttcaccatgttggtcaggctggtctcgaactcctgacctcaggtgatccaccttggcctccgaaagtgctgggattacaggcgtgagccaccagccaggccaagctattcttttaaagtaagcttcctgacgacatgaaataattgggggttttgttgtttagttacattaggctttgctatatccccaggccaaatagcatgtgacacaggacagccatagtatagtgtgtcactcgtggttggtgtcctttcatgcttctgccctgtcaaaggtccctatttgaaatgtgttataatacaaacaaggaagcacattgtgtacaaaatacttatgtatttatgaatccatgaccaaattaaatatgaaaccttatataaaaaaaggtg

SEQ ID NO: 278764 - DNA, 3928 bp, Homo sapiens
  misc_feature (158)..(158): n is a, c, g, or t
gcgcttgcggaggattgcgttgacgagactcttatttattgtcaccaacctgtggtggaatttgcagttgcacattggatctgattcgccccgccccgaatgacgcctgcccggaggcagtgaaagtacagccgcgccgccccaagtcagcccggacncataaatcagcacgcggccggagaaccccgcaatctctgcgcccacaaaatacaccgacgatgcccgatctactttaagggctgaaacccacgggcctgagagactataagagcgttccctaccgccatggaacaacggggacagaacgccccggccgcttcgggggcccggaaaaggcacggcccaggacccagggaggcgcggggagccaggcctgggctccgggtccccaagacccttgtgctcgttgtcgccgcggtcctgctgttggtctcagctgagtctgctctgatcacccaacaagacctagctccccagcagagagcggccccacaacaaaagaggtccagcccctcagagggattgtgtccacctggacaccatatctcagaagacggtagagattgcatctcctgcaaatatggacaggactatagcactcactggaatgacctccttttctgcttgcgctgcaccaggtgtgattcaggtgaagtggagctaagtccctgcaccacgaccagaaacacagtgtgtcagtgcgaagaaggcaccttccgggaagaagattctcctgagatgtgccggaagtgccgcacagggtgtcccagagggatggtcaaggtcggtgattgtacaccctggagtgacatcgaatgtgtccacaaagaatcaggcatcatcataggagtcacagttgcagccgtagtcttgattgtggctgtgtttgtttgcaagtctttactgtggaagaaagtccttccttacctgaaaggcatctgctcaggtggtggtggggaccctgagcgtgtggacagaagctcacaacgacctggggctgaggacaatgtcctcaatgagatcgtgagtatcttgcagcccacccaggtccctgagcaggaaatggaagtccaggagccagcagagccaacaggtgtcaacatgttgtcccccggggagtcagagcatctgctggaaccggcagaagctgaaaggtctcagaggaggaggctgctggttccagcaaatgaaggtgatcccactgagactctgagacagtgcttcgatgactttgcagacttggtgccctttgactcctgggagccgctcatgaggaagttgggcctcatggacaatgagataaaggtggctaaagctgaggcagcgggccacagggacaccttgtacacgatgctgataaagtgggtcaacaaaaccgggcgagatgcctctgtccacaccctgctggatgccttggagacgctgggagagagacttgccaagcagaagattgaggaccacttgttgagctctggaaagttcatgtatctagaaggtaatgcagactctgccatgtcctaagtgtgattctcttcaggaagtgagaccttccctggtttaccttttttctggaaaaagcccaactggactccagtcagtaggaaagtgccacaattgtcacatgaccggtactggaagaaactctcccatccaacatcacccagtggatggaacatcctgtaacttttcactgcacttggcattatttttataagctgaatgtgataataaggacactatggaaatgtctggatcattccgtttgtgcgtactttgagatttggtttgggatgtcattgttttcacagcacttttttatcctaatgtaaatgctttatttatttatttgggctacattgtaagatccatctacacagtcgttgtccgacttcacttgatactatatgatatgaaccttttttgggtggggggtgcggggcagttcactctgtctcccaggctggagtgcaatggtgcaatcttggctcactatagccttgacctctcaggctcaagcgattctcccacctcagccatccaaatagctgggaccacaggtgtgcaccaccacgcccggctaattttttgtattttgtctagatataggggctctctatgttgctcagggtggtctcgaattcctggactcaagcagtctgcccacctcagactcccaaagcggtggaattagaggcgtgagcccccatgcttggccttacctttctacttttataattctgtatgttattattttatgaacatgaagaaactttagtaaatgtacttgtttacatagttatgtgaatagattagataaacataaaaggaggagacatacaatgggggaagaagaagaagtcccctgtaagatgtcactgtctgggttccagccctccctcagatgtactttggcttcaatgattggcaacttctacaggggccagtcttttgaactggacaaccttacaagtatatgagtattatttataggtagttgtttacatatgagtcgggaccaaagagaactggatccacgtgaagtcctgtgtgtggctggtccctacctgggcagtctcatttgcacccatagcccccatctatggacaggctgggacagaggcagatgggttagatcacacataacaatagggtctatgtcatatcccaagtgaacttgagccctgtttgggctcaggagatagaagacaaaatctgtctcccacgtctgccatggcatcaagggggaagagtagatggtgcttgagaatggtgtgaaatggttgccatctcaggagtagatggcccggctcacttctggttatctgtcaccctgagcccatgagctgccttttagggtacagattgcctacttgaggaccttggccgctctgtaagcatctgactcatctcagaaatgtcaattcttaaacactgtggcaacaggacctagaatggctgacgcattaaggttttcttcttgtgtcctgttctattattgttttaagacctcagtaaccatttcagcctctttccagcaaacccttctccatagtatttcagtcatggaaggatcatttatgcaggtagtcattccaggagtttttggtcttttctgtctcaaggcattgtgtgttttgttccgggactggtttgggtgggacaaagttagaattgcctgaagatcacacattcagactgttgtgtctgtggagttttaggagtggggggtgacctttctggtctttgcacttccatcctctcccacttccatctggcatcccacgcgttgtcccctgcacttctggaaggcacagggtgctgctgcctcctggtctttgcctttgctgggccttctgtgcaggacgctcagcctcagggctcagaaggtgccagtccggtcccaggtcccttgtcccttccacagaggccttcctagaagatgcatctagagtgtcagccttatcagtgtttaagatttttcttttatttttaatttttttgagacagaatctcactctctcgcccaggctggagtgcaacggtacgatcttggctcagtgcaacctccgcctcctgggttcaagcgattctcgtgcctcagcctccggagtagttacaggcgtgagccaccagccaggccaagctattcttttaaagtaagcttcctgacgacatgaaataattgggggttttgttgtttagttacattaggctttgctatatccccaggccaaatagcatgtgacacaggacagccatagtatagtgtgtcactcgtggttggtgtcctttcatgcttctgccctgtcaaaggtccctatttgaaatgtgttataatacaaacaaggaagcacattgtgtacaaaatacttatgtatttatgaatccatgaccaaattaaatatgaaaccttatataaaaaaaggtg

SEQ ID NO: 278765 - DNA, 3505 bp, Homo sapiens
  misc_feature (158)..(158): n is a, c, g, or t
gcgcttgcggaggattgcgttgacgagactcttatttattgtcaccaacctgtggtggaatttgcagttgcacattggatctgattcgccccgccccgaatgacgcctgcccggaggcagtgaaagtacagccgcgccgccccaagtcagcccggacncataaatcagcacgcggccggagaaccccgcaatctctgcgcccacaaaatacaccgacgatgcccgatctactttaagggctgaaacccacgggcctgagagactataagagcgttccctaccgccatggaacaacggggacagaacgccccggccgcttcgggggcccggaaaaggcacggcccaggacccagggaggcgcggggagccaggcctgggctccgggtccccaagacccttgtgctcgttgtcgccgcggtcctgctgttggtctcagctgagtctgctctgatcacccaacaagacctagctccccagcagagagcggccccacaacaaaagaggtccagcccctcagagggattgtgtccacctggacaccatatctcagaagacggtagagattgcatctcctgcaaatatggacaggactatagcactcactggaatgacctccttttctgcttgcgctgcaccaggtgtgattcaggtgaagtggagctaagtccctgcaccacgaccagaaacacagtgtgtcagtgcgaagaaggcaccttccgggaagaagattctcctgagatgtgccggaagtgccgcacagggtgtcccagagggatggtcaaggtcggtgattgtacaccctggagtgacatcgaatgtgtccacaaagaatcaggcatcatcataggagtcacagttgcagccgtagtcttgattgtggctgtgtttgtttgcaagtctttactgtggaagaaagtccttccttacctgaaaggcatctgctcaggtggtggtggggaccctgagcgtgtggacagaagctcacaacgacctggggctgaggacaatgtcctcaatgagatcgtgagtatcttgcagcccacccaggtccctgagcaggaaatggaagtccaggagccagcagagccaacaggtgtcaacatgttgtcccccggggagtcagagcatctgctggaaccggcagaagctgaaaggtctcagaggaggaggctgctggttccagcaaatgaaggtgatcccactgagactctgagacagtgcttcgatgactttgcagacttggtgccctttgactcctgggagccgctcatgaggaagttgggcctcatggacaatgagataaaggtggctaaagctgaggcagcgggccacagggacaccttgtacacgatgctgataaagtgggtcaacaaaaccgggcgagatgcctctgtccacaccctgctggatgccttggagacgctgggagagagacttgccaagcagaagattgaggaccacttgttgagctctggaaagttcatgtatctagaaggtaatgcagactctgccatgtcctaagtgtgattctcttcaggaagtgagaccttccctggtttaccttttttctggaaaaagcccaactggactccagtcagtaggaaagtgccacaattgtcacatgaccggtactggaagaaactctcccatccaacatcacccagtggatggaacatcctgtaacttttcactgcacttggcattatttttataagctgaatgtgataataaggacactatggaaatgtctggatcattccgtttgtgcgtactttgagatttggtttgggatgtcattgttttcacagcacttttttatcctaatgtaaatgctttatttatttatttgggctacattgtaagatccatctacacagtcgttgtccgacttcacttgatactatatgatatgaaccttttttgggtggggggtgcggggcagttcactctgtctcccaggctggagtgcaatggtgcaatcttggctcactatagccttgacctctcaggctcaagcgattctcccacctcagccatccaaatagctgggaccacaggtgtgcaccaccacgcccggctaattttttgtattttgtctagatataggggctctctatgttgctcagggtggtctcgaattcctggactcaagcagtctgcccacctcagactcccaaagcggtggaattagaggcgtgagcccccatgcttggccttacctttctacttttataattctgtatgttattattttatgaacatgaagaaactttagtaaatgtacttgtttacatagttatgtgaatagattagataaacataaaaggaggagacatacaatgggggaagaagaagaagtcccctgtaagatgtcactgtctgggttccagccctccctcagatgtactttggcttcaatgattggcaacttctacaggggccagtcttttgaactggacaaccttacaagtatatgagtattatttataggtagttgtttacatatgagtcgggaccaaagagaactggatccacgtgaagtcctgtgtgtggctggtccctacctgggcagtctcatttgcacccatagcccccatctatggacaggctgggacagaggcagatgggttagatcacacataacaatagggtctatgtcatatcccaagtgaacttgagccctgtttgggctcaggagatagaagacaaaatctgtctcccacgtctgccatggcatcaagggggaagagtagatggtgcttgagaatggtgtgaaatggttgccatctcaggagtagatggcccggctcacttctggttatctgtcaccctgagcccatgagctgccttttagggtacagattgcctacttgaggaccttggccgctctgtaagcatctgactcatctcagaaatgtcaattcttaaacactgtggcaacaggacctagaatggctgacgcattaaggttttcttcttgtgtcctgttctattattgttttaagacctcagtaaccatttcagcctctttccagcaaacccttctccatagtatttcagtcatggaaggatcatttatgcaggtagtcattccaggagtttttggtcttttctgtctcaaggcattgtgtgttttgttccgggactggtttgggtgggacaaagttagaattgcctgaagatcacacattcagactgttgtgtctgtggagttttaggagtggggggtgacctttctggtctttgcacttccatcctctcccacttccatctggcatcccacgcgttgtcccctgcacttctggaaggcacagggtgctgctgcctcctggtctttgcctttgctgggccttctgtgcaggacgctcagcctcagggctcagaaggtgccagtccggtcccaggtcccttgtcccttccacagaggccttcctagaagatgcatctagagtgtcagcctgagcaacaagagcgaaactctgtctcaaaaaaaagaaaaattata

SEQ ID NO: 278766 - DNA, 3959 bp, Homo sapiens
  misc_feature (158)..(158): n is a, c, g, or t
gcgcttgcggaggattgcgttgacgagactcttatttattgtcaccaacctgtggtggaatttgcagttgcacattggatctgattcgccccgccccgaatgacgcctgcccggaggcagtgaaagtacagccgcgccgccccaagtcagcccggacncataaatcagcacgcggccggagaaccccgcaatctctgcgcccacaaaatacaccgacgatgcccgatctactttaagggctgaaacccacgggcctgagagactataagagcgttccctaccgccatggaacaacggggacagaacgccccggccgcttcgggggcccggaaaaggcacggcccaggacccagggaggcgcggggagccaggcctgggctccgggtccccaagacccttgtgctcgttgtcgccgcggtcctgctgttggacaccatatctcagaagacggtagagattgcatctcctgcaaatatggacaggactatagcactcactggaatgacctccttttctgcttgcgctgcaccaggtgtgattcaggtgaagtggagctaagtccctgcaccacgaccagaaacacagtgtgtcagtgcgaagaaggcaccttccgggaagaagattctcctgagatgtgccggaagtgccgcacagggtgtcccagagggatggtcaaggtcggtgattgtacaccctggagtgacatcgaatgtgtccacaaagaatcaggcatcatcataggagtcacagttgcagccgtagtcttgattgtggctgtgtttgtttgcaagtctttactgtggaagaaagtccttccttacctgaaaggcatctgctcaggtggtggtggggaccctgagcgtgtggacagaagctcacaacgacctggggctgaggacaatgtcctcaatgagatcgtgagtatcttgcagcccacccaggtccctgagcaggaaatggaagtccaggagccagcagagccaacaggtgtcaacatgttgtcccccggggagtcagagcatctgctggaaccggcagaagctgaaaggtctcagaggaggaggctgctggttccagcaaatgaaggtgatcccactgagactctgagacagtgcttcgatgactttgcagacttggtgccctttgactcctgggagccgctcatgaggaagttgggcctcatggacaatgagataaaggtggctaaagctgaggcagcgggccacagggacaccttgtacacgatgctgataaagtgggtcaacaaaaccgggcgagatgcctctgtccacaccctgctggatgccttggagacgctgggagagagacttgccaagcagaagattgaggaccacttgttgagctctggaaagttcatgtatctagaaggtaatgcagactctgccatgtcctaagtgtgattctcttcaggaagtgagaccttccctggtttaccttttttctggaaaaagcccaactggactccagtcagtaggaaagtgccacaattgtcacatgaccggtactggaagaaactctcccatccaacatcacccagtggatggaacatcctgtaacttttcactgcacttggcattatttttataagctgaatgtgataataaggacactatggaaatgtctggatcattccgtttgtgcgtactttgagatttggtttgggatgtcattgttttcacagcacttttttatcctaatgtaaatgctttatttatttatttgggctacattgtaagatccatctacacagtcgttgtccgacttcacttgatactatatgatatgaaccttttttgggtggggggtgcggggcagttcactctgtctcccaggctggagtgcaatggtgcaatcttggctcactatagccttgacctctcaggctcaagcgattctcccacctcagccatccaaatagctgggaccacaggtgtgcaccaccacgcccggctaattttttgtattttgtctagatataggggctctctatgttgctcagggtggtctcgaattcctggactcaagcagtctgcccacctcagactcccaaagcggtggaattagaggcgtgagcccccatgcttggccttacctttctacttttataattctgtatgttattattttatgaacatgaagaaactttagtaaatgtacttgtttacatagttatgtgaatagattagataaacataaaaggaggagacatacaatgggggaagaagaagaagtcccctgtaagatgtcactgtctgggttccagccctccctcagatgtactttggcttcaatgattggcaacttctacaggggccagtcttttgaactggacaaccttacaagtatatgagtattatttataggtagttgtttacatatgagtcgggaccaaagagaactggatccacgtgaagtcctgtgtgtggctggtccctacctgggcagtctcatttgcacccatagcccccatctatggacaggctgggacagaggcagatgggttagatcacacataacaatagggtctatgtcatatcccaagtgaacttgagccctgtttgggctcaggagatagaagacaaaatctgtctcccacgtctgccatggcatcaagggggaagagtagatggtgcttgagaatggtgtgaaatggttgccatctcaggagtagatggcccggctcacttctggttatctgtcaccctgagcccatgagctgccttttagggtacagattgcctacttgaggaccttggccgctctgtaagcatctgactcatctcagaaatgtcaattcttaaacactgtggcaacaggacctagaatggctgacgcattaaggttttcttcttgtgtcctgttctattattgttttaagacctcagtaaccatttcagcctctttccagcaaacccttctccatagtatttcagtcatggaaggatcatttatgcaggtagtcattccaggagtttttggtcttttctgtctcaaggcattgtgtgttttgttccgggactggtttgggtgggacaaagttagaattgcctgaagatcacacattcagactgttgtgtctgtggagttttaggagtggggggtgacctttctggtctttgcacttccatcctctcccacttccatctggcatcccacgcgttgtcccctgcacttctggaaggcacagggtgctgctgcctcctggtctttgcctttgctgggccttctgtgcaggacgctcagcctcagggctcagaaggtgccagtccggtcccaggtcccttgtcccttccacagaggccttcctagaagatgcatctagagtgtcagccttatcagtgtttaagatttttcttttatttttaatttttttgagacagaatctcactctctcgcccaggctggagtgcaacggtacgatcttggctcagtgcaacctccgcctcctgggttcaagcgattctcgtgcctcagcctccggagtagctgggattgcaggcacccgccaccacgcctggctaatttttgtatttttagtagagacggggtttcaccatgttggtcaggctggtctcgaactcctgacctcaggtgatccaccttggcctccgaaagtgctgggattacaggcgtgagccaccagccaggccaagctattcttttaaagtaagcttcctgacgacatgaaataattgggggttttgttgtttagttacattaggctttgctatatccccaggccaaatagcatgtgacacaggacagccatagtatagtgtgtcactcgtggttggtgtcctttcatgcttctgccctgtcaaaggtccctatttgaaatgtgttataatacaaacaaggaagcacattgtgtacaaaatacttatgtatttatgaatccatgaccaaattaaatatgaaaccttatataaaaaaaggtg

SEQ ID NO: 278767 - DNA, 3888 bp, Homo sapiens
  misc_feature (158)..(158): n is a, c, g, or t
gcgcttgcggaggattgcgttgacgagactcttatttattgtcaccaacctgtggtggaatttgcagttgcacattggatctgattcgccccgccccgaatgacgcctgcccggaggcagtgaaagtacagccgcgccgccccaagtcagcccggacncataaatcagcacgcggccggagaaccccgcaatctctgcgcccacaaaatacaccgacgatgcccgatctactttaagggctgaaacccacgggcctgagagactataagagcgttccctaccgccatggaacaacggggacagaacgccccggccgcttcgggggcccggaaaaggcacggcccaggacccagggaggcgcggggagccaggcctgggctccgggtccccaagacccttgtgctcgttgtcgccgcggtcctgctgttggtctcagctgagtctgctctgatcacccaacaagacctagctccccagcagagagcggccccacaacaaaagaggtccagcccctcagagggattgtgtccacctggacaccatatctcagaagacggtagagattgcatctcctgcaaatatggacaggactatagcactcactggaatgacctccttttctgcttgcgctgcaccaggtgtgattcaggtgaagtggagctaagtccctgcaccacgaccagaaacacagtgtgtcagtgcgaagaaggcaccttccgggaagaagattctcctgagatgtgccggaagtgccgcacagggtgtcccagagggatggtcaaggtcggtgattgtacaccctggagtgacatcgaatgtgtccacaaagaatcaggtacaaagcacagtggggaagccccagctgtggaggagacggtgacctccagcccagggactcctgcctctccctgttctctctcaggcatcatcataggagtcacagttgcagccgtagtcttgattgtggctgtgtttgtttgcaagtctttactgtggaagaaagtccttccttacctgaaaggcatctgctcaggtggtggtggggaccctgagcgtgtggacagaagctcacaacgacctggggctgaggacaatgtcctcaatgagatcgtgagtatcttgcagcccacccaggtccctgagcaggaaatggaagtccaggagccagcagagccaacaggtaagtgggtcaacaaaaccgggcgagatgcctctgtccacaccctgctggatgccttggagacgctgggagagagacttgccaagcagaagattgaggaccacttgttgagctctggaaagttcatgtatctagaaggtaatgcagactctgccatgtcctaagtgtgattctcttcaggaagtgagaccttccctggtttaccttttttctggaaaaagcccaactggactccagtcagtaggaaagtgccacaattgtcacatgaccggtactggaagaaactctcccatccaacatcacccagtggatggaacatcctgtaacttttcactgcacttggcattatttttataagctgaatgtgataataaggacactatggaaatgtctggatcattccgtttgtgcgtactttgagatttggtttgggatgtcattgttttcacagcacttttttatcctaatgtaaatgctttatttatttatttgggctacattgtaagatccatctacacagtcgttgtccgacttcacttgatactatatgatatgaaccttttttgggtggggggtgcggggcagttcactctgtctcccaggctggagtgcaatggtgcaatcttggctcactatagccttgacctctcaggctcaagcgattctcccacctcagccatccaaatagctgggaccacaggtgtgcaccaccacgcccggctaattttttgtattttgtctagatataggggctctctatgttgctcagggtggtctcgaattcctggactcaagcagtctgcccacctcagactcccaaagcggtggaattagaggcgtgagcccccatgcttggccttacctttctacttttataattctgtatgttattattttatgaacatgaagaaactttagtaaatgtacttgtttacatagttatgtgaatagattagataaacataaaaggaggagacatacaatgggggaagaagaagaagtcccctgtaagatgtcactgtctgggttccagccctccctcagatgtactttggcttcaatgattggcaacttctacaggggccagtcttttgaactggacaaccttacaagtatatgagtattatttataggtagttgtttacatatgagtcgggaccaaagagaactggatccacgtgaagtcctgtgtgtggctggtccctacctgggcagtctcatttgcacccatagcccccatctatggacaggctgggacagaggcagatgggttagatcacacataacaatagggtctatgtcatatcccaagtgaacttgagccctgtttgggctcaggagatagaagacaaaatctgtctcccacgtctgccatggcatcaagggggaagagtagatggtgcttgagaatggtgtgaaatggttgccatctcaggagtagatggcccggctcacttctggttatctgtcaccctgagcccatgagctgccttttagggtacagattgcctacttgaggaccttggccgctctgtaagcatctgactcatctcagaaatgtcaattcttaaacactgtggcaacaggacctagaatggctgacgcattaaggttttcttcttgtgtcctgttctattattgttttaagacctcagtaaccatttcagcctctttccagcaaacccttctccatagtatttcagtcatggaaggatcatttatgcaggtagtcattccaggagtttttggtcttttctgtctcaaggcattgtgtgttttgttccgggactggtttgggtgggacaaagttagaattgcctgaagatcacacattcagactgttgtgtctgtggagttttaggagtggggggtgacctttctggtctttgcacttccatcctctcccacttccatctggcatcccacgcgttgtcccctgcacttctggaaggcacagggtgctgctgcctcctggtctttgcctttgctgggccttctgtgcaggacgctcagcctcagggctcagaaggtgccagtccggtcccaggtcccttgtcccttccacagaggccttcctagaagatgcatctagagtgtcagccttatcagtgtttaagatttttcttttatttttaatttttttgagacagaatctcactctctcgcccaggctggagtgcaacggtacgatcttggctcagtgcaacctccgcctcctgggttcaagcgattctcgtgcctcagcctccggagtagctgggattgcaggcacccgccaccacgcctggctaatttttgtatttttagtagagacggggtttcaccatgttggtcaggctggtctcgaactcctgacctcaggtgatccaccttggcctccgaaagtgctgggattacaggcgtgagccaccagccaggccaagctattcttttaaagtaagcttcctgacgacatgaaataattgggggttttgttgtttagttacattaggctttgctatatccccaggccaaatagcatgtgacacaggacagccatagtatagtgtgtcactcgtggttggtgtcctttcatgcttctgccctgtcaaaggtccctatttgaaatgtgttataatacaaacaaggaagcacattgtgtacaaaatacttatgtatttatgaatccatgaccaaattaaatatgaaaccttatataaaaaaaggtg

SEQ ID NO: 278768 - DNA, 4107 bp, Homo sapiens
  misc_feature (158)..(158): n is a, c, g, or t
gcgcttgcggaggattgcgttgacgagactcttatttattgtcaccaacctgtggtggaatttgcagttgcacattggatctgattcgccccgccccgaatgacgcctgcccggaggcagtgaaagtacagccgcgccgccccaagtcagcccggacncataaatcagcacgcggccggagaaccccgcaatctctgcgcccacaaaatacaccgacgatgcccgatctactttaagggctgaaacccacgggcctgagagactataagagcgttccctaccgccatggaacaacggggacagaacgccccggccgcttcgggggcccggaaaaggcacggcccaggacccagggaggcgcggggagccaggcctgggctccgggtccccaagacccttgtgctcgttgtcgccgcggtcctgctgttggtctcagctgagtctgctctgatcacccaacaagacctagctccccagcagagagcggccccacaacaaaagaggtccagcccctcagagggattgtgtccacctggacaccatatctcagaagacggtagagattgcatctcctgcaaatatggacaggactatagcactcactggaatgacctccttttctgcttgcgctgcaccaggtgtgattcaggtgaagtggagctaagtccctgcaccacgaccagaaacacagtgtgtcagtgcgaagaaggcaccttccgggaagaagattctcctgagatgtgccggaagtgccgcacagggtgtcccagagggatggtcaaggtcggtgattgtacaccctggagtgacatcgaatgtgtccacaaagaatcaggtacaaagcacagtggggaagccccagctgtggaggagacggtgacctccagcccagggactcctgcctctccctgttctctctcaggcatcatcataggagtcacagttgcagccgtagtcttgattgtggctgtgtttgtttgcaagtctttactgtggaagaaagtccttccttacctgaaaggcatctgctcaggtggtggtggggaccctgagcgtgtggacagaagctcacaacgacctggggctgaggacaatgtcctcaatgagatcgtgagtatcttgcagcccacccaggtccctgagcaggaaatggaagtccaggagccagcagagccaacaggtgtcaacatgttgtcccccggggagtcagagcatctgctggaaccggcagaagctgaaaggtctcagaggaggaggctgctggttccagcaaatgaaggtgatcccactgagactctgagacagtgcttcgatgactttgcagacttggtgccctttgactcctgggagccgctcatgaggaagttgggcctcatggacaatgagataaaggtggctaaagctgaggcagcgggccacagggacaccttgtacacgatgctgatactggatgccttggagacgctgggagagagacttgccaagcagaagattgaggaccacttgttgagctctggaaagttcatgtatctagaaggtaatgcagactctgccatgtcctaagtgtgattctcttcaggaagtgagaccttccctggtttaccttttttctggaaaaagcccaactggactccagtcagtaggaaagtgccacaattgtcacatgaccggtactggaagaaactctcccatccaacatcacccagtggatggaacatcctgtaacttttcactgcacttggcattatttttataagctgaatgtgataataaggacactatggaaatgtctggatcattccgtttgtgcgtactttgagatttggtttgggatgtcattgttttcacagcacttttttatcctaatgtaaatgctttatttatttatttgggctacattgtaagatccatctacacagtcgttgtccgacttcacttgatactatatgatatgaaccttttttgggtggggggtgcggggcagttcactctgtctcccaggctggagtgcaatggtgcaatcttggctcactatagccttgacctctcaggctcaagcgattctcccacctcagccatccaaatagctgggaccacaggtgtgcaccaccacgcccggctaattttttgtattttgtctagatataggggctctctatgttgctcagggtggtctcgaattcctggactcaagcagtctgcccacctcagactcccaaagcggtggaattagaggcgtgagcccccatgcttggccttacctttctacttttataattctgtatgttattattttatgaacatgaagaaactttagtaaatgtacttgtttacatagttatgtgaatagattagataaacataaaaggaggagacatacaatgggggaagaagaagaagtcccctgtaagatgtcactgtctgggttccagccctccctcagatgtactttggcttcaatgattggcaacttctacaggggccagtcttttgaactggacaaccttacaagtatatgagtattatttataggtagttgtttacatatgagtcgggaccaaagagaactggatccacgtgaagtcctgtgtgtggctggtccctacctgggcagtctcatttgcacccatagcccccatctatggacaggctgggacagaggcagatgggttagatcacacataacaatagggtctatgtcatatcccaagtgaacttgagccctgtttgggctcaggagatagaagacaaaatctgtctcccacgtctgccatggcatcaagggggaagagtagatggtgcttgagaatggtgtgaaatggttgccatctcaggagtagatggcccggctcacttctggttatctgtcaccctgagcccatgagctgccttttagggtacagattgcctacttgaggaccttggccgctctgtaagcatctgactcatctcagaaatgtcaattcttaaacactgtggcaacaggacctagaatggctgacgcattaaggttttcttcttgtgtcctgttctattattgttttaagacctcagtaaccatttcagcctctttccagcaaacccttctccatagtatttcagtcatggaaggatcatttatgcaggtagtcattccaggagtttttggtcttttctgtctcaaggcattgtgtgttttgttccgggactggtttgggtgggacaaagttagaattgcctgaagatcacacattcagactgttgtgtctgtggagttttaggagtggggggtgacctttctggtctttgcacttccatcctctcccacttccatctggcatcccacgcgttgtcccctgcacttctggaaggcacagggtgctgctgcctcctggtctttgcctttgctgggccttctgtgcaggacgctcagcctcagggctcagaaggtgccagtccggtcccaggtcccttgtcccttccacagaggccttcctagaagatgcatctagagtgtcagccttatcagtgtttaagatttttcttttatttttaatttttttgagacagaatctcactctctcgcccaggctggagtgcaacggtacgatcttggctcagtgcaacctccgcctcctgggttcaagcgattctcgtgcctcagcctccggagtagctgggattgcaggcacccgccaccacgcctggctaatttttgtatttttagtagagacggggtttcaccatgttggtcaggctggtctcgaactcctgacctcaggtgatccaccttggcctccgaaagtgctgggattacaggcgtgagccaccagccaggccaagctattcttttaaagtaagcttcctgacgacatgaaataattgggggttttgttgtttagttacattaggctttgctatatccccaggccaaatagcatgtgacacaggacagccatagtatagtgtgtcactcgtggttggtgtcctttcatgcttctgccctgtcaaaggtccctatttgaaatgtgttataatacaaacaaggaagcacattgtgtacaaaatacttatgtatttatgaatccatgaccaaattaaatatgaaaccttatataaaaaaaggtg

SEQ ID NO: 278769 - DNA, 3743 bp, Homo sapiens
  misc_feature (158)..(158): n is a, c, g, or t
gcgcttgcggaggattgcgttgacgagactcttatttattgtcaccaacctgtggtggaatttgcagttgcacattggatctgattcgccccgccccgaatgacgcctgcccggaggcagtgaaagtacagccgcgccgccccaagtcagcccggacncataaatcagcacgcggccggagaaccccgcaatctctgcgcccacaaaatacaccgacgatgcccgatctactttaagggctgaaacccacgggcctgagagactataagagcgttccctaccgccatggaacaacggggacagaacgccccggccgcttcgggggcccggaaaaggcacggcccaggacccagggaggcgcggggagccaggcctgggctccgggtccccaagacccttgtgctcgttgtcgccgcggtcctgctgttggtctcagctgagtctgctctgatcacccaacaagacctagctccccagcagagagcggccccacaacaaaagaggtccagcccctcagagggattgtgtccacctggacaccatatctcagaagacggtagagattgcatctcctgcaaatatggacaggactatagcactcactggaatgacctccttttctgcttgcgctgcaccaggtgtgattcaggtgaagtggagctaagtccctgcaccacgaccagaaacacagtgtgtcagtgcgaagaaggcaccttccgggaagaagattctcctgagatgtgccggaagtgccgcacagggtgtcccagagggatggtcaaggtcggtgattgtacaccctggagtgacatcgaatgtgtccacaaagaatcaggtacaaagcacagtggggaagccccagctgtggaggagacggtgacctccagcccagggactcctgcctctccctgttctctctcaggcatcatcataggagtcacagttgcagccgtagtcttgattgtggctgtgtttgtttgcaagtctttactgtggaagaaagtccttccttacctgaaaggcatctgctcaggtggtggtggggaccctgagcgtgtggacagaagctcacaacgacctggggctgaggacaatgtcctcaatgagatcgtgagtatcttgcagcccacccaggtccctgagcaggaaatggaaagttcatgtatctagaaggtaatgcagactctgccatgtcctaagtgtgattctcttcaggaagtgagaccttccctggtttaccttttttctggaaaaagcccaactggactccagtcagtaggaaagtgccacaattgtcacatgaccggtactggaagaaactctcccatccaacatcacccagtggatggaacatcctgtaacttttcactgcacttggcattatttttataagctgaatgtgataataaggacactatggaaatgtctggatcattccgtttgtgcgtactttgagatttggtttgggatgtcattgttttcacagcacttttttatcctaatgtaaatgctttatttatttatttgggctacattgtaagatccatctacacagtcgttgtccgacttcacttgatactatatgatatgaaccttttttgggtggggggtgcggggcagttcactctgtctcccaggctggagtgcaatggtgcaatcttggctcactatagccttgacctctcaggctcaagcgattctcccacctcagccatccaaatagctgggaccacaggtgtgcaccaccacgcccggctaattttttgtattttgtctagatataggggctctctatgttgctcagggtggtctcgaattcctggactcaagcagtctgcccacctcagactcccaaagcggtggaattagaggcgtgagcccccatgcttggccttacctttctacttttataattctgtatgttattattttatgaacatgaagaaactttagtaaatgtacttgtttacatagttatgtgaatagattagataaacataaaaggaggagacatacaatgggggaagaagaagaagtcccctgtaagatgtcactgtctgggttccagccctccctcagatgtactttggcttcaatgattggcaacttctacaggggccagtcttttgaactggacaaccttacaagtatatgagtattatttataggtagttgtttacatatgagtcgggaccaaagagaactggatccacgtgaagtcctgtgtgtggctggtccctacctgggcagtctcatttgcacccatagcccccatctatggacaggctgggacagaggcagatgggttagatcacacataacaatagggtctatgtcatatcccaagtgaacttgagccctgtttgggctcaggagatagaagacaaaatctgtctcccacgtctgccatggcatcaagggggaagagtagatggtgcttgagaatggtgtgaaatggttgccatctcaggagtagatggcccggctcacttctggttatctgtcaccctgagcccatgagctgccttttagggtacagattgcctacttgaggaccttggccgctctgtaagcatctgactcatctcagaaatgtcaattcttaaacactgtggcaacaggacctagaatggctgacgcattaaggttttcttcttgtgtcctgttctattattgttttaagacctcagtaaccatttcagcctctttccagcaaacccttctccatagtatttcagtcatggaaggatcatttatgcaggtagtcattccaggagtttttggtcttttctgtctcaaggcattgtgtgttttgttccgggactggtttgggtgggacaaagttagaattgcctgaagatcacacattcagactgttgtgtctgtggagttttaggagtggggggtgacctttctggtctttgcacttccatcctctcccacttccatctggcatcccacgcgttgtcccctgcacttctggaaggcacagggtgctgctgcctcctggtctttgcctttgctgggccttctgtgcaggacgctcagcctcagggctcagaaggtgccagtccggtcccaggtcccttgtcccttccacagaggccttcctagaagatgcatctagagtgtcagccttatcagtgtttaagatttttcttttatttttaatttttttgagacagaatctcactctctcgcccaggctggagtgcaacggtacgatcttggctcagtgcaacctccgcctcctgggttcaagcgattctcgtgcctcagcctccggagtagctgggattgcaggcacccgccaccacgcctggctaatttttgtatttttagtagagacggggtttcaccatgttggtcaggctggtctcgaactcctgacctcaggtgatccaccttggcctccgaaagtgctgggattacaggcgtgagccaccagccaggccaagctattcttttaaagtaagcttcctgacgacatgaaataattgggggttttgttgtttagttacattaggctttgctatatccccaggccaaatagcatgtgacacaggacagccatagtatagtgtgtcactcgtggttggtgtcctttcatgcttctgccctgtcaaaggtccctatttgaaatgtgttataatacaaacaaggaagcacattgtgtacaaaatacttatgtatttatgaatccatgaccaaattaaatatgaaaccttatataaaaaaaggtg

SEQ ID NO: 278770 - DNA, 481 bp, Homo sapiens
gaccttgccaggggcagtccatgaaagttgaatatgatctccttgaaacttagcctcgaggtctacaattttaccaggtgagaacacctgagaatgattaccattaggaggcactcctgatacagtaaacgaccctccagagaaattgattaagaaaacttagagaacataaaataatagacctacctctgcaatacctggtattcgaagacgggcagaccgaatatttagttcaccttcttgaaaatctgagccaactggactccaagtgccacgagaacagagattgggtctggtccccagcttcagtgcctccaaggcagaaactcaagagacgttgttgaactgtcagcctttacatttatgcattactattgaaggcctggaataaatggatcgtgttttacctgttatcttgctcatctctattactgcttcatcagcagctcttcccaaagcaataaaatgaacaatggcccca

SEQ ID NO: 278771 - DNA, 344 bp, Homo sapiens
gctgccttgtgaagaaggtgacacttcccctttcgcaatgattgtaagacctccccacccatgcagaactgaggtgataactggaagagagcagaaagggagcatctgggatactgccaactggactccaagtgccacgagaacagagattgggtctggtccccagcttcagtgcctccaaggcagaaactcaagagacgttgttgaactgtcagcctttacatttatgcattactattgaaggcctggaataaatggatcgtgttttacctgttatcttgctcatctctattactgcttcatcagcagctcttcccaaagcaataaaatgaacaatggcccca

SEQ ID NO: 278772 - DNA, 2220 bp, Homo sapiens
agcgggcttccttccggtcgttaacgcccacgggctcgcgcggcgccgcctcctgggctcagttaccgcggacgccagtgccgggctccaggagacgcagggcgacgccacacgccggggtggccgactgggtcagcgcgggctgcgcctcctcgccatgggccccctctcggcgcggctgctaatgcagcgcgggcgccccaagagcgaccggctggggaagatccggagtctggacctgtcaggattggagctgctttccgagcacctggaccccaaactcctgtgccgcctgacgcagctgcaggagcttgacctgtctaacaaccacctggagacgctgccggacaacctgggcctgtcccacctgcgtgtcctccgctgcgccaacaaccagctgggggatgttactgccttgtgccagttccccaagctcgaggaactcagcctggagggcaaccccttcctgacggtcaatgacaacctgaaagtctcctttctcctgcccacgctccgtaaggtcaatggcaaggatgcgtcctcaacttactctcaggtggagaacctgaatcgggagctgaccagcagggtcacagctcactgggagaagttcatggccacactgggtcctgaagaggaggctgagaaggcccaggcggactttgtgaagtcggctgtcagggatgtccgctacgggcccgagtccctcagcgagttcacccagtggcgggtgcggatgatctctgaggagctggtggccgccagtaggacccaggtgcaaaaggctaacagcccagagaagcccccagaagctggagctgcccacaagcccagggccagactggcggccttgaaacggccagacgacgtcccactcagcctctctcccagcaagcgggcgtgtgcctccccgtcggcccaggtggagggcagccctgtggcaggctccgatggcagccagcctgctgtgaagctggagcccctgcacttcctgcagtgccacagcaagaacaacagcccccaggacctcgagacccagctgtgggcctgtgccttcgagccggcctgggaggagggggccacatcccagaccgtggccacgtgcggcggggaggctgtgtgcgtaattgattgccagacgggcatcgtgctccacaagtacaaggcacccggcgaggagttcttttctgtggcctggaccgctctgatggtggtcacacaggctggccacaagaagcgctggagtgtgctggcggctgcaggcctacggggcctggtccggctgctgcacgtgcgtgccggcttctgctgcggggtcatccgagcccacaagaaggccatcgccaccctgtgcttcagccccgcccacgagacccatctcttcacggcctcctatgacaagcggatcatcctctgggacatcggggtgcccaaccaggactacgaattccaggccagccagctgctcacactggacaccacctctatccccctgcgcctctgccctgtcgcctcctgcccggacgcccgcctgctggccggctgcgagggcggctgctgctgctgggacgtgcggctggaccagccccaaaagaggagggtgtgtgaagtggaattcgtcttctctgagggctccgaggcatctggacggagagtggatgggctggcatttgtgaatgaggacatcgtggcctccaaggggagcggcctgggcaccatctgcctgtggagctggaggcagacgtgggggggccggggcagccagtccacagtggcagtggtggtcctggcgcggctgcaatggtcgtccaccgagttggcctacttctcgctcagcgcctgccctgataaggggattgtgctctgtggggatgaggagggcaacgtgtggctctacgacgtcagcaacatcctgaagcagccacccctgctgccggcagccctgcaggcccccacacagatcctgaagtggccccagccctgggcccttggccaggtggtgaccaagaccatggtgaacacagtggtggccaatgcctccttcacctacctcaccgccctgacggactccaacatcgtagccatctgggggaggatgtagcctcacaccatcgcaaaggaccagggacacagctaactaacttattcagctttgggccgatgggggtgggggggggtctttcagtgaatatttttattaaactctactgtggacaagaa

SEQ ID NO: 278773 - DNA, 1224 bp, Homo sapiens
  misc_feature (982)..(982): n is a, c, g, or t
agcgggcttccttccggtcgttaacgcccacgggctcgcgcggcgccgcctcctgggctcagttaccgcggacgccagtgccgggctccaggagacgcagggcgacgccacacgccggggtggccgactgggtcagcgcgggctgcgcctcctcgccatgggccccctctcggcgcggctgctaatgcagcgcgggcgccccaagagcgaccggctggggaagatccggagtctggagtaagagccgggcagcggcctgtcaggattggagctgctttccgagcacctggaccccaaactcctgtgccgcctgacgcagctgcaggagcttgacctgtctaacaaccacctggagacgctgccggacaacctgggcctgtcccacctgcgtgtcctccgctgcgccaacaaccagctgggggatgttactgccttgtgccagttccccaagctcgaggaactcagcctggagggcaaccccttcctgacggtcaatgacaacctgaaagtctcctttctcctgcccacgctccgtaaggtcaatggcaaggatgcgtcctcaacttactctcaggtggagaacctgaatcgggagctgaccagcagggtcacagctcactgggagaagttcatggccacactgggtcctgaagaggaggctgagaaggcccaggcggactttgtgaagtcggctgtcagggatgtccgctacgggcccgagtccctcagcgagttcacccagtggcgggtgcggatgatctctgaggagctggtggccgccagtaggacccaggtgcaaaaggctaacagcccagagaagcccccagaagctggagctgcccacaagcccagggccagactggcggccttgaaacggccagacgacgtcccactcagcctctctcccagcaagcgggcgtgtgcctccccgtcggcccaggtggagggcagccctgtggcaggctccgatggcagccagctntgtgagttggagccctgcactcctgcagtgcaaaagcagacaaaggcccagactcgaaacagtgggctggctcgaccggctggagggggcatccagacggcactcgcgggagtgtgcgaagtgcccagctcgtcactcagccggaggttcggcgacatgagggacgggcaaacgatgggggaggcgcactactgagtgagcacaaagaacgcaatcaatggcgaaccccctccgggggcggc

SEQ ID NO: 278774 - DNA, 2753 bp, Homo sapiens
agcgggcttccttccggtcgttaacgcccacgggctcgcgcggcgccgcctcctgggctcagttaccgcggacgccagtgccgggctccaggagacgcagggcgacgccacacgccggggtggccgactgggtcagcgcgggctgcgcctcctcgccatgggccccctctcggcgcggctgctaatgcagcgcgggcgccccaagagcgaccggctggggaagatccggagtctggacctgtcaggattggagctgctttccgagcacctggaccccaaactcctgtgccgcctgacgcagctgcaggagcttgacctgtctaacaaccacctggagacgctgccggacaacctgggcctgtcccacctgcgtgtcctccgctgcgccaacaaccagctgggggatgttactgccttgtgccagttccccaagctcgaggaactcagcctggagggcaaccccttcctgacggtcaatgacaacctgaaagtctcctttctcctgcccacgctccgtaaggtcaatggcaaggatgcgtcctcaacttactctcaggtggagaacctgaatcgggagctgaccagcagggtcacagctcactgggagaagttcatggccacactgggtcctgaagaggaggctgagaaggcccaggcggactttgtgaagtcggctgtcagggatgtccgctacgggcccgagtccctcagcgagttcacccagtggcgggtgcggatgatctctgaggagctggtggccgccagtaggacccaggtgcaaaaggctaacagcccagagaagcccccagaagctggagctgcccacaagcccagggccagactggcggccttgaaacggccagacgacgtcccactcagcctctctcccagcaagcgggcgtgtgcctccccgtcggcccaggtggagggcagccctgtggcaggctccgatggcagccagcctgctgtgaagctggagcccctgcacttcctgcagtgccacagcaagaacaacagcccccaggacctcgagacccagctgtgggcctgtgccttcgagccggcctgggaggagggggccacatcccagaccgtggccacgtgcggcggggaggctgtgtgcgtaattgattgccagacgggcatcgtgctccacaagtacaaggcacccggcgaggagttcttttctgtggcctggaccgctctgatggtggtcacacaggctggccacaagaagcgctggagtgtgctggcggctgcaggcctacggggcctggtccggctgctgcacgtgcgtgccggcttctgctgcggggtcatccgagcccacaagaaggccatcgccaccctgtgcttcagccccgcccacgagacccatctcttcacggcctcctatgacaagcggatcatcctctgggacatcggggtgcccaaccaggactacgaattccaggccagccagctgctcacactggacaccacctctatccccctgcgcctctgccctgtcgcctcctgcccggacgcccgcctgctggccggctgcgagggcggctgctgctgctgggacgtgcggctggaccagccccaaaagaggagggtgtgtgaagtggaattcgtcttctctgagggctccgaggcatctggacggagagtggatgggctggcatttgtgaatgaggacatcgtggcctccaaggggagcggcctgggcaccatctgcctgtggagctggaggcagacgtgggggggccggggcagccagtccacagtggcagtggtggtcctggcgcggctgcaatggtcgtccaccgagttggcctacttctcgctcagcgcctgccctgataaggggattgtgctctgtggggatgaggagggcaacgtgtggctctacgacgtcagcaacatcctgaagcagccacccctgctgccggcagccctgcaggcccccacacagatcctgaagtggccccagccctgggcccttggccaggtggtgaccaagaccatggtgaacacagtggtggccaatgcctccttcacctacctcaccgccctgacggactccaacatcgtagccatctgggggaggatgtagcctcacaccatcgcaaaggaccagggacacagctaactaacttattcagctttgggccgatgggggtgggggggggtctttcagtgaatatttttattaaactctactgtggacaagaaaaacacacagccagaaaccccgagaactacacaccaaccaaccggcggggcgcctccacaaatacccccgagcggggccagatatgacccccccccgaccttcccttctcacagaggtggccacataagggcagcacgcacataacacacgtcgcacacagcccccgccagctcacaccacaggtgcgggacggggaaacaccgaagagacggcggaaacttggacggaggagacccacagcgagggggggccacctaggtggcaaacgccaccacagacaagtaagcgcggcggggaacatacaccttcaccgtcgtcaggtggatgaccagaccgcatggcgcgcggtgagcatgcgcaacggcattgtcttcgacaattcacgcccgcagacaaggcggcacagcagacgacgcaccaccacgaaaccgcgcacgacacaccgcaagcgggcagcggacacgaccgagcgcgagcgaacccacgccatcaggcgtcagcaacgtcgctcacacgagccgcaacgctgcac

SEQ ID NO: 278775 - DNA, 2274 bp, Homo sapiens
agcgggcttccttccggtcgttaacgcccacgggctcgcgcggcgccgcctcctgggctcagttaccgcggacgccagtgccgggctccaggagacgcagggcgacgccacacgccggggtggccgactgggtcagcgcgggctgcgcctcctcgccatgggccccctctcggcgcggctgctaatgcagcgcgggcgccccaagagcgaccggctggggaagatccggagtctggacctgtcaggattggagctgctttccgagcacctggaccccaaactcctgtgccgcctgacgcagctgcaggagcttgacctgtctaacaaccacctggagacgctgccggacaacctgggcctgtcccacctgcgtgtcctccgctgcgccaacaaccagctgggggatgttactgccttgtgccagttccccaagctcgaggaactcagcctggagggcaaccccttcctgacggtcaatgacaacctgaaagtctcctttctcctgcccacgctccgtaaggtcaatggcaaggatgcgtcctcaacttactctcaggtggagaacctgaatcgggagctgaccagcagggtcacagctcactgggagaagttcatggccacactgggtcctgaagaggaggctgagaaggcccaggcggactttgtgaagtcggctgtcagggatgtccgctacgggcccgagtccctcagcgagttcacccagtggcgggtgcggatgatctctgaggagctggtggccgccagtaggacccaggtgcaaaaggctaacagcccagagaagcccccagaagctggagctgcccacaagcccagggccagactggcggccttgaaacggccagacgacgtcccactcagcctctctcccagcaagcgggcgtgtgcctccccgtcggcccaggtggagggcagccctgtggcaggctccgatggcagccagcctgctgtgaagctggagcccctgcacttcctgcagtgccacagcaagaacaacagcccccaggacctcgagacccagctgtgggcctgtgccttcgagccggcctgggaggagggggccacatcccagaccgtggccacgtgcggcggggaggctgtgtgcgtaattgattgccagacgggcatcgtgctccacaagtacaaggcacccggcgaggagttcttttctgtggcctggaccgctctgatggtggtcacacaggctggccacaagaagcgctggagtgtgctggcggctgcaggcctacggggcctggtccggctgctgcacgtgcgtgccggcttctgctgcggggtcatccgagcccacaagaaggccatcgccaccctgtgcttcagccccgcccacgagacccatctcttcacggcctcctatgacaagcggatcatcctctgggacatcggggtgcccaaccaggactacgaattccaggccagccagctgctcacactggacaccacctctatccccctgcgcctctgccctgtcgcctcctgcccggacgcccgcctgctggccggctgcgagggcggctgctgctgctgggacgtgcggctggaccagccccaaaagaggagggtgtgtgaagtggaattcgtcttctctgagggctccgaggcatctggacggagagtggatgggctggcatttgtgaatgaggacatcgtggcctccaaggggagcggcctgggcaccatctgcctgtggagctggaggcagacgtgggggggccggggcagccagtccacagtggcagtggtggtcctggcgcggctgcaatggtcgtccaccgagttggcctacttctcgctcagcgcctgccctgataaggggattgtgctctgtggggatgaggagggcaacgtgtggctctacgacgtcagcaacatcctgaagcagccacccctgctgccggcagccctgcaggcccccacacagatcctgaagtggccccagccctgggcccttggccaggtggtgaccaagaccatggtgaacacagtggtggccaatgcctccttcacctacctcaccgccctgacggactccaacatcgtagccatctgggggaggatgtagcctcacaccatcgcaaaggaccagggacacagctaactaacttattcagctttgggccgatgggggtgggggggggtctttcagtgaatatttttattaaactctactgtggacaagaaaacagaaacatgacaacacaaagaaataccaaaaagatggaatcataacacacg

SEQ ID NO: 278776 - DNA, 2296 bp, Homo sapiens
agcgggcttccttccggtcgttaacgcccacgggctcgcgcggcgccgcctcctgggctcagttaccgcggacgccagtgccgggctccaggagacgcagggcgacgccacacgccggggtggccgactgggtcagcgcgggctgcgcctcctcgccatgggccccctctcggcgcggctgctaatgcagcgcgggcgccccaagagcgaccggctggggaagatccggagtctggacctgtcaggattggagctgctttccgagcacctggaccccaaactcctgtgccgcctgacgcagctgcaggagcttgacctgtctaacaaccacctggagacgctgccggacaacctgggcctgtcccacctgcgtgtcctccgctgcgccaacaaccagctgggggatgttactgccttgtgccagttccccaagctcgaggaactcagcctggagggcaaccccttcctgacggtcaatgacaacctgaaagtctcctttctcctgcccacgctccgtaaggtcaatggcaaggatgcgtcctcaacttactctcaggtggagaacctgaatcgggagctgaccagcagggtcacagctcactgggagaagttcatggccacactgggtcctgaagaggaggctgagaaggcccaggcggactttgtgaagtcggctgtcagggatgtccgctacgggcccgagtccctcagcgagttcacccagtggcgggtgcggatgatctctgaggagctggtggccgccagtaggacccaggtgcaaaaggctaacagcccagagaagcccccagaagctggagctgcccacaagcccagggccagactggcggccttgaaacggccagacgacgtcccactcagcctctctcccagcaagcgggcgtgtgcctccccgtcggcccaggtggagggcagccctgtggcaggctccgatggcagccagcctgctgtgaagctggagcccctgcacttcctgcagtgccacagcaagaacaacagcccccaggacctcgagacccagctgtgggcctgtgccttcgagccggcctgggaggagggggccacatcccagaccgtggccacgtgcggcggggaggctgtgtgcgtaattgattgccagacgggcatcgtgctccacaagtacaaggcacccggcgaggagttcttttctgtggcctggaccgctctgatggtggtcacacaggctggccacaagaagcgctggagtgtgctggcggctgcaggcctacggggcctggtccggctgctgcacgtgcgtgccggcttctgctgcggggtcatccgagcccacaagaaggccatcgccaccctgtgcttcagccccgcccacgagacccatctcttcacggcctcctatgacaagcggatcatcctctgggacatcggggtgcccaaccaggactacgaattccaggccagccagctgctcacactggacaccacctctatccccctgcgcctctgccctgtcgcctcctgcccggacgcccgcctgctggccggctgcgagggcggctgctgctgctgggacgtgcggctggaccagccccaaaagaggagggtgtgtgaagtggaattcgtcttctctgagggctccgaggcatctggacggagagtggatgggctggcatttgtgaatgaggacatcgtggcctccaaggggagcggcctgggcaccatctgcctgtggagctggaggcagacgtgggggggccggggcagccagtccacagtggcagtggtggtcctggcgcggctgcaatggtcgtccaccgagttggcctacttctcgctcagcgcctgccctgataaggggattgtgctctgtggggatgaggagggcaacgtgtggctctacgacgtcagcaacatcctgaagcagccacccctgctgccggcagccctgcaggcccccacacagccctcccctctctccccaccagatcctgaagtggccccagccctgggcccttggccaggtggtgaccaagaccatggtgaacacagtggtggccaatgcctccttcacctacctcaccgccctgacggactccaacatcgtagccatctgggggaggatgtagcctcacaccatcgcaaaggaccagggacacagctaactaacttattcagctttgggccgatgggggtgggggggggtctttcagtgaatatttttattaaactctactgtggacaagaaaacagaaacatgacaacacaaagaaataccaaaaagatggaatcataacacacg

SEQ ID NO: 278777 - DNA, 1934 bp, Homo sapiens
agcgggcttccttccggtcgttaacgcccacgggctcgcgcggcgccgcctcctgggctcagttaccgcggacgccagtgccgggctccaggagacgcagggcgacgccacacgccggggtggccgactgggtcagcgcgggctgcgcctcctcgccatgggccccctctcggcgcggctgctaatgcagcgcgggcgccccaagagcgaccggctggggaagatccggagtctggacctgtcaggattggagctgctttccgagcacctggaccccaaactcctgtgccgcctgacgcagctgcaggagcttgacctgtctaacaaccacctggagacgctgccggacaacctgggcctgtcccacctgcgtgtcctccgctgcgccaacaaccagctgggggatgttactgccttgtgccagttccccaagctcgaggaactcagcctggagggcaaccccttcctgacggtcaatgacaacctgaaagtctcctttctcctgcccacgctccgtaaggtcaatggcaaggatgcgtcctcaacttactctcaggtggagaacctgaatcgggagctgaccagcagggtcacagctcactgggagaagttcatggccacactgggtcctgaagaggaggctgagaaggcccaggcggactttgtgaagtcggctgtcagggatgtccgctacgggcccgagtccctcagcgagttcacccagtggcgggtgcggatgatctctgaggagctggtggccgccagtaggacccaggtgcaaaaggctaacagcccagagaagcccccagaagctggagctgcccacaagcccagggccagactggcggccttgaaacggccagacgacgtcccactcagcctctctcccagcaagcgggcgtgtgcctccccgtcggcccaggtggagggcagccctgtggcaggctccgatggcagccagcctgctgtgaagctggagcccctgcacttcctgcagtgccacagcaagaacaacagcccccaggacctcgagacccagctgtgggcctgtgccttcgagccggcctgggaggagggggccacatcccagaccgtggccacgtgcggcggggaggctgtgtgcgtaattgattgccagacgggcatcgtgctccacaagtacaaggcacccggcgaggagttcttttctgtggcctggaccgctctgatggtggtcacacaggctggccacaagaagcgctggagtgtgctggcggctgcaggcctacggggcctggtccggctgctgcacgtgcgtgccggcttctgctgcggggtcatccgagcccacaagaaggccatcgccaccctgtgcttcagccccgcccacgagacccatctcttcacggcctcctatgacaagcggatcatcctctgggacatcggggtgcccaaccaggactacgaattccaggccagccagctgctcacactggacaccacctctatccccctgcgcctctgccctgtcgcctcctgcccggacgcccgcctgctggccggctgcgagggcggctgctgctgctgggacgtgcggctggaccagccccaaaagaggagctggacggagagtggatgggctggcatttgtgaatgaggacatcgtggcctccaaggggagcggcctgggcaccatctgcctgtggagctggaggcagacgtgggggggccggggcagccagtccacagtggcagtggtggtcctggcgcggctgcaatggtcgtccaccgagttggcctacttctcgctcagcgcctgccctgataaggggattgtgctctgtggggatgaggagggcaacgtgtggctctacgacgtcagcaacatcctgaagcagccacccctgctgccggcagccctgcaggcccccacacaggtactgcccggctcaccc

SEQ ID NO: 278778 - DNA, 2161 bp, Homo sapiens
tgcaggctggtactgccccgggttatgggatggagacgcagggcgacgccacacgccggggtggccgactgggtcagcgcgggctgcgcctcctcgccatgggccccctctcggcgcggctgctaatgcagcgcgggcgccccaagagcgaccggctggggaagatccggagtctggacctgtcaggattggagctgctttccgagcacctggaccccaaactcctgtgccgcctgacgcagctgcaggagcttgacctgtctaacaaccacctggagacgctgccggacaacctgggcctgtcccacctgcgtgtcctccgctgcgccaacaaccagctgggggatgttactgccttgtgccagttccccaagctcgaggaactcagcctggagggcaaccccttcctgacggtcaatgacaacctgaaagtctcctttctcctgcccacgctccgtaaggtcaatggcaaggatgcgtcctcaacttactctcaggtggagaacctgaatcgggagctgaccagcagggtcacagctcactgggagaagttcatggccacactgggtcctgaagaggaggctgagaaggcccaggcggactttgtgaagtcggctgtcagggatgtccgctacgggcccgagtccctcagcgagttcacccagtggcgggtgcggatgatctctgaggagctggtggccgccagtaggacccaggtgcaaaaggctaacagcccagagaagcccccagaagctggagctgcccacaagcccagggccagactggcggccttgaaacggccagacgacgtcccactcagcctctctcccagcaagcgggcgtgtgcctccccgtcggcccaggtggagggcagccctgtggcaggctccgatggcagccagcctgctgtgaagctggagcccctgcacttcctgcagtgccacagcaagaacaacagcccccaggacctcgagacccagctgtgggcctgtgccttcgagccggcctgggaggagggggccacatcccagaccgtggccacgtgcggcggggaggctgtgtgcgtaattgattgccagacgggcatcgtgctccacaagtacaaggcacccggcgaggagttcttttctgtggcctggaccgctctgatggtggtcacacaggctggccacaagaagcgctggagtgtgctggcggctgcaggcctacggggcctggtccggctgctgcacgtgcgtgccggcttctgctgcggggtcatccgagcccacaagaaggccatcgccaccctgtgcttcagccccgcccacgagacccatctcttcacggcctcctatgacaagcggatcatcctctgggacatcggggtgcccaaccaggactacgaattccaggccagccagctgctcacactggacaccacctctatccccctgcgcctctgccctgtcgcctcctgcccggacgcccgcctgctggccggctgcgagggcggctgctgctgctgggacgtgcggctggaccagccccaaaagaggagggtgtgtgaagtggaattcgtcttctctgagggctccgaggcatctggacggagagtggatgggctggcatttgtgaatgaggacatcgtggcctccaaggggagcggcctgggcaccatctgcctgtggagctggaggcagacgtgggggggccggggcagccagtccacagtggcagtggtggtcctggcgcggctgcaatggtcgtccaccgagttggcctacttctcgctcagcgcctgccctgataaggggattgtgctctgtggggatgaggagggcaacgtgtggctctacgacgtcagcaacatcctgaagcagccacccctgctgccggcagccctgcaggcccccacacagatcctgaagtggccccagccctgggcccttggccaggtggtgaccaagaccatggtgaacacagtggtggccaatgcctccttcacctacctcaccgccctgacggactccaacatcgtagccatctgggggaggatgtagcctcacaccatcgcaaaggaccagggacacagctaactaacttattcagctttgggccgatgggggtgggggggggtctttcagtgaatatttttattaaactctactgtggacaagaa

SEQ ID NO: 278779 - DNA, 1206 bp, Homo sapiens
  misc_feature (964)..(964): n is a, c, g, or t
agcgggcttccttccggtcgttaacgcccacgggctcgcgcggcgccgcctcctgggctcagttaccgcggacgccagtgccgggctccaggagacgcagggcgacgccacacgccggggtggccgactgggtcagcgcgggctgcgcctcctcgccatgggccccctctcggcgcggctgctaatgcagcgcgggcgccccaagagcgaccggctggggaagatccggagtctggacctgtcaggattggagctgctttccgagcacctggaccccaaactcctgtgccgcctgacgcagctgcaggagcttgacctgtctaacaaccacctggagacgctgccggacaacctgggcctgtcccacctgcgtgtcctccgctgcgccaacaaccagctgggggatgttactgccttgtgccagttccccaagctcgaggaactcagcctggagggcaaccccttcctgacggtcaatgacaacctgaaagtctcctttctcctgcccacgctccgtaaggtcaatggcaaggatgcgtcctcaacttactctcaggtggagaacctgaatcgggagctgaccagcagggtcacagctcactgggagaagttcatggccacactgggtcctgaagaggaggctgagaaggcccaggcggactttgtgaagtcggctgtcagggatgtccgctacgggcccgagtccctcagcgagttcacccagtggcgggtgcggatgatctctgaggagctggtggccgccagtaggacccaggtgcaaaaggctaacagcccagagaagcccccagaagctggagctgcccacaagcccagggccagactggcggccttgaaacggccagacgacgtcccactcagcctctctcccagcaagcgggcgtgtgcctccccgtcggcccaggtggagggcagccctgtggcaggctccgatggcagccagctntgtgagttggagccctgcactcctgcagtgcaaaagcagacaaaggcccagactcgaaacagtgggctggctcgaccggctggagggggcatccagacggcactcgcgggagtgtgcgaagtgcccagctcgtcactcagccggaggttcggcgacatgagggacgggcaaacgatgggggaggcgcactactgagtgagcacaaagaacgcaatcaatggcgaaccccctccgggggcggc

SEQ ID NO: 278780 - DNA, 2238 bp, Homo sapiens
agcgggcttccttccggtcgttaacgcccacgggctcgcgcggcgccgcctcctgggctcagttaccgcggacgccagtgccgggctccaggagacgcagggcgacgccacacgccggggtggccgactgggtcagcgcgggctgcgcctcctcgccatgggccccctctcggcgcggctgctaatgcagcgcgggcgccccaagagcgaccggctggggaagatccggagtctggagtaagagccgggcagcggcctgtcaggattggagctgctttccgagcacctggaccccaaactcctgtgccgcctgacgcagctgcaggagcttgacctgtctaacaaccacctggagacgctgccggacaacctgggcctgtcccacctgcgtgtcctccgctgcgccaacaaccagctgggggatgttactgccttgtgccagttccccaagctcgaggaactcagcctggagggcaaccccttcctgacggtcaatgacaacctgaaagtctcctttctcctgcccacgctccgtaaggtcaatggcaaggatgcgtcctcaacttactctcaggtggagaacctgaatcgggagctgaccagcagggtcacagctcactgggagaagttcatggccacactgggtcctgaagaggaggctgagaaggcccaggcggactttgtgaagtcggctgtcagggatgtccgctacgggcccgagtccctcagcgagttcacccagtggcgggtgcggatgatctctgaggagctggtggccgccagtaggacccaggtgcaaaaggctaacagcccagagaagcccccagaagctggagctgcccacaagcccagggccagactggcggccttgaaacggccagacgacgtcccactcagcctctctcccagcaagcgggcgtgtgcctccccgtcggcccaggtggagggcagccctgtggcaggctccgatggcagccagcctgctgtgaagctggagcccctgcacttcctgcagtgccacagcaagaacaacagcccccaggacctcgagacccagctgtgggcctgtgccttcgagccggcctgggaggagggggccacatcccagaccgtggccacgtgcggcggggaggctgtgtgcgtaattgattgccagacgggcatcgtgctccacaagtacaaggcacccggcgaggagttcttttctgtggcctggaccgctctgatggtggtcacacaggctggccacaagaagcgctggagtgtgctggcggctgcaggcctacggggcctggtccggctgctgcacgtgcgtgccggcttctgctgcggggtcatccgagcccacaagaaggccatcgccaccctgtgcttcagccccgcccacgagacccatctcttcacggcctcctatgacaagcggatcatcctctgggacatcggggtgcccaaccaggactacgaattccaggccagccagctgctcacactggacaccacctctatccccctgcgcctctgccctgtcgcctcctgcccggacgcccgcctgctggccggctgcgagggcggctgctgctgctgggacgtgcggctggaccagccccaaaagaggagggtgtgtgaagtggaattcgtcttctctgagggctccgaggcatctggacggagagtggatgggctggcatttgtgaatgaggacatcgtggcctccaaggggagcggcctgggcaccatctgcctgtggagctggaggcagacgtgggggggccggggcagccagtccacagtggcagtggtggtcctggcgcggctgcaatggtcgtccaccgagttggcctacttctcgctcagcgcctgccctgataaggggattgtgctctgtggggatgaggagggcaacgtgtggctctacgacgtcagcaacatcctgaagcagccacccctgctgccggcagccctgcaggcccccacacagatcctgaagtggccccagccctgggcccttggccaggtggtgaccaagaccatggtgaacacagtggtggccaatgcctccttcacctacctcaccgccctgacggactccaacatcgtagccatctgggggaggatgtagcctcacaccatcgcaaaggaccagggacacagctaactaacttattcagctttgggccgatgggggtgggggggggtctttcagtgaatatttttattaaactctactgtggacaagaa

SEQ ID NO: 278781 - DNA, 2029 bp, Homo sapiens
ggctggtacgcgtcggaagttagggatggaagatccggagtctggacctgtcaggattggagctgctttccgagcacctggaccccaaactcctgtgccgcctgacgcagctgcaggagcttgacctgtctaacaaccacctggagacgctgccggacaacctgggcctgtcccacctgcgtgtcctccgctgcgccaacaaccagctgggggatgttactgccttgtgccagttccccaagctcgaggaactcagcctggagggcaaccccttcctgacggtcaatgacaacctgaaagtctcctttctcctgcccacgctccgtaaggtcaatggcaaggatgcgtcctcaacttactctcaggtggagaacctgaatcgggagctgaccagcagggtcacagctcactgggagaagttcatggccacactgggtcctgaagaggaggctgagaaggcccaggcggactttgtgaagtcggctgtcagggatgtccgctacgggcccgagtccctcagcgagttcacccagtggcgggtgcggatgatctctgaggagctggtggccgccagtaggacccaggtgcaaaaggctaacagcccagagaagcccccagaagctggagctgcccacaagcccagggccagactggcggccttgaaacggccagacgacgtcccactcagcctctctcccagcaagcgggcgtgtgcctccccgtcggcccaggtggagggcagccctgtggcaggctccgatggcagccagcctgctgtgaagctggagcccctgcacttcctgcagtgccacagcaagaacaacagcccccaggacctcgagacccagctgtgggcctgtgccttcgagccggcctgggaggagggggccacatcccagaccgtggccacgtgcggcggggaggctgtgtgcgtaattgattgccagacgggcatcgtgctccacaagtacaaggcacccggcgaggagttcttttctgtggcctggaccgctctgatggtggtcacacaggctggccacaagaagcgctggagtgtgctggcggctgcaggcctacggggcctggtccggctgctgcacgtgcgtgccggcttctgctgcggggtcatccgagcccacaagaaggccatcgccaccctgtgcttcagccccgcccacgagacccatctcttcacggcctcctatgacaagcggatcatcctctgggacatcggggtgcccaaccaggactacgaattccaggccagccagctgctcacactggacaccacctctatccccctgcgcctctgccctgtcgcctcctgcccggacgcccgcctgctggccggctgcgagggcggctgctgctgctgggacgtgcggctggaccagccccaaaagaggagggtgtgtgaagtggaattcgtcttctctgagggctccgaggcatctggacggagagtggatgggctggcatttgtgaatgaggacatcgtggcctccaaggggagcggcctgggcaccatctgcctgtggagctggaggcagacgtgggggggccggggcagccagtccacagtggcagtggtggtcctggcgcggctgcaatggtcgtccaccgagttggcctacttctcgctcagcgcctgccctgataaggggattgtgctctgtggggatgaggagggcaacgtgtggctctacgacgtcagcaacatcctgaagcagccacccctgctgccggcagccctgcaggcccccacacagatcctgaagtggccccagccctgggcccttggccaggtggtgaccaagaccatggtgaacacagtggtggccaatgcctccttcacctacctcaccgccctgacggactccaacatcgtagccatctgggggaggatgtagcctcacaccatcgcaaaggaccagggacacagctaactaacttattcagctttgggccgatgggggtgggggggggtctttcagtgaatatttttattaaactctactgtggacaagaa

SEQ ID NO: 278782 - DNA, 2316 bp, Homo sapiens
agcgggcttccttccggtcgttaacgcccacgggctcgcgcggcgccgcctcctgggctcagttaccgcggacgccagtgccgggctccaggagacgcagggcgacgccacacgccggggtggccgactgggtcagcgcgggctgcgcctcctcgccatgggccccctctcggcgcggctgctaatgcagcgcgggcgccccaagagcgaccggctggggaagatccggagtctggatggtgtggagtcgggagtagtggcgcgcgcttctagtcccagctactcgagaggctgaggcgggaggatccctcagcccaggagttggaggcagctcctgtcaggattggagctgctttccgagcacctggaccccaaactcctgtgccgcctgacgcagctgcaggagcttgacctgtctaacaaccacctggagacgctgccggacaacctgggcctgtcccacctgcgtgtcctccgctgcgccaacaaccagctgggggatgttactgccttgtgccagttccccaagctcgaggaactcagcctggagggcaaccccttcctgacggtcaatgacaacctgaaagtctcctttctcctgcccacgctccgtaaggtcaatggcaaggatgcgtcctcaacttactctcaggtggagaacctgaatcgggagctgaccagcagggtcacagctcactgggagaagttcatggccacactgggtcctgaagaggaggctgagaaggcccaggcggactttgtgaagtcggctgtcagggatgtccgctacgggcccgagtccctcagcgagttcacccagtggcgggtgcggatgatctctgaggagctggtggccgccagtaggacccaggtgcaaaaggctaacagcccagagaagcccccagaagctggagctgcccacaagcccagggccagactggcggccttgaaacggccagacgacgtcccactcagcctctctcccagcaagcgggcgtgtgcctccccgtcggcccaggtggagggcagccctgtggcaggctccgatggcagccagcctgctgtgaagctggagcccctgcacttcctgcagtgccacagcaagaacaacagcccccaggacctcgagacccagctgtgggcctgtgccttcgagccggcctgggaggagggggccacatcccagaccgtggccacgtgcggcggggaggctgtgtgcgtaattgattgccagacgggcatcgtgctccacaagtacaaggcacccggcgaggagttcttttctgtggcctggaccgctctgatggtggtcacacaggctggccacaagaagcgctggagtgtgctggcggctgcaggcctacggggcctggtccggctgctgcacgtgcgtgccggcttctgctgcggggtcatccgagcccacaagaaggccatcgccaccctgtgcttcagccccgcccacgagacccatctcttcacggcctcctatgacaagcggatcatcctctgggacatcggggtgcccaaccaggactacgaattccaggccagccagctgctcacactggacaccacctctatccccctgcgcctctgccctgtcgcctcctgcccggacgcccgcctgctggccggctgcgagggcggctgctgctgctgggacgtgcggctggaccagccccaaaagaggagggtgtgtgaagtggaattcgtcttctctgagggctccgaggcatctggacggagagtggatgggctggcatttgtgaatgaggacatcgtggcctccaaggggagcggcctgggcaccatctgcctgtggagctggaggcagacgtgggggggccggggcagccagtccacagtggcagtggtggtcctggcgcggctgcaatggtcgtccaccgagttggcctacttctcgctcagcgcctgccctgataaggggattgtgctctgtggggatgaggagggcaacgtgtggctctacgacgtcagcaacatcctgaagcagccacccctgctgccggcagccctgcaggcccccacacagatcctgaagtggccccagccctgggcccttggccaggtggtgaccaagaccatggtgaacacagtggtggccaatgcctccttcacctacctcaccgccctgacggactccaacatcgtagccatctgggggaggatgtagcctcacaccatcgcaaaggaccagggacacagctaactaacttattcagctttgggccgatgggggtgggggggggtctttcagtgaatatttttattaaactctactgtggacaagaa

SEQ ID NO: 278783 - DNA, 2097 bp, Homo sapiens
agcgggcttccttccggtcgttaacgcccacgggctcgcgcggcgccgcctcctgggctcagttaccgcggacgccagtgccgggctccaggagacgcagggcgacgccacacgccggggtggccgactgggtcagcgcgggctgcgcctcctcgccatgggccccctctcggcgcggctgctaatgcagcgcgggcgccccaagagcgaccggctggggaagatccggagtctggacctgtcaggattggagctgctttccgagcacctggaccccaaactcctgtgccgcctgacgcagctgcaggagcttgacctgtctaacaaccacctggagacgctgccggacaacctgggcctgtcccacctgcgtgtcctccgctgcgccaacaaccagctgggggatgttactgccttgtgccagttccccaagctcgaggaactcagcctggagggcaaccccttcctgacggtcaatgacaacctgaaagtctcctttctcctgcccacgctccgtaaggtcaatggcaaggatgcgtcctcaacttactctcaggtggagaacctgaatcgggagctgaccagcagggtcacagctcactgggaggtgcggatgatctctgaggagctggtggccgccagtaggacccaggtgcaaaaggctaacagcccagagaagcccccagaagctggagctgcccacaagcccagggccagactggcggccttgaaacggccagacgacgtcccactcagcctctctcccagcaagcgggcgtgtgcctccccgtcggcccaggtggagggcagccctgtggcaggctccgatggcagccagcctgctgtgaagctggagcccctgcacttcctgcagtgccacagcaagaacaacagcccccaggacctcgagacccagctgtgggcctgtgccttcgagccggcctgggaggagggggccacatcccagaccgtggccacgtgcggcggggaggctgtgtgcgtaattgattgccagacgggcatcgtgctccacaagtacaaggcacccggcgaggagttcttttctgtggcctggaccgctctgatggtggtcacacaggctggccacaagaagcgctggagtgtgctggcggctgcaggcctacggggcctggtccggctgctgcacgtgcgtgccggcttctgctgcggggtcatccgagcccacaagaaggccatcgccaccctgtgcttcagccccgcccacgagacccatctcttcacggcctcctatgacaagcggatcatcctctgggacatcggggtgcccaaccaggactacgaattccaggccagccagctgctcacactggacaccacctctatccccctgcgcctctgccctgtcgcctcctgcccggacgcccgcctgctggccggctgcgagggcggctgctgctgctgggacgtgcggctggaccagccccaaaagaggagggtgtgtgaagtggaattcgtcttctctgagggctccgaggcatctggacggagagtggatgggctggcatttgtgaatgaggacatcgtggcctccaaggggagcggcctgggcaccatctgcctgtggagctggaggcagacgtgggggggccggggcagccagtccacagtggcagtggtggtcctggcgcggctgcaatggtcgtccaccgagttggcctacttctcgctcagcgcctgccctgataaggggattgtgctctgtggggatgaggagggcaacgtgtggctctacgacgtcagcaacatcctgaagcagccacccctgctgccggcagccctgcaggcccccacacagatcctgaagtggccccagccctgggcccttggccaggtggtgaccaagaccatggtgaacacagtggtggccaatgcctccttcacctacctcaccgccctgacggactccaacatcgtagccatctgggggaggatgtagcctcacaccatcgcaaaggaccagggacacagctaactaacttattcagctttgggccgatgggggtgggggggggtctttcagtgaatatttttattaaactctactgtggacaagaa

SEQ ID NO: 278784 - DNA, 544 bp, Homo sapiens
aaaagggcccgtggagctggaggcagacgtgggggggcaccatctgcctgtggagctggaggcagacgtgggggggccggggcagccagtccacagtggcagtggtggtcctggcgcggctgcaatggtcgtccaccgagttggcctacttctcgctcagcgcctgccctgataaggggattgtgctctgtggggatgaggagggcaacgtgtggctctacgacgtcagcaacatcctgaagcagccacccctgctgccggcagccctgcaggcccccacacagatcctgaagtggccccagccctgggcccttggccaggtggtgaccaagaccatggtgaacacagtggtggccaatgcctccttcacctacctcaccgccctgacggactccaacatcgtagccatctgggggaggatgtagcctcacaccatcgcaaaggaccagggacacagctaactaacttattcagctttgggccgatgggggtgggggggggtctttcagtgaatatttttattaaactctactgtggacaagaa

SEQ ID NO: 278785 - DNA, 237 bp, Homo sapiens
gtacatggtggcgggcaggcggggcaagggccgctggaaatagggccgcctggatgggtgggggatcaggagacagagcttaaaaggcgccatcaaggctgggaggaggaggctgcagggaggacctagatgggaaatgtctctgctcatccgacctctcaaaaccgggcactcaggggccacatcccagaccgtggccacgtgcggcggggaggctgtgtgcgtaattgattgcca

SEQ ID NO: 278786 - DNA, 910 bp, Homo sapiens
cacttagcgatttagcgtgaataataagaaagcatgttcgacatatgagaattccagaatctggagaaactcaacatcaagacaatctggctagtctacacagtagaacaatcaaagtaagagttgtaaagaataaaggaaaaacggagcattctaatggaatccatatgcctacattccgccatcaccatgatgatcaagcctacaggagtagcttcaaatagattccagctgtggttatattgtaaatgaagcatctaacatgtgcacaacttgcaacaaaaactccttggactttaaatctgtctttctcagtttccatgtgctgattgatctgactgatcacacaggcacccttcattcctgtagtctcacaggaagtgttgctgaggagactttgggctggtacatgagtttcttgcaatgacagatgaacagaaaacagcattaaagtggcaatttctcttggaaagaagcaaaatttatttaaaattcgttctatcacacagagcaaggagtggattgaaaattagtgtactctcgtgcaagcttgcagatcctactgaggcaagcagaaacttgtctggacaaaaacatgtttaaaacggtctatcattttgaactctggaaaagtataagagttttaactccctttaaaatggaatattaatttgaaaattatggggaaaattgcattttgtttacatgtggtgaacatgtttctagaaattgttatggtggaggtggtctgggtgagtctgaaggcctctctcatctgacctcccttcttagaaggcctcctactgtctttgccttgtctcctcccaagttggaaaatgtttacatgaattaataaacaggatgcggccgattcctctctttataaacttatatatacacccacaaataa

SEQ ID NO: 278787 - DNA, 422 bp, Homo sapiens
cttttgtctctttttctgtttctcctcgcagttcgttctatcacacagagcaaggagtggattgaaaattagtgtactctcgtgcaagcttgcagatcctactgaggcaagcagaaacttgtctggacaaaaacatgtttaaaacggtctatcattttgaactctggaaaagtataagagttttaactccctttaaaatggaatattaatttgaaaattatggggaaaattgcattttgtttacatgtggtgaacatgtttctagaaattgttatggtggaggtggtctgggtgagtctgaaggcctctctcatctgacctcccttcttagaaggcctcctactgtctttgccttgtctcctcccaagttggaaaatgtttacatgaattaataaacagatttaatcttctaaaaaaaaaaa

SEQ ID NO: 278788 - DNA, 3557 bp, Homo sapiens
agcgggcggggccgtcgcacctgcacgaggctgtggcccgagcgtcctgtggagaagccgcgaagcgcgggcgacccgggggtcgggcgggccaggtccgcgaggccgcggcggcagctgtgcaggcccggggagcagccggccgggcgagcctcggatattggatcagaaaggtacactttcagcttcaccattcgggattcaccagcacattttgtaaatgcagcttcctggggcaatgaagattacatcaagtctctttctgacagctttagggttggtgactgtgtgataattgaaaatcctctgatccaaagaaaggaaatagaaagagaagaaaaattcagccctgcaactcctagcaactgtaaactgttgctcagtgagaatcactcaacagtaaaagtttgttccagttatgaagtggacacaaagttactttctttgatacatttacctgttaaagagtctcatgattattattcactgggtgacattgttgcaaatggacacagtcttaatgggaggattattaacgtgcttgcagctgtgaaatcggttggagagccaaaatactttacaacttcagaccggagaaaaggccagaggtgtgaagttagactctatgatgaaacagagtcgtcttttgcgatgacatgttgggataatgaatccattctacttgcacagagctggatgccacgagaaacagtaatatttgcctcagatgtaagaataaattttgacaaatttcggaactgcatgacagcaactgtaatctcaaaaaccattattacaactaatccagaagctaacattctgctgaattttatacgagaaaataaagaaacgaatgttctggatgatgaaattgacagttatttcaaagaatccataaatttaagtacaatagttgatgtctacacagttgaacaattaaagggaaaagctttgaagaatgaaggaaaagctgatccttcctatggcatcctttatgcctacatttccacactcaacattgatgatgaaactacaaaagtagttcgaaatagatgttccagctgtggttatattgtaaatgaagcatctaacatgtgcacaacttgcaacaaaaactccttggactttaaatctgtctttctcagtttccatgtgctgattgatctgactgatcacacaggcacccttcattcctgtagtctcacaggaagtgttgctgaggagactttgggctgctgtaacctcagaaacgggaagctgagggaggattgcttgaccccgggagttcgaggctgcagtgagctgtgatagcactgctgcactccagcttgggcgacagagtgagaccctgtctcagcccgtgtatgccagcctcgatctcatcgttttctttaaccggtccaactccctttggcgtcccagtcaagataatatctccttcttccaaggttatgatcttagaaacatagctgatgatgtaggggatggaaaaaatcatggaggatgtctcaccctcctgtctgagttcgccgttgaccttgagccagagcttcagcttgtgagggtcagggatcttctccttgggcacgaacgcgctgaccgggcaggacgccgtgaagctcttcgccagagtccagggcagccccttcttcttgcactcgtcctgcacgtcccgggcggtcatatccaggcacagggcatagccgcccacgtagtccatggccgcagcctcggggactgcgcggcagcgcttgcccatcaccacgcccagctccagctcgtggtgcaggttgcgagtgtacgcgggcatgaggatgggcgagccctcgggcgcgtaggccgtggacggcttcaggaacagcacgggctcgctcaacaccgcgctgcgcatctccctgacgtggtccgcgtagttcctccccacgcagacgatgttctttccccactcccagaagcgggacaatggcctggatgctgccatgattcccatcaagtgcccctgtagtcacgtgggctgggccggtcagctgatgcctacggcatcccggagaggaccaactgcctcggaacgctgtcccccgcagcgacggcccgttccacctcgcgatctgccgggtacccgggcggcgtggcgctcggcctccagggatccactgtgcggtgccaaaaaagaggcggaggctcgcggcacagctctcccggcgcagctctcgggccgccgccgccgccgctcccaggcccgtctcccggcccgtggcagtcggggctcgcggagaaaacaagttgagcgcgagcgcgttgattggttggcggacggtgcgaggtggacgctgattggctgagggcagcgcgaggcgggcgctgattggctgcgacgcgccgacgccggtgttttgcagtcctgggcagctcggcagtccagcccggcccgggtcatggtggtgggccgagggctgctcggccgccgcagcctcgccgcgctgggagccgcctgcgcccgccgaggcctcggtccagccctgctgggagttttctgccacacagatttgcggaagaacctgaccgtggacgagggcaccatgaaggtagaggtgctgcctgccctgaccgacaactacatgtacctggtcattgatgatgagaccaaggaggctgccattgtggatccggtgcagccccagaaggtcgtggacgcggcgagaaagcacggggtgaaactgaccacagtgctcaccacccaccaccactgggaccatgctggcgggaatgagaaactggtcaagctggagtcgggactgaaggtgtacgggggtgacgaccgtatcggggccctgactcacaagatcactcacctgtccacactgcaggtggggtctctgaacgtcaagtgcctggcgaccccgtgccacacttcaggacacatttgttacttcgtgagcaagcccggaggctcggagccccctgccgtgttcacaggtgacaccttgtttgtggctggctgcgggaagttctatgaagggactgcggatgagatgtgtaaagctctgctggaggtcttgggccggctccccccggacacaagagtctactgtggccacgagtacaccatcaacaacctcaagtttgcacgccacgtggagcccggcaatgccgccatccgggagaagctggcctgggccaaggagaagtacagcatcggggagcccacagtgccatccaccctggcagaggagtttacctacaaccccttcatgagagtgagggagaagacggtgcagcagcacgcaggtgagacggacccggtgaccaccatgcgggccgtgcgcagggagaaggaccagttcaagatgccccgggactgaggccgccctgcaccttcagcggatttggggattaggctcttttaggtaactggctttcctgctggtccgtgcgggaaattcagtcttgatttaaccttaattttacagcccttggcttgtgttatcggacgttttaatgcatatttataagagaagtttaacaagtatttattcccataaaaaaacttccccttg

SEQ ID NO: 278789 - DNA, 1507 bp, Homo sapiens
cctagtgaggccggggttaactggccgaggcgcacgacggcccgttccacctcgcgatctgccgggtacccgggcggcgtggcgctcggcctccagggatccactgtgcggtgccaaaaaagaggcggaggctcgcggcacagctctcccggcgcagctctcgggccgccgccgccgccgctcccaggcccgtctcccggcccgtggcagtcggggctcgcggagaaaacaagttgagcgcgagcgcgttgattggttggcggacggtgcgaggtggacgctgattggctgagggcagcgcgaggcgggcgctgattggctgcgacgcgccgacgccggtgttttgcagtcctgggcagctcggcagtccagcccggcccgggtcatggtggtgggccgagggctgctcggccgccgcagcctcgccgcgctgggagccgcctgcgcccgccgaggcctcggtccagccctgctgggagttttctgccacacagatttgcggaagaacctgaccgtggacgagggcaccatgaaggtagaggtgctgcctgccctgaccgacaactacatgtacctggtcattgatgatgagaccaaggaggctgccattgtggatccggtgcagccccagaaggtcgtggacgcggcgagaaagcacggggtgaaactgaccacagtgctcaccacccaccaccactgggaccatgctggcgggaatgagaaactggtcaagctggagtcgggactgaaggtgtacgggggtgacgaccgtatcggggccctgactcacaagatcactcacctgtccacactgcaggtggggtctctgaacgtcaagtgcctggcgaccccgtgccacacttcaggacacatttgttacttcgtgagcaagcccggaggctcggagccccctgccgtgttcacaggtgacaccttgtttgtggctggctgcgggaagttctatgaagggactgcggatgagatgtgtaaagctctgctggaggtcttgggccggctccccccggacacaagagtctactgtggccacgagtacaccatcaacaacctcaagtttgcacgccacgtggagcccggcaatgccgccatccgggagaagctggcctgggccaaggagaagtacagcatcggggagcccacagtgccatccaccctggcagaggagtttacctacaaccccttcatgagagtgagggagaagacggtgcagcagcacgcaggtgagacggacccggtgaccaccatgcgggccgtgcgcagggagaaggaccagttcaagatgccccgggactgaggccgccctgcaccttcagcggatttggggattaggctcttttaggtaactggctttcctgctggtccgtgcgggaaattcagtcttgatttaaccttaattttacagcccttggcttgtgttatcggacgttttaatgcatatttataagagaagtttaacaagtatttattcccataaaaaaacttccccttg

SEQ ID NO: 278790 - DNA, 3653 bp, Homo sapiens
agcgggcggggccgtcgcacctgcacgaggctgtggcccgagcgtcctgtggagaagccgcgaagcgcgggcgacccgggggtcgggcgggccaggtccgcgaggccgcggcggcagctgtgcaggcccggggagcagccggccgggcgagcctcggatattggatcagaaaggtacactttcagcttcaccattcgggattcaccagcacattttgtaaatgcagcttcctggggcaatgaagattacatcaagtctctttctgacagctttagggttggtgactgtgtgataattgaaaatcctctgatccaaagaaaggaaatagaaagagaagaaaaattcagccctgcaactcctagcaactgtaaactgttgctcagtgagaatcactcaacagtaaaagtttgttccagttatgaagtggacacaaagttactttctttgatacatttacctgttaaagagtctcatgattattattcactgggtgacattgttgcaaatggacacagtcttaatgggaggattattaacgtgcttgcagctgtgaaatcggttggagagccaaaatactttacaacttcagaccggagaaaaggccagaggtgtgaagttagactctatgatgaaacagagtcgtcttttgcgatgacatgttgggataatgaatccattctacttgcacagagctggatgccacgagaaacagtaatatttgcctcagatgtaagaataaattttgacaaatttcggaactgcatgacagcaactgtaatctcaaaaaccattattacaactaatccagaagctaacattctgctgaattttatacgagaaaataaagaaacgaatgttctggatgatgaaattgacagttatttcaaagaatccataaatttaagtacaatagttgatgtctacacagttgaacaattaaagggaaaagctttgaagaatgaaggaaaagctgatccttcctatggcatcctttatgcctacatttccacactcaacattgatgatgaaactacaaaagtagttcgaaatagatgttccagctgtggttatattgtaaatgaagcatctaacatgtgcacaacttgcaacaaaaactccttggactttaaatctgtctttctcagtttccatgtgctgattgatctgactgatcacacaggcacccttcattcctgtagtctcacaggaagtgttgctgaggagactttgggctgctgtaacctcagaaacgggaagctgagggaggattgcttgaccccgggagttcgaggctgcagtgagctgtgatagcactgctgcactccagcttgggcgacagagtgagaccctgtctcagcccgtgtatgccagcctcgatctcatcgttttctttaaccggtccaactccctttggcgtcccagtcaagataatatctccttcttccaaggttatgatcttagaaacatagctgatgatgtaggggatggaaaaaatcatggaggatgtctcaccctcctgtctgagttcgccgttgaccttgagccagagcttcagcttgtgagggtcagggatcttctccttgggcacgaacgcgctgaccgggcaggacgccgtgaagctcttcgccagagtccagggcagccccttcttcttgcactcgtcctgcacgtcccgggcggtcatatccaggcacagggcatagccgcccacgtagtccatggccgcagcctcggggactgcgcggcagcgcttgcccatcaccacgcccagctccagctcgtggtgcaggttgcgagtgtacgcgggcatgaggatgggcgagccctcgggcgcgtaggccgtggacggcttcaggaacagcacgggctcgctcaacaccgcgctgcgcatctccctgacgtggtccgcgtagttcctccccacgcagacgatgttctttccccactcccagaagcgggacaatggcctggatgctgccatgattcccatcaagtgcccctgtagtcacgtgggctgggccggtcagctgatgcctacggcatcccggagaggaccaactgcctcggaacgctgtcccccgcagcgacggcccgttccacctcgcgatctgccgggtacccgggcggcgtggcgctcggcctccagggatccactgtgcggtgccaaaaaagaggcggaggctcgcggcacagctctcccggcgcagctctcgggccgccgccgccgccgctcccaggcccgtctcccggcccgtggcagtcggggctcgcggagaaaacaagttgagcgcgagcgcgttgattggttggcggacggtgcgaggtggacgctgattggctgagggcagcgcgaggcgggcgctgattggctgcgacgcgccgacgccggtgttttgcagtcctgggcagctcggcagtccagcccggcccgggtcatggtggtgggccgagggctgctcggccgccgcagcctcgccgcgctgggagccgcctgcgcccgccgaggcctcggtgcctaaggccgcgctgccgggctcgagcggaggcggcgcaggcgctgaggctggcgcggagcgggcgcggggccgcgggtgcggaaagcgctaggtccagccctgctgggagttttctgccacacagatttgcggaagaacctgaccgtggacgagggcaccatgaaggtagaggtgctgcctgccctgaccgacaactacatgtacctggtcattgatgatgagaccaaggaggctgccattgtggatccggtgcagccccagaaggtcgtggacgcggcgagaaagcacggggtgaaactgaccacagtgctcaccacccaccaccactgggaccatgctggcgggaatgagaaactggtcaagctggagtcgggactgaaggtgtacgggggtgacgaccgtatcggggccctgactcacaagatcactcacctgtccacactgcaggtggggtctctgaacgtcaagtgcctggcgaccccgtgccacacttcaggacacatttgttacttcgtgagcaagcccggaggctcggagccccctgccgtgttcacaggtgacaccttgtttgtggctggctgcgggaagttctatgaagggactgcggatgagatgtgtaaagctctgctggaggtcttgggccggctccccccggacacaagagtctactgtggccacgagtacaccatcaacaacctcaagtttgcacgccacgtggagcccggcaatgccgccatccgggagaagctggcctgggccaaggagaagtacagcatcggggagcccacagtgccatccaccctggcagaggagtttacctacaaccccttcatgagagtgagggagaagacggtgcagcagcacgcaggtgagacggacccggtgaccaccatgcgggccgtgcgcagggagaaggaccagttcaagatgccccgggactgaggccgccctgcaccttcagcggatttggggattaggctcttttaggtaactggctttcctgctggtccgtgcgggaaattcagtcttgatttaaccttaattttacagcccttggcttgtgttatcggacgttttaatgcatatttataagagaagtttaacaagtatttattcccataaaaaaacttccccttg

SEQ ID NO: 278791 - DNA, 1233 bp, Homo sapiens
ctagttctagcccacgcgtcgccacgcgtcgggctgctcggccgccgcagcctcgccgcgctgggagccgcctgcgcccgccgaggcctcggtgcctaaggccgcgctgccgggctcgagcggaggcggcgcaggcgctgaggctggcgcggagcgggcgcggggccgcgggtgcggaaagcgctaggtccagccctgctgggagttttctgccacacagatttgcggaagaacctgaccgtggacgagggcaccatgaaggtagaggtgctgcctgccctgaccgacaactacatgtacctggtcattgatgatgagaccaaggaggctgccattgtggatccggtgcagccccagaaggtcgtggacgcggcgagaaagcacggggtgaaactgaccacagtgctcaccacccaccaccactgggaccatgctggcgggaatgagaaactggtcaagctggagtcgggactgaaggtgtacgggggtgacgaccgtatcggggccctgactcacaagatcactcacctgtccacactgcaggtggggtctctgaacgtcaagtgcctggcgaccccgtgccacacttcaggacacatttgttacttcgtgagcaagcccggaggctcggagccccctgccgtgttcacaggtgacaccttgtttgtggctggctgcgggaagttctatgaagggactgcggatgagatgtgtaaagctctgctggaggtcttgggccggctccccccggacacaagagtctactgtggccacgagtacaccatcaacaacctcaagtttgcacgccacgtggagcccggcaatgccgccatccgggagaagctggcctgggccaaggagaagtacagcatcggggagcccacagtgccatccaccctggcagaggagtttacctacaaccccttcatgagagtgagggagaagacggtgcagcagcacgcaggtgagacggacccggtgaccaccatgcgggccgtgcgcagggagaaggaccagttcaagatgccccgggactgaggccgccctgcaccttcagcggatttggggattaggctcttttaggtaactggctttcctgctggtccgtgcgggaaattcagtcttgatttaaccttaattttacagcccttggcttgtgttatcggacgttttaatgcatatttataagagaagtttaacaagtatttattcccataaaaaaacttccccttg

SEQ ID NO: 278792 - DNA, 4080 bp, Homo sapiens
  misc_feature (4080)..(4080): n is a, c, g, or t
agcgggcggggccgtcgcacctgcacgaggctgtggcccgagcgtcctgtggagaagccgcgaagcgcgggcgacccgggggtcgggcgggccaggtccgcgaggccgcggcggcagctgtgcaggcccggggagcagccggccgggcgagcctcggatattggatcagaaaggtacactttcagcttcaccattcgggattcaccagcacattttgtaaatgcagcttcctggggcaatgaagattacatcaagtctctttctgacagctttagggttggtgactgtgtgataattgaaaatcctctgatccaaagaaaggaaatagaaagagaagaaaaattcagccctgcaactcctagcaactgtaaactgttgctcagtgagaatcactcaacagtaaaagtttgttccagttatgaagtggacacaaagttactttctttgatacatttacctgttaaagagtctcatgattattattcactgggtgacattgttgcaaatggacacagtcttaatgggaggattattaacgtgcttgcagctgtgaaatcggttggagagccaaaatactttacaacttcagaccggagaaaaggccagaggtgtgaagttagactctatgatgaaacagagtcgtcttttgcgatgacatgttgggataatgaatccattctacttgcacagagctggatgccacgagaaacagtaatatttgcctcagatgtaagaataaattttgacaaatttcggaactgcatgacagcaactgtaatctcaaaaaccattattacaactaatccagaagctaacattctgctgaattttatacgagaaaataaagaaacgaatgttctggatgatgaaattgacagttatttcaaagaatccataaatttaagtacaatagttgatgtctacacagttgaacaattaaagggaaaagctttgaagaatgaaggaaaagctgatccttcctatggcatcctttatgcctacatttccacactcaacattgatgatgaaactacaaaagtagttcgaaatagatgttccagctgtggttatattgtaaatgaagcatctaacatgtgcacaacttgcaacaaaaactccttggactttaaatctgtctttctcagtttccatgtgctgattgatctgactgatcacacaggcacccttcattcctgtagtctcacaggaagtgttgctgaggagactttgggctgctgtaacctcagaaacgggaagctgagggaggattgcttgaccccgggagttcgaggctgcagtgagctgtgatagcactgctgcactccagcttgggcgacagagtgagaccctgtctcagcccgtgtatgccagcctcgatctcatcgttttctttaaccggtccaactccctttggcgtcccagtcaagataatatctccttcttccaaggttatgatcttagaaacatagctgatgatgtaggggatggaaaaaatcatggaggatgtctcaccctcctgtctgagttcgccgttgaccttgagccagagcttcagcttgtgagggtcagggatcttctccttgggcacgaacgcgctgaccgggcaggacgccgtgaagctcttcgccagagtccagggcagccccttcttcttgcactcgtcctgcacgtcccgggcggtcatatccaggcacagggcatagccgcccacgtagtccatggccgcagcctcggggactgcgcggcagcgcttgcccatcaccacgcccagctccagctcgtggtgcaggttgcgagtgtacgcgggcatgaggatgggcgagccctcgggcgcgtaggccgtggacggcttcaggaacagcacgggctcgctcaacaccgcgctgcgcatctccctgacgtggtccgcgtagttcctccccacgcagacgatgttctttccccactcccagaagcgggacaatggcctggatgctgccatgattcccatcaagtgcccctgtagtcacgtgggctgggccggtcagctgatgcctacggcatcccggagaggaccaactgcctcggaacgctgtcccccgcagcgacggcccgttccacctcgcgatctgccgggtacccgggcggcgtggcgctcggcctccagggatccactgtgcggtgccaaaaaagaggcggaggctcgcggcacagctctcccggcgcagctctcgggccgccgccgccgccgctcccaggcccgtctcccggcccgtggcagtcggggctcgcggagaaaacaagttgagcgcgagcgcgttgattggttggcggacggtgcgaggtggacgctgattggctgagggcagcgcgaggcgggcgctgattggctgcgacgcgccgacgccggtgttttgcagtcctgggcagctcggcagtccagcccggcccgggtcatggtggtgggccgagggctgctcggccgccgcagcctcgccgcgctgggagccgcctgcgcccgccgaggcctcggtccagccctgctgggagttttctgccacacagatttgcggaagaacctgaccgtggacgagggcaccatgaaggtagaggtgctgcctgccctgaccgacaactacatgtacctggtcattgatgatgagaccaaggaggctgccattgtggatccggtgcagccccagaaggtcgtggacgcggcgagaaagcacggggtgaaactgaccacagtgctcaccacccaccaccactgggaccatgctggcgggaatgagaaactggtcaagctggagtcgggactgaaggtgtacgggggtgacgaccgtatcggggccctgactcacaagatcactcacctgtccacactgcaggtggggtctctgaacgtcaagtgcctggcgaccccgtgccacacttcaggacacatttgttacttcgtgagcaagcccggaggctcggagccccctgccgtgttcacaggtgacaccttgtttgtggctggctgcgggaagttctatgaagggactgcggatgagatgtgtaaagctctgctggaggtcttgggccggctccccccggacacaagagtctactgtggccacgagtacaccatcaacaacctcaagtttgcacgccacgtggagcccggcaatgccgccatccgggagaagctggcctgggccaaggagaagtacagcatcggggagcccacagtgccatccaccctggcagaggagtttacctacaaccccttcatgagagtgagggagaagacggtgcagcagcacgcaggtgagacggacccggtgaccaccatgcgggccgtgcgcagggagaaggaccagttcaagatgccccgggactgaggccgccctgcaccttcagcggatttggggattaggctcttttaggtaactggctttcctgctggtccgtgcgggaaattcagtcttgatttaaccttaattttacagcccttggcttgtgttatcggacgttttaatgcatatttataagagaagtttaacaagtatttattctcgtgccgaattcggcacgaggaactagtctcgagttttttttttttttttttcatgaatcatgtttggttcctgtgaaagtccctggtccagggatcctcctcctttctcttttacttctgaattctgaaattcagttagttacttttgcctttcgctcttctatcacagccaccttgaccttgggtaaaacccaaggtctttccttctggctaccttcctgcaggtccaccctgtctgccattggtcttctctgcctctgactacatctgccaccaacaacccttccctcacccctgccaggggcagacaggcttctcagcagaactgtgactgaaatcagagctgctggctggggcagtgttaactacacagaggcacatcctgacagggtttgccccagagatctaaattccatgaggagggcaccaccacctaggaagggtaatccacgttcagaaggttgctagtcttaagtacattccatgaatttttgcttcattactgaccttatttgaccttgaaggaaccttttttttttttn

SEQ ID NO: 278793 - DNA, 3845 bp, Homo sapiens
agcgggcggggccgtcgcacctgcacgaggctgtggcccgagcgtcctgtggagaagccgcgaagcgcgggcgacccgggggtcgggcgggccaggtccgcgaggccgcggcggcagctgtgcaggcccggggagcagccggccgggcgagcctcggatattggatcagaaaggtacactttcagcttcaccattcgggattcaccagcacattttgtaaatgcagcttcctggggcaatgaagattacatcaagtctctttctgacagctttagggttggtgactgtgtgataattgaaaatcctctgatccaaagaaaggaaatagaaagagaagaaaaattcagccctgcaactcctagcaactgtaaactgttgctcagtgagaatcactcaacagtaaaagtttgttccagttatgaagtggacacaaagttactttctttgatacatttacctgttaaagagtctcatgattattattcactgggtgacattgttgcaaatggacacagtcttaatgggaggattattaacgtgcttgcagctgtgaaatcggttggagagccaaaatactttacaacttcagaccggagaaaaggccagaggtgtgaagttagactctatgatgaaacagagtcgtcttttgcgatgacatgttgggataatgaatccattctacttgcacagagctggatgccacgagaaacagtaatatttgcctcagatgtaagaataaattttgacaaatttcggaactgcatgacagcaactgtaatctcaaaaaccattattacaactaatccagaagctaacattctgctgaattttatacgagaaaataaagaaacgaatgttctggatgatgaaattgacagttatttcaaagaatccataaatttaagtacaatagttgatgtctacacagttgaacaattaaagggaaaagctttgaagaatgaaggaaaagctgatccttcctatggcatcctttatgcctacatttccacactcaacattgatgatgaaactacaaaagtagttcgaaatagatgttccagctgtggttatattgtaaatgaagcatctaacatgtgcacaacttgcaacaaaaactccttggactttaaatctgtctttctcagtttccatgtgctgattgatctgactgatcacacaggcacccttcattcctgtagtctcacaggaagtgttgctgaggagactttgggctgctgtaacctcagaaacgggaagctgagggaggattgcttgaccccgggagttcgaggctgcagtgagctgtgatagcactgctgcactccagcttgggcgacagagtgagaccctgtctcagcccgtgtatgccagcctcgatctcatcgttttctttaaccggtccaactccctttggcgtcccagtcaagataatatctccttcttccaaggttatgatcttagaaacatagctgatgatgtaggggatggaaaaaatcatggaggatgtctcaccctcctgtctgagttcgccgttgaccttgagccagagcttcagcttgtgagggtcagggatcttctccttgggcacgaacgcgctgaccgggcaggacgccgtgaagctcttcgccagagtccagggcagccccttcttcttgcactcgtcctgcacgtcccgggcggtcatatccaggcacagggcatagccgcccacgtagtccatggccgcagcctcggggactgcgcggcagcgcttgcccatcaccacgcccagctccagctcgtggtgcaggttgcgagtgtacgcgggcatgaggatgggcgagccctcgggcgcgtaggccgtggacggcttcaggaacagcacgggctcgctcaacaccgcgctgcgcatctccctgacgtggtccgcgtagttcctccccacgcagacgatgttctttccccactcccagaagcgggacaatggcctggatgctgccatgattcccatcaagtgcccctgtagtcacgtgggctgggccggtcagctgatgcctacggcatcccggagaggaccaactgcctcggaacgctgtcccccgcagcgacggcccgttccacctcgcgatctgccgggtacccgggcggcgtggcgctcggcctccagggatccactgtgcggtgccaaaaaagaggcggaggctcgcggcacagctctcccggcgcagctctcgggccgccgccgccgccgctcccaggcccgtctcccggcccgtggcagtcggggctcgcggagaaaacaagttgagcgcgagcgcgttgattggttggcggacggtgcgaggtggacgctgattggctgagggcagcgcgaggcgggcgctgattggctgcgacgcgccgacgccggtgttttgcagtcctgggcagctcggcagtccagcccggcccgggtcatggtggtgggccgagggctgctcggccgccgcagcctcgccgcgctgggagccgcctgcgcccgccgaggcctcggtccagccctgctgggagttttctgccacacagatttgcggaagaacctgaccgtggacgagggcaccatgaaggtagaggtgctgcctgccctgaccgacaactacatgtacctggtcattgatgatgagaccaaggaggctgccattgtggatccggtgcagccccagaaggtcgtggacgcggcgagaaagcacggggtgaaactgaccacagtgctcaccacccaccaccactgggaccatgctggcgggaatgagaaactggtcaagctggagtcgggactgaaggtgtacgggggtgacgaccgtatcggggccctgactcacaagatcactcacctgtccacactgcaggtggggtctctgaacgtcaagtgcctggcgaccccgtgccacacttcaggacacatttgttacttcgtgagcaagcccggaggctcggagccccctgccgtgttcacaggtgacaccttgtttgtggctggctgcgggaagttctatgaagggactgcggatgagatgtgtaaagctctgctggaggtcttgggccggctccccccggacacaagagtctactgtggccacgagtacaccatcaacaacctcaagtttgcacgccacgtggagcccggcaatgccgccatccgggagaagctggcctgggccaaggagaagtacagcatcggggagcccacagtgccatccaccctggcagaggagtttacctacaaccccttcatgagagtgagggagaagacggtgcagcagcacgcaggtgagacggacccggtgaccaccatgcgggccgtgcgcagggagaaggaccagttcaagatgccccgggactgaggccgccctgcaccttcagcggatttggggattaggctcttttagaaatcagccagctaactagaaaatcggcaagagaccgaaaccagcagtggctgaggccagatgaccctgtggctgtgtgctggacaagatgctcggtctcccaggtgatggccaccgtccactcgccactggcctgagtgtagacaggtatgcacccacaggatgcagagccacagggctcggtggcattgctggaaacagtgagaaggacagggacagatgtattccaggacgtgacctagacatggcctcacctccctcgggtcctgtcctacagaaagccaggccctgtgcggcctgaagacaggcagaatgcggctcatggaggagcctgggaggccaccggccttgagctgggagaggccacggggagtggggccattgggggtggcggcagtgatgggggcctctggaactcaatgggctgaatgtgtgtgt

SEQ ID NO: 278794 - DNA, 3448 bp, Homo sapiens
agcgggcggggccgtcgcacctgcacgaggctgtggcccgagcgtcctgtggagaagccgcgaagcgcgggcgacccgggggtcgggcgggccaggtccgcgaggccgcggcggcagctgtgcaggcccggggagcagccggccgggcgagcctcggatattggatcagaaaggtacactttcagcttcaccattcgggattcaccagcacattttgtaaatgcagcttcctggggcaatgaagattacatcaagtctctttctgacagctttagggttggtgactgtgtgataattgaaaatcctctgatccaaagaaaggaaatagaaagagaagaaaaattcagccctgcaactcctagcaactgtaaactgttgctcagtgagaatcactcaacagtaaaagtttgttccagttatgaagtggacacaaagttactttctttgatacatttacctgttaaagagtctcatgattattattcactgggtgacattgttgcaaatggacacagtcttaatgggaggattattaacgtgcttgcagctgtgaaatcggttggagagccaaaatactttacaacttcagaccggagaaaaggccagaggtgtgaagttagactctatgatgaaacagagtcgtcttttgcgatgacatgttgggataatgaatccattctacttgcacagagctggatgccacgagaaacagtaatatttgcctcagatgtaagaataaattttgacaaatttcggaactgcatgacagcaactgtaatctcaaaaaccattattacaactaatccagaagctaacattctgctgaattttatacgagaaaataaagaaacgaatgttctggatgatgaaattgacagttatttcaaagaatccataaatttaagtacaatagttgatgtctacacagttgaacaattaaagggaaaagctttgaagaatgaaggaaaagctgatccttcctatggcatcctttatgcctacatttccacactcaacattgatgatgaaactacaaaagtagttcgaaatagatgttccagctgtggttatattgtaaatgaagcatctaacatgtgcacaacttgcaacaaaaactccttggactttaaatctgtctttctcagtttccatgtgctgattgatctgactgatcacacaggcacccttcattcctgtagtctcacaggaagtgttgctgaggagactttgggctgctgtaacctcagaaacgggaagctgagggaggattgcttgaccccgggagttcgaggctgcagtgagctgtgatagcactgctgcactccagcttgggcgacagagtgagaccctgtctcagcccgtgtatgccagcctcgatctcatcgttttctttaaccggtccaactccctttggcgtcccagtcaagataatatctccttcttccaaggttatgatcttagaaacatagctgatgatgtaggggatggaaaaaatcatggaggatgtctcaccctcctgtctgagttcgccgttgaccttgagccagagcttcagcttgtgagggtcagggatcttctccttgggcacgaacgcgctgaccgggcaggacgccgtgaagctcttcgccagagtccagggcagccccttcttcttgcactcgtcctgcacgtcccgggcggtcatatccaggcacagggcatagccgcccacgtagtccatggccgcagcctcggggactgcgcggcagcgcttgcccatcaccacgcccagctccagctcgtggtgcaggttgcgagtgtacgcgggcatgaggatgggcgagccctcgggcgcgtaggccgtggacggcttcaggaacagcacgggctcgctcaacaccgcgctgcgcatctccctgacgtggtccgcgtagttcctccccacgcagacgatgttctttccccactcccagaagcgggacaatggcctggatgctgccatgattcccatcaagtgcccctgtagtcacgtgggctgggccggtcagctgatgcctacggcatcccggagaggaccaactgcctcggaacgctgtcccccgcagcgacggcccgttccacctcgcgatctgccgggtacccgggcggcgtggcgctcggcctccagggatccactgtgcggtgccaaaaaagaggcggaggctcgcggcacagctctcccggcgcagctctcgggccgccgccgccgccgctcccaggcccgtctcccggcccgtggcagtcggggctcgcggagaaaacaagttgagcgcgagcgcgttgattggttggcggacggtgcgaggtggacgctgattggctgagggcagcgcgaggcgggcgctgattggctgcgacgcgccgacgccggtgttttgcagtcctgggcagctcggcagtccagcccggcccgggtcatggtggtgggccgagggctgctcggccgccgcagcctcgccgcgctgggagccgcctgcgcccgccgaggcctcggtccagccctgctgggagttttctgccacacagatttgcggaagaacctgaccgtggacgagggcaccatgaaggtagaggtgctgcctgccctgaccgacaactacatgtacctggtcattgatgatgagaccaaggaggctgccattgtggatccggtgcagccccagaaggtcgtggacgcggcgagaaagcacggggtgaaactgaccacagtgctcaccacccaccaccactgggaccatgctggcgggaatgagaaactggtcaagctggagtcgggactgaaggtgtacgggggtgacgaccgtatcggggccctgactcacaagatcactcacctgtccacactgcaggtgacaccttgtttgtggctggctgcgggaagttctatgaagggactgcggatgagatgtgtaaagctctgctggaggtcttgggccggctccccccggacacaagagtctactgtggccacgagtacaccatcaacaacctcaagtttgcacgccacgtggagcccggcaatgccgccatccgggagaagctggcctgggccaaggagaagtacagcatcggggagcccacagtgccatccaccctggcagaggagtttacctacaaccccttcatgagagtgagggagaagacggtgcagcagcacgcaggtgagacggacccggtgaccaccatgcgggccgtgcgcagggagaaggaccagttcaagatgccccgggactgaggccgccctgcaccttcagcggatttggggattaggctcttttaggtaactggctttcctgctggtccgtgcgggaaattcagtcttgatttaaccttaattttacagcccttggcttgtgttatcggacgttttaatgcatatttataagagaagtttaacaagtatttattcccataaaaaaacttccccttg

SEQ ID NO: 278795 - DNA, 3586 bp, Homo sapiens
agcgggcggggccgtcgcacctgcacgaggctgtggcccgagcgtcctgtggagaagccgcgaagcgcgggcgacccgggggtcgggcgggccaggtccgcgaggccgcggcggcagctgtgcaggcccggggagcagccggccgggcgagcctcggatattggatcagaaaggtacactttcagcttcaccattcgggattcaccagcacattttgtaaatgcagcttcctggggcaatgaagattacatcaagtctctttctgacagctttagggttggtgactgtgtgataattgaaaatcctctgatccaaagaaaggaaatagaaagagaagaaaaattcagccctgcaactcctagcaactgtaaactgttgctcagtgagaatcactcaacagtaaaagtttgttccagttatgaagtggacacaaagttactttctttgatacatttacctgttaaagagtctcatgattattattcactgggtgacattgttgcaaatggacacagtcttaatgggaggattattaacgtgcttgcagctgtgaaatcggttggagagccaaaatactttacaacttcagaccggagaaaaggccagaggtgtgaagttagactctatgatgaaacagagtcgtcttttgcgatgacatgttgggataatgaatccattctacttgcacagagctggatgccacgagaaacagtaatatttgcctcagatgtaagaataaattttgacaaatttcggaactgcatgacagcaactgtaatctcaaaaaccattattacaactaatccagaagctaacattctgctgaattttatacgagaaaataaagaaacgaatgttctggatgatgaaattgacagttatttcaaagaatccataaatttaagtacaatagttgatgtctacacagttgaacaattaaagggaaaagctttgaagaatgaaggaaaagctgatccttcctatggcatcctttatgcctacatttccacactcaacattgatgatgaaactacaaaagtagttcgaaatagatgttccagctgtggttatattgtaaatgaagcatctaacatgtgcacaacttgcaacaaaaactccttggactttaaatctgtctttctcagtttccatgtgctgattgatctgactgatcacacaggcacccttcattcctgtagtctcacaggaagtgttgctgaggagactttgggctgctgtaacctcagaaacgggaagctgagggaggattgcttgaccccgggagttcgaggctgcagtgagctgtgatagcactgctgcactccagcttgggcgacagagtgagaccctgtctcagcccgtgtatgccagcctcgatctcatcgttttctttaaccggtccaactccctttggcgtcccagtcaagataatatctccttcttccaaggttatgatcttagaaacatagctgatgatgtaggggatggaaaaaatcatggaggatgtctcaccctcctgtctgagttcgccgttgaccttgagccagagcttcagcttgtgagggtcagggatcttctccttgggcacgaacgcgctgaccgggcaggacgccgtgaagctcttcgccagagtccagggcagccccttcttcttgcactcgtcctgcacgtcccgggcggtcatatccaggcacagggcatagccgcccacgtagtccatggccgcagcctcggggactgcgcggcagcgcttgcccatcaccacgcccagctccagctcgtggtgcaggttgcgagtgtacgcgggcatgaggatgggcgagccctcgggcgcgtaggccgtggacggcttcaggaacagcacgggctcgctcaacaccgcgctgcgcatctccctgacgtggtccgcgtagttcctccccacgcagacgatgttctttccccactcccagaagcgggacaatggcctggatgctgccatgattcccatcaagtgcccctgtagtcacgtgggctgggccggtcagctgatgcctacggcatcccggagaggaccaactgcctcggaacgctgtcccccgcagcgacggcccgttccacctcgcgatctgccgggtacccgggcggcgtggcgctcggcctccagggatccactgtgcggtgccaaaaaagaggcggaggctcgcggcacagctctcccggcgcagctctcgggccgccgccgccgccgctcccaggcccgtctcccggcccgtggcagtcggggctcgcggagaaaacaagttgagcgcgagcgcgttgattggttggcggacggtgcgaggtggacgctgattggctgagggcagcgcgaggcgggcgctgattggctgcgacgcgccgacgccggtgttttgcagtcctgggcagctcggcagtccagcccggcccgggtcatggtggtgggccgagggctgctcggccgccgcagcctcgccgcgctgggagccgcctgcgcccgccgaggcctcggtccagccctgctgggagttttctgccacacagatttgcggaagaacctgaccgtggacgagggcaccatgaaggtagaggtgctgcctgccctgaccgacaactacatgtacctggtcattgatgatgagaccaaggaggctgccattgtggatccggtgcagccccagaaggtcgtggacgcggcgagaaagcacggggtgaaactgaccacagtgctcaccacccaccaccactgggaccatgctggcgggaatgagaaactggtcaagctggagtcgggactgaaggtgtacgggggtgacgaccgtatcggggccctgactcacaagatcactcacctgtccacactgcaggtggggtctctgaacgtcaagtgcctggcgaccccgtgccacacttcaggacacatttgttacttcgtgagcaagcccggaggctcggagccccctgccgtgttcacagacaccttgtttgtggctggctgcgggaaaaaaaggggtttttttttctctttcaaatttgaaaaaagggggggactgcggatgagatgtgtaaagctctgctggaggtcttgggccggctccccccggacacaagagtctactgtggccacgagtacaccatcaacaacctcaagtttgcacgccacgtggagcccggcaatgccgccatccgggagaagctggcctgggccaaggagaagtacagcatcggggagcccacagtgccatccaccctggcagaggagtttacctacaaccccttcatgagagtgagggagaagacggtgcagcagcacgcaggtgagacggacccggtgaccaccatgcgggccgtgcgcagggagaaggaccagttcaagatgccccgggactgaggccgccctgcaccttcagcggatttggggattaggctcttttaggtaactggctttcctgctggtccgtgcgggaaattcagtcttgatttaaccttaattttacagcccttggcttgtgttatcggacgttttaatgcatatttataagagaagtttaacaagtatttattcccataaaaaaacttccccttg

SEQ ID NO: 278796 - DNA, 3065 bp, Homo sapiens
agcgggcggggccgtcgcacctgcacgaggctgtggcccgagcgtcctgtggagaagccgcgaagcgcgggcgacccgggggtcgggcgggccaggtccgcgaggccgcggcggcagctgtgcaggcccggggagcagccggccgggcgagcctcggatattggatcagaaaggtacactttcagcttcaccattcgggattcaccagcacattttgtaaatgcagcttcctggggcaatgaagattacatcaagtctctttctgacagctttagggttggtgactgtgtgataattgaaaatcctctgatccaaagaaaggaaatagaaagagaagaaaaattcagccctgcaactcctagcaactgtaaactgttgctcagtgagaatcactcaacagtaaaagtttgttccagttatgaagtggacacaaagttactttctttgatacatttacctgttaaagagtctcatgattattattcactgggtgacattgttgcaaatggacacagtcttaatgggaggattattaacgtgcttgcagctgtgaaatcggttggagagccaaaatactttacaacttcagaccggagaaaaggccagaggtgtgaagttagactctatgatgaaacagagtcgtcttttgcgatgacatgttgggataatgaatccattctacttgcacagagctggatgccacgagaaacagtaatatttgcctcagatgtaagaataaattttgacaaatttcggaactgcatgacagcaactgtaatctcaaaaaccattattacaactaatccagaagctaacattctgctgaattttatacgagaaaataaagaaacgaatgttctggatgatgaaattgacagttatttcaaagaatccataaatttaagtacaatagttgatgtctacacagttgaacaattaaagggaaaagctttgaagaatgaaggaaaagctgatccttcctatggcatcctttatgcctacatttccacactcaacattgatgatgaaactacaaaagtagttcgaaatagatgttccagctgtggttatattgtaaatgaagcatctaacatgtgcacaacttgcaacaaaaactccttggactttaaatctgtctttctcagtttccatgtgctgattgatctgactgatcacacaggcacccttcattcctgtagtctcacaggaagtgttgctgaggagactttgggctgctgtaacctcagaaacgggaagctgagggaggattgcttgaccccgggagttcgaggctgcagtgagctgtgatagcactgctgcactccagcttgggcgacagagtgagaccctgtctcagcccgtgtatgccagcctcgatctcatcgttttctttaaccggtccaactccctttggcgtcccagtcaagataatatctccttcttccaaggttatgatcttagaaacatagctgatgatgtaggggatggaaaaaatcatggaggatgtctcaccctcctgtctgagttcgccgttgaccttgagccagagcttcagcttgtgagggtcagggatcttctccttgggcacgaacgcgctgaccgggcaggacgccgtgaagctcttcgccagagtccagggcagccccttcttcttgcactcgtcctgcacgtcccgggcggtcatatccaggcacagggcatagccgcccacgtagtccatggccgcagcctcggggactgcgcggcagcgcttgcccatcaccacgcccagctccagctcgtggtgcaggttgcgagtgtacgcgggcatgaggatgggcgagccctcgggcgcgtaggccgtggacggcttcaggaacagcacgggctcgctcaacaccgcgctgcgcatctccctgacgtggtccgcgtagttcctccccacgcagacgatgttctttccccactcccagaagcgggacaatggcctggatgctgccatgattcccatcaagtgcccctgtagtcacgtgggctgggccggtcagctgatgcctacggcatcccggagaggaccaactgcctcggaacgctgtcccccgcagcgacggcccgttccacctcgcgatctgccgggtacccgggcggcgtggcgctcggcctccagggatccactgtgcggtgccaaaaaagaggcggaggctcgcggcacagctctcccggcgcagctctcgggccgccgccgccgccgctcccaggcccgtctcccggcccgtggcagtcggggctcgcggagaaaacaagttgagcgcgagcgcgttgattggttggcggacggtgcgaggtggacgctgattggctgagggcagcgcgaggcgggcgctgattggctgcgacgcgccgacgccggtgttttgcagtcctgggcagctcggcagtccagcccggcccgggtcatggtggtgggccgagggctgctcggccgccgcagcctcgccgcgctgggagccgcctgcgcccgccgaggcctcggtccagccctgctgggagttttctgccacacagatttgcggaagaacctgaccgtggacgagggcaccatgaaggtagaggtgctgcctgccctgaccgacaactacatgtacctggtcattgatgatgagaccaaggaggctgccattgtggatccggtgcagccccagaaggtcgtggacgcggcgagaaagcacggggtgaaactgaccacagtgctcaccacccaccaccactgggaccatgctggcgggaatgagaaactggtcaagctggagtcgggactgaaggtgtacgggggtgacgaccgtatcggggccctgactcacaagatcactcacctgtccacactgcaggtggggtctctgaacgtcaagtgcctggcgaccccgtgccacacttcaggacacatttgttacttcgtgagcaagcccggaggctcggagccccctgccgtgttcacagaaactgaccacagtgctcaccacccaccaccactgggaccatgctggcgggaatgagaaactggtcaagctggagtcgggactgaaggc

SEQ ID NO: 278797 - DNA, 3482 bp, Homo sapiens
agcgggcggggccgtcgcacctgcacgaggctgtggcccgagcgtcctgtggagaagccgcgaagcgcgggcgacccgggggtcgggcgggccaggtccgcgaggccgcggcggcagctgtgcaggcccggggagcagccggccgggcgagcctcggatattggatcagaaaggtacactttcagcttcaccattcgggattcaccagcacattttgtaaatgcagcttcctggggcaatgaagattacatcaagtctctttctgacagctttagggttggtgactgtgtgataattgaaaatcctctgatccaaagaaaggaaatagaaagagaagaaaaattcagccctgcaactcctagcaactgtaaactgttgctcagtgagaatcactcaacagtaaaagtttgttccagttatgaagtggacacaaagttactttctttgatacatttacctgttaaagagtctcatgattattattcactgggtgacattgttgcaaatggacacagtcttaatgggaggattattaacgtgcttgcagctgtgaaatcggttggagagccaaaatactttacaacttcagaccggagaaaaggccagaggtgtgaagttagactctatgatgaaacagagtcgtcttttgcgatgacatgttgggataatgaatccattctacttgcacagagctggatgccacgagaaacagtaatatttgcctcagatgtaagaataaattttgacaaatttcggaactgcatgacagcaactgtaatctcaaaaaccattattacaactaatccagaagctaacattctgctgaattttatacgagaaaataaagaaacgaatgttctggatgatgaaattgacagttatttcaaagaatccataaatttaagtacaatagttgatgtctacacagttgaacaattaaagggaaaagctttgaagaatgaaggaaaagctgatccttcctatggcatcctttatgcctacatttccacactcaacattgatgatgaaactacaaaagtagttcgaaatagatgttccagctgtggttatattgtaaatgaagcatctaacatgtgcacaacttgcaacaaaaactccttggactttaaatctgtctttctcagtttccatgtgctgattgatctgactgatcacacaggcacccttcattcctgtagtctcacaggaagtgttgctgaggagactttgggctgctgtaacctcagaaacgggaagctgagggaggattgcttgaccccgggagttcgaggctgcagtgagctgtgatagcactgctgcactccagcttgggcgacagagtgagaccctgtctcagcccgtgtatgccagcctcgatctcatcgttttctttaaccggtccaactccctttggcgtcccagtcaagataatatctccttcttccaaggttatgatcttagaaacatagctgatgatgtaggggatggaaaaaatcatggaggatgtctcaccctcctgtctgagttcgccgttgaccttgagccagagcttcagcttgtgagggtcagggatcttctccttgggcacgaacgcgctgaccgggcaggacgccgtgaagctcttcgccagagtccagggcagccccttcttcttgcactcgtcctgcacgtcccgggcggtcatatccaggcacagggcatagccgcccacgtagtccatggccgcagcctcggggactgcgcggcagcgcttgcccatcaccacgcccagctccagctcgtggtgcaggttgcgagtgtacgcgggcatgaggatgggcgagccctcgggcgcgtaggccgtggacggcttcaggaacagcacgggctcgctcaacaccgcgctgcgcatctccctgacgtggtccgcgtagttcctccccacgcagacgatgttctttccccactcccagaagcgggacaatggcctggatgctgccatgattcccatcaagtgcccctgtagtcacgtgggctgggccggtcagctgatgcctacggcatcccggagaggaccaactgcctcggaacgctgtcccccgcagcgacggcccgttccacctcgcgatctgccgggtacccgggcggcgtggcgctcggcctccagggatccactgtgcggtgccaaaaaagaggcggaggctcgcggcacagctctcccggcgcagctctcgggccgccgccgccgccgctcccaggcccgtctcccggcccgtggcagtcggggctcgcggagaaaacaagttgagcgcgagcgcgttgattggttggcggacggtgcgaggtggacgctgattggctgagggcagcgcgaggcgggcgctgattggctgcgacgcgccgacgccggtgttttgcagtcctgggcagctcggcagtccagcccggcccgggtcatggtggtgggccgagggctgctcggccgccgcagcctcgccgcgctgggagccgcctgcgcccgccgaggcctcggtgcctaaggccgcgctgccgggctcgagcggaggcggcgcaggcgctgaggctggcgcggagcgggcgcggggccgcgggtgcggaaagcgctaggtccagccctgctgggagttttctgccacacagatttgcggaagaacctgaccgtggacgagggcaccatgaaggtagaggtgctgcctgccctgaccgacaactacatgtacctggtcattgatgatgagaccaaggaggctgccattgtggatccggtgcagccccagaaggtcgtggacgcggcgagaaagcacggggtgaaactgaccacagtgctcaccacccaccaccactggtaagtgccgcgtctcacctgggggtgtgggacctggctcacttctcgccccggtgggtttagggacatcaaggcctgtctccccccacggctctgtctgctttgtgaggacaagcccccagcagacttctgagaaagactcgggactcaccgtagcccccaaggggcaagtctggtgctcagtgactctgaggccccgagggtgaggggagaaggttacagccttaccctcaggccccaccccccggctctctcctgggccatgcgggtttgtgccctggcacgttggcctcaatgttggggaggaaatgagtctacaggtgagtggtttttaaaaaaaaaaaacaaacaaaaaaaaaaaaaaacaagcagccagccgggcacggtggctcatgcctataatcccagcactttgggaggctgaggtagttgggtcacttgaggtcaggaccagcctggccaacacggtgaaacccagtctctaccgaaaatacaaaaattaactgggcgtggtggtgggcgcctgtaatctcagctactcgggaggctgaagcaggagaatcacttgaacccgggaggcggaggttgccgtgagccaagatcgtggcattgcactccagcctgggtgacagagcga

SEQ ID NO: 278798 - DNA, 2970 bp, Homo sapiens
agcgggcggggccgtcgcacctgcacgaggctgtggcccgagcgtcctgtggagaagccgcgaagcgcgggcgacccgggggtcgggcgggccaggtccgcgaggccgcggcggcagctgtgcaggcccggggagcagccggccgggcgagcctcggatattggatcagaaaggtacactttcagcttcaccattcgggattcaccagcacattttgtaaatgcagcttcctggggcaatgaagattacatcaagtctctttctgacagctttagggttggtgactgtgtgataattgaaaatcctctgatccaaagaaaggaaatagaaagagaagaaaaattcagccctgcaactcctagcaactgtaaactgttgctcagtgagaatcactcaacagtaaaagtttgttccagttatgaagtggacacaaagttactttctttgatacatttacctgttaaagagtctcatgattattattcactgggtgacattgttgcaaatggacacagtcttaatgggaggattattaacgtgcttgcagctgtgaaatcggttggagagccaaaatactttacaacttcagaccggagaaaaggccagaggtgtgaagttagactctatgatgaaacagagtcgtcttttgcgatgacatgttgggataatgaatccattctacttgcacagagctggatgccacgagaaacagtaatatttgcctcagatgtaagaataaattttgacaaatttcggaactgcatgacagcaactgtaatctcaaaaaccattattacaactaatccagaagctaacattctgctgaattttatacgagaaaataaagaaacgaatgttctggatgatgaaattgacagttatttcaaagaatccataaatttaagtacaatagttgatgtctacacagttgaacaattaaagggaaaagctttgaagaatgaaggaaaagctgatccttcctatggcatcctttatgcctacatttccacactcaacattgatgatgaaactacaaaagtagttcgaaatagatgttccagctgtggttatattgtaaatgaagcatctaacatgtgcacaacttgcaacaaaaactccttggactttaaatctgtctttctcagtttccatgtgctgattgatctgactgatcacacaggcacccttcattcctgtagtctcacaggaagtgttgctgaggagactttgggctgctgtaacctcagaaacgggaagctgagggaggattgcttgaccccgggagttcgaggctgcagtgagctgtgatagcactgctgcactccagcttgggcgacagagtgagaccctgtctcagcccgtgtatgccagcctcgatctcatcgttttctttaaccggtccaactccctttggcgtcccagtcaagataatatctccttcttccaaggttatgatcttagaaacatagctgatgatgtaggggatggaaaaaatcatggaggatgtctcaccctcctgtctgagttcgccgttgaccttgagccagagcttcagcttgtgagggtcagggatcttctccttgggcacgaacgcgctgaccgggcaggacgccgtgaagctcttcgccagagtccagggcagccccttcttcttgcactcgtcctgcacgtcccgggcggtcatatccaggcacagggcatagccgcccacgtagtccatggccgcagcctcggggactgcgcggcagcgcttgcccatcaccacgcccagctccagctcgtggtgcaggttgcgagtgtacgcgggcatgaggatgggcgagccctcgggcgcgtaggccgtggacggcttcaggaacagcacgggctcgctcaacaccgcgctgcgcatctccctgacgtggtccgcgtagttcctccccacgcagacgatgttctttccccactcccagaagcgggacaatggcctggatgctgccatgattcccatcaagtgcccctgtagtcacgtgggctgggccggtcagctgatgcctacggcatcccggagaggaccaactgcctcggaacgctgtcccccgcagcgacggcccgttccacctcgcgatctgccgggtacccgggcggcgtggcgctcggcctccagggatccactgtgcggtgccaaaaaagaggcggaggctcgcggcacagctctcccggcgcagctctcgggccgccgccgccgccgctcccaggcccgtctcccggcccgtggcagtcggggctcgcggagaaaacaagttgagcgcgagcgcgttgattggttggcggacggtgcgaggtggacgctgattggctgagggcagcgcgaggcgggcgctgattggctgcgacgcgccgacgccggtgttttgcagtcctgggcagctcggcagtccagcccggcccgggtcatggtggtgggccgagggctgctcggccgccgcagcctcgccgcgctgggagccgcctgcgcccgccgaggcctcggtccagccctgctgggagttttctgccacacagatttgcggaagaacctgaccgtggacgagggcaccatgaaggtagaggtgctgcctgccctgaccgacaactacatgtacctggtcattgatgatgagaccaaggaggctgccattgtggatccggtgcagccccagaaggtcgtggacgcggcgagaaagcacggggtgaaactgaccacagtgctcaccacccaccaccactgggaccatgctggcgggaatgagaaactggtcaagctggacttcagcggatttggggattaggctcttttaggtaactggctttcctgctggtccgtgcgggaaattcagtcttgatttaaccttaattttacagcccttggcttgtgttatcggacgttttaatgcatatttataagagaagtttaacaagtatttattcccataaaaaaacttccccttg

SEQ ID NO: 278799 - DNA, 1712 bp, Homo sapiens
agcgggcggggccgtcgcacctgcacgaggctgtggcccgagcgtcctgtggagaagccgcgaagcgcgggcgacccgggggtcgggcgggccaggtccgcgaggccgcggcggcagctgtgcaggcccggggagcagccggccgggcgagcctcggatattggatcagaaaggtacactttcagcttcaccattcgggattcaccagcacattttgtaaatgcagcttcctggggcaatgaagattacatcaagtctctttctgacagctttagggttggtgactgtgtgataattgaaaatcctctgatccaaagaaaggaaatagaaagagaagaaaaattcagccctgcaactcctagcaactgtaaactgttgctcagtgagaatcactcaacagtaaaagtttgttccagttatgaagtggacacaaagttactttctttgatacatttacctgttaaagagtctcatgattattattcactgggtgacattgttgcaaatggacacagtcttaatgggaggattattaacgtgcttgcagctgtgaaatcggttggagagccaaaatactttacaacttcagaccggagaaaaggccagaggtgtgaagttagactctatgatgaaacagagtcgtcttttgcgatgacatgttgggataatgaatccattctacttgcacagagctggatgccacgagaaacagtaatatttgcctcagatgtaagaataaattttgacaaatttcggaactgcatgacagcaactgtaatctcaaaaaccattattacaactaatccagaagctaacattctgctgaattttatacgagaaaataaagaaacgaatgttctggatgatgaaattgacagttatttcaaagaatccataaatttaagtacaatagttgatgtctacacagttgaacaattaaagggaaaagctttgaagaatgaaggaaaagctgatccttcctatggcatcctttatgcctacatttccacactcaacattgatgatgaaactacaaaagtagttcgaaatagatgttccagctgtggttatattgtaaatgaagcatctaacatgtgcacaacttgcaacaaaaactccttggactttaaatctgtctttctcagtttccatgtgctgattgatctgactgatcacacaggcacccttcattcctgtagtctcacaggaagtgttgctgaggagactttgggctggtacatgagtttcttgcaatgacagatgaacagaaaacagcattaaagtggcaatttctcttggaaagaagcaaaatttatttaaaagttagtgcattttatagtcccatattattctatatatttattattctgtatattcaaaccataagaaaaacctagataaattcgagaatttattatttctaatgcccagttcccagatgtgcataaggattcagctatcctaaaagcaaaggaaatagccaggggttttttcatattgtataaaggagttaccaaagacatcaaagaaaatagaccaacaaagaaaatatcctttaaggttaaatccaaaacaggggaaagggctttaaaatcagagctgatgggtgcaatagtacacacctgtaatcccagctacttggtaggctgaggtgggaggatcacctgaacccaggagtttgaggccagcctgggcaacatagtgagacccct

SEQ ID NO: 278800 - DNA, 883 bp, Homo sapiens
cacttagcgatttagcgtgaataataagaaagcatgttcgacatatgagaattccagaatctggagaaactcaacatcaagacaatctggctagtctacacagtagaacaatcaaagtaagagttgtaaagaataaaggaaaaacggagcattctaatggaatccatatgcctacattccgccatcaccatgatgatcaagcctacaggagtagcttcaaatagattccagctgtggttatattgtaaatgaagcatctaacatgtgcacaacttgcaacaaaaactccttggactttaaatctgtctttctcagtttccatgtgctgattgatctgactgatcacacaggcacccttcattcctgtagtctcacaggaagtgttgctgaggagactttgggctggtacatgagtttcttgcaatgacagatgaacagaaaacagcattaaagtggcaatttctcttggaaagaagcaaaatttatttaaaattcgttctatcacacagagcaaggagtggattgaaaattagtgtactctcgtgcaagcttgcagatcctactgaggcaagcagaaacttgtctggacaaaaacatgtttaaaacggtctatcattttgaactctggaaaagtataagagttttaactccctttaaaatggaatattaatttgaaaattatggggaaaattgcattttgtttacatgtggtgaacatgtttctagaaattgttatggtggaggtggtctgggtgagtctgaaggcctctctcatctgacctcccttcttagaaggcctcctactgtctttgccttgtctcctcccaagttggaaaatgtttacatgaattaataaacagatttaatcttctaaaaaaaaaaa

SEQ ID NO: 278801 - DNA, 3544 bp, Homo sapiens
agcgggcggggccgtcgcacctgcacgaggctgtggcccgagcgtcctgtggagaagccgcgaagcgcgggcgacccgggggtcgggcgggccaggtccgcgaggccgcggcggcagctgtgcaggcccggggagcagccggccgggcgagcctcggatattggatcagaaaggtacactttcagcttcaccattcgggattcaccagcacattttgtaaatgcagcttcctggggcaatgaagattacatcaagtctctttctgacagctttagggttggtgactgtgtgataattgaaaatcctctgatccaaagaaaggaaatagaaagagaagaaaaattcagccctgcaactcctagcaactgtaaactgttgctcagtgagaatcactcaacagtaaaagtttgttccagttatgaagtggacacaaagttactttctttgatacatttacctgttaaagagtctcatgattattattcactgggtgacattgttgcaaatggacacagtcttaatgggaggattattaacgtgcttgcagctgtgaaatcggttggagagccaaaatactttacaacttcagaccggagaaaaggccagaggtgtgaagttagactctatgatgaaacagagtcgtcttttgcgatgacatgttgggataatgaatccattctacttgcacagagctggatgccacgagaaacagtaatatttgcctcagatgtaagaataaattttgacaaatttcggaactgcatgacagcaactgtaatctcaaaaaccattattacaactaatccagaagctaacattctgctgaattttatacgagaaaataaagaaacgaatgttctggatgatgaaattgacagttatttcaaagaatccataaatttaagtacaatagttgatgtctacacagttgaacaattaaagggaaaagctttgaagaatgaaggaaaagctgatccttcctatggcatcctttatgcctacatttccacactcaacattgatgatgaaactacaaaagtagttcgaaatagatgttccagctgtggttatattgtaaatgaagcatctaacatgtgcacaacttgcaacaaaaactccttggactttaaatctgtctttctcagtttccatgtgctgattgatctgactgatcacacaggcacccttcattcctgtagtctcacaggaagtgttgctgaggagactttgggctgctgtaacctcagaaacgggaagctgagggaggattgcttgaccccgggagttcgaggctgcagtgagctgtgatagcactgctgcactccagcttgggcgacagagtgagaccctgtctcagcccgtgtatgccagcctcgatctcatcgttttctttaaccggtccaactccctttggcgtcccagtcaagataatatctccttcttccaaggttatgatcttagaaacatagctgatgatgtaggggatggaaaaaatcatggaggatgtctcaccctcctgtctgagttcgccgttgaccttgagccagagcttcagcttgtgagggtcagggatcttctccttgggcacgaacgcgctgaccgggcaggacgccgtgaagctcttcgccagagtccagggcagccccttcttcttgcactcgtcctgcacgtcccgggcggtcatatccaggcacagggcatagccgcccacgtagtccatggccgcagcctcggggactgcgcggcagcgcttgcccatcaccacgcccagctccagctcgtggtgcaggttgcgagtgtacgcgggcatgaggatgggcgagccctcgggcgcgtaggccgtggacggcttcaggaacagcacgggctcgctcaacaccgcgctgcgcatctccctgacgtggtccgcgtagttcctccccacgcagacgatgttctttccccactcccagaagcgggacaatggcctggatgctgccatgattcccatcaagtgcccctgtagtcacgtgggctgggccggtcagctgatgcctacggcatcccggagaggaccaactgcctcggaacgctgtcccccgcagcgacggcccgttccacctcgcgatctgccgggtacccgggcggcgtggcgctcggcctccagggatccactgtgcggtgccaaaaaagaggcggaggctcgcggcacagctctcccggcgcagctctcgggccgccgccgccgccgctcccaggcccgtctcccggcccgtggcagtcggggctcgcggagaaaacaagttgagcgcgagcgcgttgattggttggcggacggtgcgaggtggacgctgattggctgagggcagcgcgaggcgggcgctgattggctgcgacgcgccgacgccggtgttttgcagtcctgggcagctcggcagtccagcccggcccgggtcatggtggtgggccgagggctgctcggccgccgcagcctcgccgcgctgggagccgcctgcgcccgccgaggcctcggtgcctaaggccgcgctgccgggctcgagcggaggcggcgcaggcgctgaggctggcgcggagcgggcgcggggccgcgggtgcggaaagcgctaggtccagccctgctgggagttttctgccacacagatttgcggaagaacctgaccgtggacgagggcaccatgaaggtagaggtgctgcctgccctgaccgacaactacatgtacctggtcattgatgatgagaccaaggaggctgccattgtggatccggtgcagccccagaaggtcgtggacgcggcgagaaagcacggggtgaaactgaccacagtgctcaccacccaccaccactgggaccatgctggcgggaatgagaaactggtcaagctggagtcgggactgaaggtgtacgggggtgacgaccgtatcggggccctgactcacaagatcactcacctgtccacactgcaggtgacaccttgtttgtggctggctgcgggaagttctatgaagggactgcggatgagatgtgtaaagctctgctggaggtcttgggccggctccccccggacacaagagtctactgtggccacgagtacaccatcaacaacctcaagtttgcacgccacgtggagcccggcaatgccgccatccgggagaagctggcctgggccaaggagaagtacagcatcggggagcccacagtgccatccaccctggcagaggagtttacctacaaccccttcatgagagtgagggagaagacggtgcagcagcacgcaggtgagacggacccggtgaccaccatgcgggccgtgcgcagggagaaggaccagttcaagatgccccgggactgaggccgccctgcaccttcagcggatttggggattaggctcttttaggtaactggctttcctgctggtccgtgcgggaaattcagtcttgatttaaccttaattttacagcccttggcttgtgttatcggacgttttaatgcatatttataagagaagtttaacaagtatttattcccataaaaaaacttccccttg

SEQ ID NO: 278802 - DNA, 1318 bp, Homo sapiens
agcggatgcgggctctgtgcacgcggtcgggagctccagcctgcgccagcgtcgatgtctgcctggcgcggcaggtgctgctcgctccgactctacctcgcggccgcttcaaggcgcctgcgcttgcttaagcctcagtaccctagggtgggccgtcctggtgtcgagctgagggcgcgcaggctctgacgtggttgcgcgagacgtgggtctgttgacaaggcgcgtagtgtgtccattcacgtgtggtcgacctgtggctggcagcaggagcagatttgcggaagaacctgaccgtggacgagggcaccatgaaggtagaggtgctgcctgccctgaccgacaactacatgtacctggtcattgatgatgagaccaaggaggctgccattgtggatccggtgcagccccagaaggtcgtggacgcggcgagaaagcacggggtgaaactgaccacagtgctcaccacccaccaccactgggaccatgctggcgggaatgagaaactggtcaagctggagtcgggactgaaggtgtacgggggtgacgaccgtatcggggccctgactcacaagatcactcacctgtccacactgcaggtggggtctctgaacgtcaagtgcctggcgaccccgtgccacacttcaggacacatttgttacttcgtgagcaagcccggaggctcggagccccctgccgtgttcacagacaccttgtttgtggctggctgcgggaaaaaaaggggtttttttttctctttcaaatttgaaaaaagggggggactgcggatgagatgtgtaaagctctgctggaggtcttgggccggctccccccggacacaagagtctactgtggccacgagtacaccatcaacaacctcaagtttgcacgccacgtggagcccggcaatgccgccatccgggagaagctggcctgggccaaggagaagtacagcatcggggagcccacagtgccatccaccctggcagaggagtttacctacaaccccttcatgagagtgagggagaagacggtgcagcagcacgcaggtgagacggacccggtgaccaccatgcgggccgtgcgcagggagaaggaccagttcaagatgccccgggactgaggccgccctgcaccttcagcggatttggggattaggctcttttaggtaactggctttcctgctggtccgtgcgggaaattcagtcttgatttaaccttaattttacagcccttggcttgtgttatcggacgttttaatgcatatttataagagaagtttaacaagtatttattcccataaaaaaacttccccttg

SEQ ID NO: 278803 - DNA, 3386 bp, Homo sapiens
agcgggcggggccgtcgcacctgcacgaggctgtggcccgagcgtcctgtggagaagccgcgaagcgcgggcgacccgggggtcgggcgggccaggtccgcgaggccgcggcggcagctgtgcaggcccggggagcagccggccgggcgagcctcggatattggatcagaaaggtacactttcagcttcaccattcgggattcaccagcacattttgtaaatgcagcttcctggggcaatgaagattacatcaagtctctttctgacagctttagggttggtgactgtgtgataattgaaaatcctctgatccaaagaaaggaaatagaaagagaagaaaaattcagccctgcaactcctagcaactgtaaactgttgctcagtgagaatcactcaacagtaaaagtttgttccagttatgaagtggacacaaagttactttctttgatacatttacctgttaaagagtctcatgattattattcactgggtgacattgttgcaaatggacacagtcttaatgggaggattattaacgtgcttgcagctgtgaaatcggttggagagccaaaatactttacaacttcagaccggagaaaaggccagaggtgtgaagttagactctatgatgaaacagagtcgtcttttgcgatgacatgttgggataatgaatccattctacttgcacagagctggatgccacgagaaacagtaatatttgcctcagatgtaagaataaattttgacaaatttcggaactgcatgacagcaactgtaatctcaaaaaccattattacaactaatccagaagctaacattctgctgaattttatacgagaaaataaagaaacgaatgttctggatgatgaaattgacagttatttcaaagaatccataaatttaagtacaatagttgatgtctacacagttgaacaattaaagggaaaagctttgaagaatgaaggaaaagctgatccttcctatggcatcctttatgcctacatttccacactcaacattgatgatgaaactacaaaagtagttcgaaatagatgttccagctgtggttatattgtaaatgaagcatctaacatgtgcacaacttgcaacaaaaactccttggactttaaatctgtctttctcagtttccatgtgctgattgatctgactgatcacacaggcacccttcattcctgtagtctcacaggaagtgttgctgaggagactttgggctgctgtaacctcagaaacgggaagctgagggaggattgcttgaccccgggagttcgaggctgcagtgagctgtgatagcactgctgcactccagcttgggcgacagagtgagaccctgtctcagcccgtgtatgccagcctcgatctcatcgttttctttaaccggtccaactccctttggcgtcccagtcaagataatatctccttcttccaaggttatgatcttagaaacatagctgatgatgtaggggatggaaaaaatcatggaggatgtctcaccctcctgtctgagttcgccgttgaccttgagccagagcttcagcttgtgagggtcagggatcttctccttgggcacgaacgcgctgaccgggcaggacgccgtgaagctcttcgccagagtccagggcagccccttcttcttgcactcgtcctgcacgtcccgggcggtcatatccaggcacagggcatagccgcccacgtagtccatggccgcagcctcggggactgcgcggcagcgcttgcccatcaccacgcccagctccagctcgtggtgcaggttgcgagtgtacgcgggcatgaggatgggcgagccctcgggcgcgtaggccgtggacggcttcaggaacagcacgggctcgctcaacaccgcgctgcgcatctccctgacgtggtccgcgtagttcctccccacgcagacgatgttctttccccactcccagaagcgggacaatggcctggatgctgccatgattcccatcaagtgcccctgtagtcacgtgggctgggccggtcagctgatgcctacggcatcccggagaggaccaactgcctcggaacgctgtcccccgcagcgacggcccgttccacctcgcgatctgccgggtacccgggcggcgtggcgctcggcctccagggatccactgtgcggtgccaaaaaagaggcggaggctcgcggcacagctctcccggcgcagctctcgggccgccgccgccgccgctcccaggcccgtctcccggcccgtggcagtcggggctcgcggagaaaacaagttgagcgcgagcgcgttgattggttggcggacggtgcgaggtggacgctgattggctgagggcagcgcgaggcgggcgctgattggctgcgacgcgccgacgccggtgttttgcagtcctgggcagctcggcagtccagcccggcccgggtcatggtggtgggccgagggctgctcggccgccgcagcctcgccgcgctgggagccgcctgcgcccgccgaggcctcggtccagccctgctgggagttttctgccacacagatttgcggaagaacctgaccgtggacgagggcaccatgaaggtagaggtgctgcctgccctgaccgacaactacatgtacctggtcattgatgatgagaccaaggaggctgccattgtggatccggtgcagccccagaaggtcgtggacgcggcgagaaagcacggggtgaaactgaccacagtgctcaccacccaccaccactggtaagtgccgcgtctcacctgggggtgtgggacctggctcacttctcgccccggtgggtttagggacatcaaggcctgtctccccccacggctctgtctgctttgtgaggacaagcccccagcagacttctgagaaagactcgggactcaccgtagcccccaaggggcaagtctggtgctcagtgactctgaggccccgagggtgaggggagaaggttacagccttaccctcaggccccaccccccggctctctcctgggccatgcgggtttgtgccctggcacgttggcctcaatgttggggaggaaatgagtctacaggtgagtggtttttaaaaaaaaaaaacaaacaaaaaaaaaaaaaaacaagcagccagccgggcacggtggctcatgcctataatcccagcactttgggaggctgaggtagttgggtcacttgaggtcaggaccagcctggccaacacggtgaaacccagtctctaccgaaaatacaaaaattaactgggcgtggtggtgggcgcctgtaatctcagctactcgggaggctgaagcaggagaatcacttgaacccgggaggcggaggttgccgtgagccaagatcgtggcattgcactccagcctgggtgacagagcga

SEQ ID NO: 278804 - DNA, 1713 bp, Homo sapiens
agcgggcggggccgtcgcacctgcacgaggctgtggcccgagcgtcctgtggagaagccgcgaagcgcgggcgacccgggggtcgggcgggccaggtccgcgaggccgcggcggcagctgtgcaggcccggggagcagccggccgggcgagcctcggatattggatcagaaaggtacactttcagcttcaccattcgggattcaccagcacattttgtaaatgcagcttcctggggcaatgaagattacatcaagtctctttctgacagctttagggttggtgactgtgtgataattgaaaatcctctgatccaaagaaaggaaatagaaagagaagaaaaattcagccctgcaactcctagcaactgtaaactgttgctcagtgagaatcactcaacagtaaaagtttgttccagttatgaagtggacacaaagttactttctttgatacatttacctgttaaagagtctcatgattattattcactgggtgacattgttgcaaatggacacagtcttaatgggaggattattaacgtgcttgcagctgtgaaatcggttggagagccaaaatactttacaacttcagaccggagaaaaggccagaggtgtgaagttagactctatgatgaaacagagtcgtcttttgcgatgacatgttgggataatgaatccattctacttgcacagagctggatgccacgagaaacagtaatatttgcctcagatgtaagaataaattttgacaaatttcggaactgcatgacagcaactgtaatctcaaaaaccattattacaactaatccagaagctaacattctgctgaattttatacgagaaaataaagaaacgaatgttctggatgatgaaattgacagttatttcaaagaatccataaatttaagtacaatagttgatgtctacacagttgaacaattaaagggaaaagctttgaagaatgaaggaaaagctgatccttcctatggcatcctttatgcctacatttccacactcaacattgatgatgaaactacaaaagtagttcgaaatagatgttccagctgtggttatattgtaaatgaagcatctaacatgtgcacaacttgcaacaaaaactccttggactttaaatctgtctttctcagtttccatgtgctgattgatctgactgatcacacaggcacccttcattcctgtagtctcacaggaagtgttgctgaggagactttgggctggtacatgagtttcttgcaatgacagatgaacagaaaacagcattaaagtggcaatttctcttggaaagaagcaaaatttatttaaaattcgttctatcacacagagcaaggagtggattgaaaattagtgtactctcgtgcaagcttgcagatcctactgaggcaagcagaaacttgtctggacaaaaacatgtttaaaacggtctatcattttgaactctggaaaagtataagagttttaactccctttaaaatggaatattaatttgaaaattatggggaaaattgcattttgtttacatgtggtgaacatgtttctagaaattgttatggtggaggtggtctgggtgagtctgaaggcctctctcatctgacctcccttcttagaaggcctcctactgtctttgccttgtctcctcccaagttggaaaatgtttacatgaattaataaacagatttaatcttctaaaaaaaaaaa

SEQ ID NO: 278805 - DNA, 3659 bp, Homo sapiens
atttccttctagaagccaggagcaaaggacagacctctccctggtataaggaggaagagattgagaagaggaattctccagagtctattaactatactacatcaacgcctccaagatactatggtacccatcccaggggaagtggggctacaagaacagtataaatatctcctattggcataataaatggtgtaccccaagaatatgccaagggatgttttgtagagattttgagactaaggagatttggaaattgtgtggctattagcagtttcattcataatgaaatttataatcccttaaaaaacttggaggaagataattgcaggaagaacaccttgaataagcagaactcagctgtgagatcaggagcaagaggagcacattggaagaatttcgaaaaagggcaccttttctaatttttaatacttggctgggttaatctaaaactatgtcagaagaagtggcatgataacaagatcctgagactcaagagaaaagggagattgagtgggaatgcctctagttcccacggctcctcctgtgaacagcacagctacacggcccggctgattcattcagagggcgggactcaccaggccctacgtggagaaatgccattggcccatagtttatctttcactttcctgccctgagcgtgagcaagaatttcctgcggttcctctaggaaaattcctttgtgcagatcaggcccgtggattggtgagtgaatcctaaccacgtcttccctggcctgtcttcactcttctccccagaatcaccacttctgcactggtgtctgaaggtgtattgagtgattttgtggagggcagaagtaggaagtctttgggacaaaactgtatttaccttgggatctgtgaacaagaggaacctcagcagccaggacaggcaggagcagtggaatagctactatggcttctggaatcctggttaatgtaaaggaggaggtgacctgccccatctgcctggaactcctgacacaacccctgagcctggactgcggccacagcttctgccaagcatgcctcactgcaaaccacaagaagtccatgctagacaaaggagagagtagctgccctgtgtgccggatcagttaccagcctgagaacatacggcctaatcggcatgtagccaacatagtggagaagctcagggaggtcaagttgagcccagaggggcagaaagttgatcattgtgcacgccatggagagaaacttctactcttctgtcaggaggacgggaaggtcatttgctggctttgtgagcggtctcaggagcaccgtggtcaccacacgttcctcacagaggaggttgcccgggagtaccaagtgaagctccaggcagctctggagatgctgaggcagaagcagcaggaagctgaagagttggaagctgacatcagagaagagaaagcttcctggaagactcaaatacagtatgacaaaaccaacgtcttggcagattttgagcaactgagagacatcctggactgggaggagagcaatgagctgcaaaacctggagaaggaggaggaagacattctgaaaagccttacgaactctgaaactgagatggtgcagcagacccagtccctgagagagctcatctcagatctggagcatcggctgcaggggtcagtgatggagctgcttcaggtgtggatggcgtcataaaaaggacggagaacgtgaccttgaagaagccagaaacttttccaaaaaatcaaaggagagtgtttcgagctcctgatctgaaaggaatgctagaagtgtttagagagctgacagatgtccgacgctactgggttgatgtgacagtggctccaaacaacatttcatgtgctgtcatttctgaagataagagacaagtgagctctccgaaaccacagataatatatggggcacgagggacaagataccagacatttgtgaatttcaattattgtactggcatcctgggctctcaaagtatcacatcagggaaacattactgggaggtagacgtgtccaagaaaactgcttggatcctgggggtatgtgctggcttccaacctgatgcaatgtgtaatattgaaaaaaatgaaaattatcaacctaaatacggctactgggttatagggttagaggaaggagttaaatgtagtgctttccaggatagttccttccatactccttctgttcctttcattgtgcccctctctgtgattatttgtcctgatcgtgttggagttttcctagactatgaggcttgcactgtctcattcttcaatatcacaaaccatggatttctcatctataagttttctcactgttctttttctcagcctgtatttccatatttaaatcctagaaaatgtggagtccccatgactctgtgctcaccaagctcttgaaccttcttacacactcagccccttctgtacagcacctcttgtccaggtgcatctcatacacctgaactcatttgcatcattttaaccatcttttccttgctgtctcccttctttctatttgaacgtccttcactcatcagtaaaatgtaataattgccttgtgccatattgtccccaatattttattgacatttgatagcaatttttttcatcattttccgtactcctaaggaaaactgacctatacctcataaaatgagaccgctatttaggtattacttctgccagatatttatcacccaattgcctctgacactgactaagaagatgaagaaaagcttttcaacagcctttctatatcatcgtgtgataattgttcaccaatgaatgagtccttagccctgtgtcagtttaccctcgatgcccttatttgtgagttaaagagaaaatatcataaatggtatactcttaagtatagaggttttgtatctagaggatctcagttcaactcctgtctctccatataccagcagtgtaactgtgaataacatacttaaatggctgtgcttatttccttttcttttcttttttctttttttttttttttgagatgaagttttgctcttgttccccaggctggagtgcaatggcacgatctcggttcactgcaacctccacctctcagattcaagcaattctcctgcctcagcctcccaagtagctgggattacaggtgcccaccaccacccctggctaaatttgtattttcagtagagacggggtttccccatgttggttaggctcgtctagaacctctgacctcaggtgatccacccgcctcggcctcccaaagtgctgggattacaggcgtgagccacggcgcccagcctgtgcttattttcttaaaataatttttgtattaaaaacttcacattaaataagtgctaatgttttattgcatagtagggtgactagagttaacaataacctattgcatatattttgaaatagctagaagagaggattttgaaagttctcaacacaaagaaatgacacatatttgaggtgatggatatgctaattaccctggttcggttattacgcaatgtatacatgtatcaaaacatcacactgtaccacataaatatgtatatttattatttgtcaattaaaagcaaaataaaacaaaaaaccttcatctaatactttggatcattgtgaaaaaataaattcctgaagtataaag

SEQ ID NO: 278806 - DNA, 3637 bp, Homo sapiens
atttccttctagaagccaggagcaaaggacagacctctccctggtataaggaggaagagattgagaagaggaattctccagagtctattaactatactacatcaacgcctccaagatactatggtacccatcccaggggaagtggggctacaagaacagtataaatatctcctattggcataataaatggtgtaccccaagaatatgccaagggatgttttgtagagattttgagactaaggagatttggaaattgtgtggctattagcagtttcattcataatgaaatttataatcccttaaaaaacttggaggaagataattgcaggaagaacaccttgaataagcagaactcagctgtgagatcaggagcaagaggagcacattggaagaatttcgaaaaagggcaccttttctaatttttaatacttggctgggttaatctaaaactatgtcagaagaagtggcatgataacaagatcctgagactcaagagaaaagggagattgagtgggaatgcctctagttcccacggctcctcctgtgaacagcacagctacacggcccggctgattcattcagagggcgggactcaccaggccctacgtggagaaatgccattggcccatagtttatctttcactttcctgccctgagcgtgagcaagaatttcctgcggttcctctaggaaaattcctttgtgcagatcaggcccgtggattggtgagtgaatcctaaccacgtcttccctggcctgtcttcactcttctccccagaatcaccacttctgcactggtgtctgaaggtgtattgagtgattttgtggagggcagaagtaggaagtctttgggacaaaactgtatttaccttgggatctgtgaacaagaggaacctcagcagccaggacaggcaggagcagtggaatagctactatggcttctggaatcctggttaatgtaaaggaggaggtgacctgccccatctgcctggaactcctgacacaacccctgagcctggactgcggccacagcttctgccaagcatgcctcactgcaaaccacaagaagtccatgctagacaaaggagagagtagctgccctgtgtgccggatcagttaccagcctgagaacatacggcctaatcggcatgtagccaacatagtggagaagctcagggaggtcaagttgagcccagaggggcagaaagttgatcattgtgcacgccatggagagaaacttctactcttctgtcaggaggacgggaaggtcatttgctggctttgtgagcggtctcaggagcaccgtggtcaccacacgttcctcacagaggaggttgcccgggagtaccaagtgaagctccaggcagctctggagatgctgaggcagaagcagcaggaagctgaagagttggaagctgacatcagagaagagaaagcttcctggaagactcaaatacagtatgacaaaaccaacgtcttggcagattttgagcaactgagagacatcctggactgggaggagagcaatgagctgcaaaacctggagaaggaggaggaagacattctgaaaagccttacgaactctgaaactgagatggtgcagcagacccagtccctgagagagctcatctcagatctggagcatcggctgcaggggtcagtgatggagctgcttcaggacggagaacgtgaccttgaagaagccagaaacttttccaaaaaatcaaaggagagtgtttcgagctcctgatctgaaaggaatgctagaagtgtttagagagctgacagatgtccgacgctactgggttgatgtgacagtggctccaaacaacatttcatgtgctgtcatttctgaagataagagacaagtgagctctccgaaaccacagataatatatggggcacgagggacaagataccagacatttgtgaatttcaattattgtactggcatcctgggctctcaaagtatcacatcagggaaacattactgggaggtagacgtgtccaagaaaactgcttggatcctgggggtatgtgctggcttccaacctgatgcaatgtgtaatattgaaaaaaatgaaaattatcaacctaaatacggctactgggttatagggttagaggaaggagttaaatgtagtgctttccaggatagttccttccatactccttctgttcctttcattgtgcccctctctgtgattatttgtcctgatcgtgttggagttttcctagactatgaggcttgcactgtctcattcttcaatatcacaaaccatggatttctcatctataagttttctcactgttctttttctcagcctgtatttccatatttaaatcctagaaaatgtggagtccccatgactctgtgctcaccaagctcttgaaccttcttacacactcagccccttctgtacagcacctcttgtccaggtgcatctcatacacctgaactcatttgcatcattttaaccatcttttccttgctgtctcccttctttctatttgaacgtccttcactcatcagtaaaatgtaataattgccttgtgccatattgtccccaatattttattgacatttgatagcaatttttttcatcattttccgtactcctaaggaaaactgacctatacctcataaaatgagaccgctatttaggtattacttctgccagatatttatcacccaattgcctctgacactgactaagaagatgaagaaaagcttttcaacagcctttctatatcatcgtgtgataattgttcaccaatgaatgagtccttagccctgtgtcagtttaccctcgatgcccttatttgtgagttaaagagaaaatatcataaatggtatactcttaagtatagaggttttgtatctagaggatctcagttcaactcctgtctctccatataccagcagtgtaactgtgaataacatacttaaatggctgtgcttatttccttttcttttcttttttctttttttttttttttgagatgaagttttgctcttgttccccaggctggagtgcaatggcacgatctcggttcactgcaacctccacctctcagattcaagcaattctcctgcctcagcctcccaagtagctgggattacaggtgcccaccaccacccctggctaaatttgtattttcagtagagacggggtttccccatgttggttaggctcgtctagaacctctgacctcaggtgatccacccgcctcggcctcccaaagtgctgggattacaggcgtgagccacggcgcccagcctgtgcttattttcttaaaataatttttgtattaaaaacttcacattaaataagtgctaatgttttattgcatagtagggtgactagagttaacaataacctattgcatatattttgaaatagctagaagagaggattttgaaagttctcaacacaaagaaatgacacatatttgaggtgatggatatgctaattaccctggttcggttattacgcaatgtatacatgtatcaaaacatcacactgtaccacataaatatgtatatttattatttgtcaattaaaagcaaaataaaacaaaaaaccttcatctaatactttggatcattgtgaaaaaataaattcctgaagtataaag

SEQ ID NO: 278807 - DNA, 2437 bp, Homo sapiens
atttccttctagaagccaggagcaaaggacagacctctccctggtataaggaggaagagattgagaagaggaattctccagagtctattaactatactacatcaacgcctccaagatactatggtacccatcccaggggaagtggggctacaagaacagtataaatatctcctattggcataataaatggtgtaccccaagaatatgccaagggatgttttgtagagattttgagactaaggagatttggaaattgtgtggctattagcagtttcattcataatgaaatttataatcccttaaaaaacttggaggaagataattgcaggaagaacaccttgaataagcagaactcagctgtgagatcaggagcaagaggagcacattggaagaatttcgaaaaagggcaccttttctaatttttaatacttggctgggttaatctaaaactatgtcagaagaagtggcatgataacaagatcctgagactcaagagaaaagggagattgagtgggaatgcctctagttcccacggctcctcctgtgaacagcacagctacacggcccggctgattcattcagagggcgggactcaccaggccctacgtggagaaatgccattggcccatagtttatctttcactttcctgccctgagcgtgagcaagaatttcctgcggttcctctaggaaaattcctttgtgcagatcaggcccgtggattggtgagtgaatcctaaccacgtcttccctggcctgtcttcactcttctccccagaatcaccacttctgcactggtgtctgaaggtgtattgagtgattttgtggagggcagaagtaggaagtctttgggacaaaactgtatttaccttgggatctgtgaacaagaggaacctcagcagccaggacaggcaggagcagtggaatagctactatggcttctggaatcctggttaatgtaaaggaggaggtgacctgccccatctgcctggaactcctgacacaacccctgagcctggactgcggccacagcttctgccaagcatgcctcactgcaaaccacaagaagtccatgctagacaaaggagagagtagctgccctgtgtgccggatcagttaccagcctgagaacatacggcctaatcggcatgtagccaacatagtggagaagctcagggaggtcaagttgagcccagaggggcagaaagttgatcattgtgcacgccatggagagaaacttctactcttctgtcaggaggacgggaaggtcatttgctggctttgtgagcggtctcaggagcaccgtggtcaccacacgttcctcacagaggaggttgcccgggagtaccaagtgaagctccaggcagctctggagatgctgaggcagaagcagcaggaagctgaagagttggaagctgacatcagagaagagaaagcttcctggaagactcaaatacagtatgacaaaaccaacgtcttggcagattttgagcaactgagagacatcctggactgggaggagagcaatgagctgcaaaacctggagaaggaggaggaagacattctgaaaagccttacgaactctgaaactgagatggtgcagcagacccagtccctgagagagctcatctcagatctggagcatcggctgcaggggtcagtgatggagctgcttcaggtgtggatggcgtcataaaaaggacggagaacgtgaccttgaagaagccagaaacttttccaaaaaatcaaaggagagtgtttcgagctcctgatctgaaaggaatgctagaagtgtttagagagctgacagatgtccgacgctactggggctggagtgcaatggcacgatctcggttcactgcaacctccacctctcagattcaagcaattctcctgcctcagcctcccaagtagctgggattacaggtgcccaccaccacccctggctaaatttgtattttcagtagagacggggtttccccatgttggttaggctcgtctagaacctctgacctcaggtgatccacccgcctcggcctcccaaagtgctgggattacaggcgtgagccacggcgcccagcctgtgcttattttcttaaaataatttttgtattaaaaacttcacattaaataagtgctaatgttttattgcatagtagggtgactagagttaacaataacctattgcatatattttgaaatagctagaagagaggattttgaaagttctcaacacaaagaaatgacacatatttgaggtgatggatatgctaattaccctggttcggttattacgcaatgtatacatgtatcaaaacatcacactgtaccacataaatatgtatatttattatttgtcaattaaaagcaaaataaaacaaaaaaccttcatctaatactttggatcattgtgaaaaaataaattcctgaagtataaag

SEQ ID NO: 278808 - DNA, 3141 bp, Homo sapiens
atttccttctagaagccaggagcaaaggacagacctctccctggtataaggaggaagagattgagaagaggaattctccagagtctattaactatactacatcaacgcctccaagatactatggtacccatcccaggggaagtggggctacaagaacagtataaatatctcctattggcataataaatggtgtaccccaagaatatgccaagggatgttttgtagagattttgagactaaggagatttggaaattgtgtggctattagcagtttcattcataatgaaatttataatcccttaaaaaacttggaggaagataattgcaggaagaacaccttgaataagcagaactcagctgtgagatcaggagcaagaggagcacattggaagaatttcgaaaaagggcaccttttctaatttttaatacttggctgggttaatctaaaactatgtcagaagaagtggcatgataacaagatcctgagactcaagagaaaagggagattgagtgggaatgcctctagttcccacggctcctcctgtgaacagcacagctacacggcccggctgattcattcagagggcgggactcaccaggccctacgtggagaaatgccattggcccatagtttatctttcactttcctgccctgagcgtgagcaagaatttcctgcggttcctctaggaaaattcctttgtgcagatcaggcccgtggattggtgagtgaatcctaaccacgtcttccctggcctgtcttcactcttctccccagaatcaccacttctgcactggtgtctgaaggtgtattgagtgattttgtggagggcagaagtaggaagtctttgggacaaaactgtatttaccttgggatctgtgaacaagaggaacctcagcagccaggacaggcaggagcagtggaatagctactatggcttctggaatcctggttaatgtaaaggaggaggtgacctgccccatctgcctggaactcctgacacaacccctgagcctggactgcggccacagcttctgccaagcatgcctcactgcaaaccacaagaagtccatgctagacaaaggagagagtagctgccctgtgtgccggatcagttaccagcctgagaacatacggcctaatcggcatgtagccaacatagtggagaagctcagggaggtcaagttgagcccagaggggcagaaagttgatcattgtgcacgccatggagagaaacttctactcttctgtcaggaggacgggaaggtcatttgctggctttgtgagcggtctcaggagcaccgtggtcaccacacgttcctcacagaggaggttgcccgggagtaccaagtgaagctccaggcagctctggagatgctgaggcagaagcagcaggaagctgaagagttggaagctgacatcagagaagagaaagcttcctggaagactcaaatacagtatgacaaaaccaacgtcttggcagattttgagcaactgagagacatcctggactgggaggagagcaatgagctgcaaaacctggagaaggaggaggaagacattctgaaaagccttacgaactcatacacctgaactcatttgcatcattttaaccatcttttccttgctgtctcccttctttctatttgaacgtccttcactcatcagtaaaatgtaataattgccttgtgccatattgtccccaatattttattgacatttgatagcaatttttttcatcattttccgtactcctaaggaaaactgacctatacctcataaaatgagaccgctatttaggtattacttctgccagatatttatcacccaattgcctctgacactgactaagaagatgaagaaaagcttttcaacagcctttctatatcatcgtgtgataattgttcaccaatgaatgagtccttagccctgtgtcagtttaccctcgatgcccttatttgtgagttaaagagaaaatatcataaatggtatactcttaagtatagaggttttgtatctagaggatctcagttcaactcctgtctctccatataccagcagtgtaactgtgaataacatacttaaatggctgtgcttatttccttttcttttcttttttctttttttttttttttgagatgaagttttgctcttgttccccaggctggagtgcaatggcacgatctcggttcactgcaacctccacctctcagattcaagcaattctcctgcctcagcctcccaagtagctgggattacaggtgcccaccaccacccctggctaaatttgtattttcagtagagacggggtttccccatgttggttaggctcgtctagaacctctgacctcaggtgatccacccgcctcggcctcccaaagtgctgggattacaggcgtgagccacggcgcccagcctgtgcttattttcttaaaataatttttgtattaaaaacttcacattaaataagtgctaatgttttattgcatagtagggtgactagagttaacaataacctattgcatatattttgaaatagctagaagagaggattttgaaagttctcaacacaaagaaatgacacatatttgaggtgatggatatgctaattaccctggttcggttattacgcaatgtatacatgtatcaaaacatcacactgtaccacataaatatgtatatttattatttgtcaattaaaagcaaaataaaacaaaaaaccttcatctaatactttggatcattgtgaaaaaataaattcctgaagtataaagcatctatctaagtgtctcgatctaataagtacttgttctacaaattattgaaaaacataaactctgttaatgtctcatggaacaggttgtgccttcagggaaactaggattggatttactaaattctcattttttagatctcagatactactgtcaaaatgacttcaattctgccttctatatataatacacacatatatttaggattttattgtaattctagtgttgctacatattagtctttatcaaacaaactgaattatgtgggaatcagtttattaattgtaaaaaataattataataaaattagctgatgtagttttttaaaagttaaatgagttttttgaatagcttcactcatttctagc

SEQ ID NO: 278809 - DNA, 709 bp, Homo sapiens
ctccgttctgctggaacacaaacgcgcttctcagtttctctggaggaacttggttggcgaagagcttggcgcttcttgtaaaccttgtcccgctggacaaagacttgtgaaggaacacggagtgccaccaggactccgtggccctccccgcctctctctcctttttcccttcatggcggtgaagctgtggacgcttctcttcaggaggtgagctccagatgagacgccacatcccagcggagtcccggaagggtcaccccgcaggtctaaggcccgcctgttctgtgccgtgacctgtgctaccgaagtcatctgttgctgtagggaggccagggactcagccgatgcctcaatggccaactgcagctttcccaatcttggtgagaccaaagcagttgatgaatggataaagtggataaataccttcattcaggctcttccataactgtgccattggcggttcagtccggctgatctagcaggggtattgtgcttacaataaaaatggcttggggatggttccataaagtagtagggatatagggaaccaagttacaactggcaacattaaattcactcagacaatgagggaaacagagaataaaactttacagaccaaatatgttaatgcctatgtaattgtatttgaatattgacatgtgatacccacccaccaccttaaataaacacatacaaaagaaatctgcaa

SEQ ID NO: 278810 - DNA, 370 bp, Homo sapiens
gagatttggaaattgtgtggctattagcagtttcattcataatgaaatttataatcccttaaaaaacttggaggaagataattgcaggaagaacaccttgaatgtaagttctttattgctgctctgcctgccatttatacagttaagatataggattaggcagtagaccacaacaagtggcatgtgcagactataaagcaaagacacttaaatttagctgtgattcaatgatctcctatagaaagcagcccttaggtcaatcactgggtgaacagataggagcagaatgcgctctgtggaaattaagggtttaggaccagagtctaccattttcttatgggagattccagagagtgatgacatggaggat

SEQ ID NO: 278811 - DNA, 921 bp, Homo sapiens
ttttgctcagtctataccttggacacattccttaaccacaatgcgttgataaaatttaatcagagagaccatacttcataggtgtgtcctgcgtctagaatggaatatgctatcaatcaatgcggccagtaattattcatcaccaggagaaagaaattcctggcctttactctgttggaccccagccccatgtctcaagacatcacctgcgcgccgtggcaggtctccctgctgtaggcacctgaatcacaggaactaaaggtagggagaaaaagaaggacagatgggcaaaaatctgtgccattgaagaggaaacctaagaccgccgaagaggagaactgcgttgttagactcctggcagactcgagagcccgagactaaccaaaccggtcaccagggccccgcggcgtaggctgcgggctgttctccttagcttccggtagtctccccgcagctgaggtccgggccgggtcagggcgctagctggttaccatggacacggccagcggacgcacaccaatcagaagactgcgttccttgcccctttaaatacacacagcccaaagcaatttactccgttctgctggaacacaaacgcgcttctcagtttctctggaggaacttggttggcgaagagcttggcgcttcttgtaaaccttgtcccgctggacaaagacttgtgaaggaacacggagtgccaccaggactccgtggccctccccgcctctctctcctttttcccttcatggcggtgaagctgtggacgcttctcttcaggaggtgagctccagatgagacgccacatcccagcggagtcccggaagggtcaccccggtaagtgaaaggcaatggaagggcaccgtggatcaataaggcccagaggcgagacaaagagggcaaaaatcttctttattgagctct

SEQ ID NO: 278812 - DNA, 4287 bp, Homo sapiens
atttccttctagaagccaggagcaaaggacagacctctccctggtataaggaggaagagattgagaagaggaattctccagagtctattaactatactacatcaacgcctccaagatactatggtacccatcccaggggaagtggggctacaagaacagtataaatatctcctattggcataataaatggtgtaccccaagaatatgccaagggatgttttgtagagattttgagactaaggagatttggaaattgtgtggctattagcagtttcattcataatgaaatttataatcccttaaaaaacttggaggaagataattgcaggaagaacaccttgaataagcagaactcagctgtgagatcaggagcaagaggagcacattggaagaatttcgaaaaagggcaccttttctaatttttaatacttggctgggttaatctaaaactatgtcagaagaagtggcatgataacaagatcctgagactcaagagaaaagggagattgagtgggaatgcctctagttcccacggctcctcctgtgaacagcacagctacacggcccggctgattcattcagagggcgggactcaccaggccctacgtggagaaatgccattggcccatagtttatctttcactttcctgccctgagcgtgagcaagaatttcctgcggttcctctaggaaaattcctttgtgcagatcaggcccgtggattggtgagtgaatcctaaccacgtcttccctggcctgtcttcactcttctccccagaatcaccacttctgcactggtgtctgaaggtgtattgagtgattttgtggagggcagaagtaggaagtctttgggacaaaactgtatttaccttgggatctgtgaacaagaggaacctcagcagccaggacaggcaggagcagtggaatagctactatggcttctggaatcctggttaatgtaaaggaggaggtgacctgccccatctgcctggaactcctgacacaacccctgagcctggactgcggccacagcttctgccaagcatgcctcactgcaaaccacaagaagtccatgctagacaaaggagagagtagctgccctgtgtgccggatcagttaccagcctgagaacatacggcctaatcggcatgtagccaacatagtggagaagctcagggaggtcaagttgagcccagaggggcagaaagttgatcattgtgcacgccatggagagaaacttctactcttctgtcaggaggacgggaaggtcatttgctggctttgtgagcggtctcaggagcaccgtggtcaccacacgttcctcacagaggaggttgcccgggagtaccaagtgaagctccaggcagctctggagatgctgaggcagaagcagcaggaagctgaagagttggaagctgacatcagagaagagaaagcttcctggaagactcaaatacagtatgacaaaaccaacgtcttggcagattttgagcaactgagagacatcctggactgggaggagagcaatgagctgcaaaacctggagaaggaggaggaagacattctgaaaagccttacgaactctgaaactgagatggtgcagcagacccagtccctgagagagctcatctcagatctggagcatcggctgcaggggtcagtgatggagctgcttcaggtgtggatggcgtcataaaaaggacggagaacgtgaccttgaagaagccagaaacttttccaaaaaatcaaaggagagtgtttcgagctcctgatctgaaaggaatgctagaagtgtttagagagctgacagatgtccgacgctactggggtaaggagaagtcacattatcataagccaccctgcggcttatcattattattatctttatcttttagaattttatgttctctattaggctcatgttttaagatttatgattctccttccaagacacacataacttacccctccttataacttctaaacaaggttcctcccagttttctctcaagtctttatcaagatttctctcatatcacaaataaagttacattatatcccttagctgacctgttaatttttctacagttgatgtgacagtggctccaaacaacatttcatgtgctgtcatttctgaagataagagacaagtgagctctccgaaaccacagataatatatggggcacgagggacaagataccagacatttgtgaatttcaattattgtactggcatcctgggctctcaaagtatcacatcagggaaacattactgggaggtagacgtgtccaagaaaactgcttggatcctgggggtatgtgctggcttccaacctgatgcaatgtgtaatattgaaaaaaatgaaaattatcaacctaaatacggctactgggttatagggttagaggaaggagttaaatgtagtgctttccaggatagttccttccatactccttctgttcctttcattgtgcccctctctgtgattatttgtcctgatcgtgttggagttttcctagactatgaggcttgcactgtctcattcttcaatatcacaaaccatggatttctcatctataagttttctcactgttctttttctcagcctgtatttccatatttaaatcctagaaaatgtggagtccccatgactctgtgctcaccaagctcttgaaccttcttacacactcagccccttctgtacagcacctcttgtccaggtgcatctcatacacctgaactcatttgcatcattttaaccatcttttccttgctgtctcccttctttctatttgaacgtccttcactcatcagtaaaatgtaataattgccttgtgccatattgtccccaatattttattgacatttgatagcaatttttttcatcattttccgtactcctaaggaaaactgacctatacctcataaaatgagaccgctatttaggtattacttctgccagatatttatcacccaattgcctctgacactgactaagaagatgaagaaaagcttttcaacagcctttctatatcatcgtgtgataattgttcaccaatgaatgagtccttagccctgtgtcagtttaccctcgatgcccttatttgtgagttaaagagaaaatatcataaatggtatactcttaagtatagaggttttgtatctagaggatctcagttcaactcctgtctctccatataccagcagtgtaactgtgaataacatacttaaatggctgtgcttatttccttttcttttcttttttctttttttttttttttgagatgaagttttgctcttgttccccaggctggagtgcaatggcacgatctcggttcactgcaacctccacctctcagattcaagcaattctcctgcctcagcctcccaagtagctgggattacaggtgcccaccaccacccctggctaaatttgtattttcagtagagacggggtttccccatgttggttaggctcgtctagaacctctgacctcaggtgatccacccgcctcggcctcccaaagtgctgggattacaggcgtgagccacggcgcccagcctgtgcttattttcttaaaataatttttgtattaaaaacttcacattaaataagtgctaatgttttattgcatagtagggtgactagagttaacaataacctattgcatatattttgaaatagctagaagagaggattttgaaagttctcaacacaaagaaatgacacatatttgaggtgatggatatgctaattaccctggttcggttattacgcaatgtatacatgtatcaaaacatcacactgtaccacataaatatgtatatttattatttgtcaattaaaagcaaaataaaacaaaaaaccttcatctaatactttggatcattgtgaaaaaataaattcctgaagtataaagcatctatctaagtgtctcgatctaataagtacttgttctacaaattattgaaaaacataaactctgttaatgtctcatggaacaggttgtgccttcagggaaactaggattggatttactaaattctcattttttagatctcagatactactgtcaaaatgacttcaattctgccttctatatataatacacacatatatttaggattttattgtaattctagtgttgctacatattagtctttatcaaacaaactgaattatgtgggaatcagtttattaattgtaaaaaataattataataaaattagctgatgtagttttttaaaagttaaatgagttttttgaatagcttcactcatttctagc

SEQ ID NO: 278813 - DNA, 3511 bp, Homo sapiens
atttccttctagaagccaggagcaaaggacagacctctccctggtataaggaggaagagattgagaagaggaattctccagagtctattaactatactacatcaacgcctccaagatactatggtacccatcccaggggaagtggggctacaagaacagtataaatatctcctattggcataataaatggtgtaccccaagaatatgccaagggatgttttgtagagattttgagactaaggagatttggaaattgtgtggctattagcagtttcattcataatgaaatttataatcccttaaaaaacttggaggaagataattgcaggaagaacaccttgaataagcagaactcagctgtgagatcaggagcaagaggagcacattggaagaatttcgaaaaagggcaccttttctaatttttaatacttggctgggttaatctaaaactatgtcagaagaagtggcatgataacaagatcctgagactcaagagaaaagggagattgagtgggaatgcctctagttcccacggctcctcctgtgaacagcacagctacacggcccggctgattcattcagagggcgggactcaccaggccctacgtggagaaatgccattggcccatagtttatctttcactttcctgccctgagcgtgagcaagaatttcctgcggttcctctaggaaaattcctttgtgcagatcaggcccgtggattgggatctgtgaacaagaggaacctcagcagccaggacaggcaggagcagtggaatagctactatggcttctggaatcctggttaatgtaaaggaggaggtgacctgccccatctgcctggaactcctgacacaacccctgagcctggactgcggccacagcttctgccaagcatgcctcactgcaaaccacaagaagtccatgctagacaaaggagagagtagctgccctgtgtgccggatcagttaccagcctgagaacatacggcctaatcggcatgtagccaacatagtggagaagctcagggaggtcaagttgagcccagaggggcagaaagttgatcattgtgcacgccatggagagaaacttctactcttctgtcaggaggacgggaaggtcatttgctggctttgtgagcggtctcaggagcaccgtggtcaccacacgttcctcacagaggaggttgcccgggagtaccaagtgaagctccaggcagctctggagatgctgaggcagaagcagcaggaagctgaagagttggaagctgacatcagagaagagaaagcttcctggaagactcaaatacagtatgacaaaaccaacgtcttggcagattttgagcaactgagagacatcctggactgggaggagagcaatgagctgcaaaacctggagaaggaggaggaagacattctgaaaagccttacgaactctgaaactgagatggtgcagcagacccagtccctgagagagctcatctcagatctggagcatcggctgcaggggtcagtgatggagctgcttcaggtgtggatggcgtcataaaaaggacggagaacgtgaccttgaagaagccagaaacttttccaaaaaatcaaaggagagtgtttcgagctcctgatctgaaaggaatgctagaagtgtttagagagctgacagatgtccgacgctactgggttgatgtgacagtggctccaaacaacatttcatgtgctgtcatttctgaagataagagacaagtgagctctccgaaaccacagataatatatggggcacgagggacaagataccagacatttgtgaatttcaattattgtactggcatcctgggctctcaaagtatcacatcagggaaacattactgggaggtagacgtgtccaagaaaactgcttggatcctgggggtatgtgctggcttccaacctgatgcaatgtgtaatattgaaaaaaatgaaaattatcaacctaaatacggctactgggttatagggttagaggaaggagttaaatgtagtgctttccaggatagttccttccatactccttctgttcctttcattgtgcccctctctgtgattatttgtcctgatcgtgttggagttttcctagactatgaggcttgcactgtctcattcttcaatatcacaaaccatggatttctcatctataagttttctcactgttctttttctcagcctgtatttccatatttaaatcctagaaaatgtggagtccccatgactctgtgctcaccaagctcttgaaccttcttacacactcagccccttctgtacagcacctcttgtccaggtgcatctcatacacctgaactcatttgcatcattttaaccatcttttccttgctgtctcccttctttctatttgaacgtccttcactcatcagtaaaatgtaataattgccttgtgccatattgtccccaatattttattgacatttgatagcaatttttttcatcattttccgtactcctaaggaaaactgacctatacctcataaaatgagaccgctatttaggtattacttctgccagatatttatcacccaattgcctctgacactgactaagaagatgaagaaaagcttttcaacagcctttctatatcatcgtgtgataattgttcaccaatgaatgagtccttagccctgtgtcagtttaccctcgatgcccttatttgtgagttaaagagaaaatatcataaatggtatactcttaagtatagaggttttgtatctagaggatctcagttcaactcctgtctctccatataccagcagtgtaactgtgaataacatacttaaatggctgtgcttatttccttttcttttcttttttctttttttttttttttgagatgaagttttgctcttgttccccaggctggagtgcaatggcacgatctcggttcactgcaacctccacctctcagattcaagcaattctcctgcctcagcctcccaagtagctgggattacaggtgcccaccaccacccctggctaaatttgtattttcagtagagacggggtttccccatgttggttaggctcgtctagaacctctgacctcaggtgatccacccgcctcggcctcccaaagtgctgggattacaggcgtgagccacggcgcccagcctgtgcttattttcttaaaataatttttgtattaaaaacttcacattaaataagtgctaatgttttattgcatagtagggtgactagagttaacaataacctattgcatatattttgaaatagctagaagagaggattttgaaagttctcaacacaaagaaatgacacatatttgaggtgatggatatgctaattaccctggttcggttattacgcaatgtatacatgtatcaaaacatcacactgtaccacataaatatgtatatttattatttgtcaattaaaagcaaaataaaacaaaaaaccttcatctaatactttggatcattgtgaaaaaataaattcctgaagtataaag

SEQ ID NO: 278814 - DNA, 3154 bp, Homo sapiens
ctccgttctgctggaacacaaacgcgcttctcagtttctctggaggaacttggttggcgaagagcttggcgcttcttgtaaaccttgtcccgctggacaaagacttgtgaaggaacacggagtgccaccaggactccgtggccctccccgcctctctctcctttttcccttcatggcggtgaagctgtggacgcttctcttcaggaggtgagctccagatgagacgccacatcccagcggagtcccggaagggtcaccccgcaggtctaaggcccgcctgttctgtgccgtgacctgtgctaccgaagtcatctgttgctgtagggaggccagggactcagccgatgcctcaatggccaactgcagggatctgtgaacaagaggaacctcagcagccaggacaggcaggagcagtggaatagctactatggcttctggaatcctggttaatgtaaaggaggaggtgacctgccccatctgcctggaactcctgacacaacccctgagcctggactgcggccacagcttctgccaagcatgcctcactgcaaaccacaagaagtccatgctagacaaaggagagagtagctgccctgtgtgccggatcagttaccagcctgagaacatacggcctaatcggcatgtagccaacatagtggagaagctcagggaggtcaagttgagcccagaggggcagaaagttgatcattgtgcacgccatggagagaaacttctactcttctgtcaggaggacgggaaggtcatttgctggctttgtgagcggtctcaggagcaccgtggtcaccacacgttcctcacagaggaggttgcccgggagtaccaagtgaagctccaggcagctctggagatgctgaggcagaagcagcaggaagctgaagagttggaagctgacatcagagaagagaaagcttcctggaagactcaaatacagtatgacaaaaccaacgtcttggcagattttgagcaactgagagacatcctggactgggaggagagcaatgagctgcaaaacctggagaaggaggaggaagacattctgaaaagccttacgaactctgaaactgagatggtgcagcagacccagtccctgagagagctcatctcagatctggagcatcggctgcaggggtcagtgatggagctgcttcaggtgtggatggcgtcataaaaaggacggagaacgtgaccttgaagaagccagaaacttttccaaaaaatcaaaggagagtgtttcgagctcctgatctgaaaggaatgctagaagtgtttagagagctgacagatgtccgacgctactgggttgatgtgacagtggctccaaacaacatttcatgtgctgtcatttctgaagataagagacaagtgagctctccgaaaccacagataatatatggggcacgagggacaagataccagacatttgtgaatttcaattattgtactggcatcctgggctctcaaagtatcacatcagggaaacattactgggaggtagacgtgtccaagaaaactgcttggatcctgggggtatgtgctggcttccaacctgatgcaatgtgtaatattgaaaaaaatgaaaattatcaacctaaatacggctactgggttatagggttagaggaaggagttaaatgtagtgctttccaggatagttccttccatactccttctgttcctttcattgtgcccctctctgtgattatttgtcctgatcgtgttggagttttcctagactatgaggcttgcactgtctcattcttcaatatcacaaaccatggatttctcatctataagttttctcactgttctttttctcagcctgtatttccatatttaaatcctagaaaatgtggagtccccatgactctgtgctcaccaagctcttgaaccttcttacacactcagccccttctgtacagcacctcttgtccaggtgcatctcatacacctgaactcatttgcatcattttaaccatcttttccttgctgtctcccttctttctatttgaacgtccttcactcatcagtaaaatgtaataattgccttgtgccatattgtccccaatattttattgacatttgatagcaatttttttcatcattttccgtactcctaaggaaaactgacctatacctcataaaatgagaccgctatttaggtattacttctgccagatatttatcacccaattgcctctgacactgactaagaagatgaagaaaagcttttcaacagcctttctatatcatcgtgtgataattgttcaccaatgaatgagtccttagccctgtgtcagtttaccctcgatgcccttatttgtgagttaaagagaaaatatcataaatggtatactcttaagtatagaggttttgtatctagaggatctcagttcaactcctgtctctccatataccagcagtgtaactgtgaataacatacttaaatggctgtgcttatttccttttcttttcttttttctttttttttttttttgagatgaagttttgctcttgttccccaggctggagtgcaatggcacgatctcggttcactgcaacctccacctctcagattcaagcaattctcctgcctcagcctcccaagtagctgggattacaggtgcccaccaccacccctggctaaatttgtattttcagtagagacggggtttccccatgttggttaggctcgtctagaacctctgacctcaggtgatccacccgcctcggcctcccaaagtgctgggattacaggcgtgagccacggcgcccagcctgtgcttattttcttaaaataatttttgtattaaaaacttcacattaaataagtgctaatgttttattgcatagtagggtgactagagttaacaataacctattgcatatattttgaaatagctagaagagaggattttgaaagttctcaacacaaagaaatgacacatatttgaggtgatggatatgctaattaccctggttcggttattacgcaatgtatacatgtatcaaaacatcacactgtaccacataaatatgtatatttattatttgtcaattaaaagcaaaataaaacaaaaaaccttcatctaatactttggatcattgtgaaaaaataaattcctgaagtataaag

SEQ ID NO: 278815 - DNA, 4460 bp, Homo sapiens
atttccttctagaagccaggagcaaaggacagacctctccctggtataaggaggaagagattgagaagaggaattctccagagtctattaactatactacatcaacgcctccaagatactatggtacccatcccaggggaagtggggctacaagaacagtataaatatctcctattggcataataaatggtgtaccccaagaatatgccaagggatgttttgtagagattttgagactaaggagatttggaaattgtgtggctattagcagtttcattcataatgaaatttataatcccttaaaaaacttggaggaagataattgcaggaagaacaccttgaataagcagaactcagctgtgagatcaggagcaagaggagcacattggaagaatttcgaaaaagggcaccttttctaatttttaatacttggctgggttaatctaaaactatgtcagaagaagtggcatgataacaagatcctgagactcaagagaaaagggagattgagtgggaatgcctctagttcccacggctcctcctgtgaacagcacagctacacggcccggctgattcattcagagggcgggactcaccaggccctacgtggagaaatgccattggcccatagtttatctttcactttcctgccctgagcgtgagcaagaatttcctgcggttcctctaggaaaattcctttgtgcagatcaggcccgtggattggtgagtgaatcctaaccacgtcttccctggcctgtcttcactcttctccccagaatcaccacttctgcactggtgtctgaaggtgtattgagtgattttgtggagggcagaagtaggaagtctttgggacaaaactgtatttaccttgggatctgtgaacaagaggaacctcagcagccaggacaggcaggagcagtggaatagctactatggcttctggaatcctggttaatgtaaaggaggaggtgacctgccccatctgcctggaactcctgacacaacccctgagcctggactgcggccacagcttctgccaagcatgcctcactgcaaaccacaagaagtccatgctagacaaaggagagagtagctgccctgtgtgccggatcagttaccagcctgagaacatacggcctaatcggcatgtagccaacatagtggagaagctcagggaggtcaagttgagcccagaggggcagaaagttgatcattgtgcacgccatggagagaaacttctactcttctgtcaggaggacgggaaggtcatttgctggctttgtgagcggtctcaggagcaccgtggtcaccacacgttcctcacagaggaggttgcccgggagtaccaagtgaagctccaggcagctctggagatgctgaggcagaagcagcaggaagctgaagagttggaagctgacatcagagaagagaaagcttcctggaagactcaaatacagtatgacaaaaccaacgtcttggcagattttgagcaactgagagacatcctggactgggaggagagcaatgagctgcaaaacctggagaaggaggaggaagacattctgaaaagccttacgaactctgaaactgagatggtgcagcagacccagtccctgagagagctcatctcagatctggagcatcggctgcaggggtcagtgatggagctgcttcaggtaaaaagtggaaagaagcgacggagaacgtgaccttgaagaagccagaaacttttccaaaaaatcaaaggagagtgtttcgagctcctgatctgaaaggaatgctagaagtgtttagagagctgacagatgtccgacgctactgggttgatgtgacagtggctccaaacaacatttcatgtgctgtcatttctgaagataagagacaagtgagctctccgaaaccacagataatatatggggcacgagggacaagataccagacatttgtgaatttcaattattgtactggcatcctgggctctcaaagtatcacatcagggaaacattactgggaggtagacgtgtccaagaaaactgcttggatcctgggggtatgtgctggcttccaacctgatgcaatgtgtaatattgaaaaaaaaagatttatgattctccttccaagacacacataacttacccctccttataacttctaaacaaggttcctcccagttttctctcaagtctttatcaagatttctctcatatcacaaataaagttacattatatcccttagctgacctgttaatttttctacagttgatgtgacagtggctccaaacaacatttcatgtgctgtcatttctgaagataagagacaagtgagctctccgaaaccacagataatatatggggcacgagggacaagataccagacatttgtgaatttcaattattgtactggcatcctgggctctcaaagtatcacatcagggaaacattactgggaggtagacgtgtccaagaaaactgcttggatcctgggggtatgtgctggcttccaacctgatgcaatgtgtaatattgaaaaaaatgaaaattatcaacctaaatacggctactgggttatagggttagaggaaggagttaaatgtagtgctttccaggatagttccttccatactccttctgttcctttcattgtgcccctctctgtgattatttgtcctgatcgtgttggagttttcctagactatgaggcttgcactgtctcattcttcaatatcacaaaccatggatttctcatctataagttttctcactgttctttttctcagcctgtatttccatatttaaatcctagaaaatgtggagtccccatgactctgtgctcaccaagctcttgaaccttcttacacactcagccccttctgtacagcacctcttgtccaggtgcatctcatacacctgaactcatttgcatcattttaaccatcttttccttgctgtctcccttctttctatttgaacgtccttcactcatcagtaaaatgtaataattgccttgtgccatattgtccccaatattttattgacatttgatagcaatttttttcatcattttccgtactcctaaggaaaactgacctatacctcataaaatgagaccgctatttaggtattacttctgccagatatttatcacccaattgcctctgacactgactaagaagatgaagaaaagcttttcaacagcctttctatatcatcgtgtgataattgttcaccaatgaatgagtccttagccctgtgtcagtttaccctcgatgcccttatttgtgagttaaagagaaaatatcataaatggtatactcttaagtatagaggttttgtatctagaggatctcagttcaactcctgtctctccatataccagcagtgtaactgtgaataacatacttaaatggctgtgcttatttccttttcttttcttttttctttttttttttttttgagatgaagttttgctcttgttccccaggctggagtgcaatggcacgatctcggttcactgcaacctccacctctcagattcaagcaattctcctgcctcagcctcccaagtagctgggattacaggtgcccaccaccacccctggctaaatttgtattttcagtagagacggggtttccccatgttggttaggctcgtctagaacctctgacctcaggtgatccacccgcctcggcctcccaaagtgctgggattacaggcgtgagccacggcgcccagcctgtgcttattttcttaaaataatttttgtattaaaaacttcacattaaataagtgctaatgttttattgcatagtagggtgactagagttaacaataacctattgcatatattttgaaatagctagaagagaggattttgaaagttctcaacacaaagaaatgacacatatttgaggtgatggatatgctaattaccctggttcggttattacgcaatgtatacatgtatcaaaacatcacactgtaccacataaatatgtatatttattatttgtcaattaaaagcaaaataaaacaaaaaaccttcatctaatactttggatcattgtgaaaaaataaattcctgaagtataaagcatctatctaagtgtctcgatctaataagtacttgttctacaaattattgaaaaacataaactctgttaatgtctcatggaacaggttgtgccttcagggaaactaggattggatttactaaattctcattttttagatctcagatactactgtcaaaatgacttcaattctgccttctatatataatacacacatatatttaggattttattgtaattctagtgttgctacatattagtctttatcaaacaaactgaattatgtgggaatcagtttattaattgtaaaaaataattataataaaattagctgatgtagttttttaaaagttaaatgagttttttgaatagcttcactcatttctagc

SEQ ID NO: 278816 - DNA, 1934 bp, Homo sapiens
atttccttctagaagccaggagcaaaggacagacctctccctggtataaggaggaagagattgagaagaggaattctccagagtctattaactatactacatcaacgcctccaagatactatggtacccatcccaggggaagtggggctacaagaacagtataaatatctcctattggcataataaatggtgtaccccaagaatatgccaagggatgttttgtagagattttgagactaaggagatttggaaattgtgtggctattagcagtttcattcataatgaaatttataatcccttaaaaaacttggaggaagataattgcaggaagaacaccttgaataagcagaactcagctgtgagatcaggagcaagaggagcacattggaagaatttcgaaaaagggcaccttttctaatttttaatacttggctgggttaatctaaaactatgtcagaagaagtggcatgataacaagatcctgagactcaagagaaaagggagattgagtgggaatgcctctagttcccacggctcctcctgtgaacagcacagctacacggcccggctgattcattcagagggcgggactcaccaggccctacgtggagaaatgccattggcccatagtttatctttcactttcctgccctgagcgtgagcaagaatttcctgcggttcctctaggaaaattcctttgtgcagatcaggcccgtggattggtgagtgaatcctaaccacgtcttccctggcctgtcttcactcttctccccagaatcaccacttctgcactggtgtctgaaggtgtattgagtgattttgtggagggcagaagtaggaagtctttgggacaaaactgtatttaccttgggatctgtgaacaagaggaacctcagcagccaggacaggcaggagcagtggaatagctactatggcttctggaatcctggttaatgtaaaggaggaggtgacctgccccatctgcctggaactcctgacacaacccctgagcctggactgcggccacagcttctgccaagcatgcctcactgcaaaccacaagaagtccatgctagacaaaggagagagtagctgccctgtgtgccggatcagttaccagcctgagaacatacggcctaatcggcatgtagccaacatagtggagaagctcagggaggtcaagttgagcccagaggggcagaaagttgatcattgtgcacgccatggagagaaacttctactcttctgtcaggaggacgggaaggtcatttgctggctttgtgagcggtctcaggagcaccgtggtcaccacacgttcctcacagaggaggttgcccgggagtaccaagtgaagctccaggcagctctggagatgctgaggcagaagcagcaggaagctgaagagttggaagctgacatcagagaagagaaagcttcctggaagactcaaatacagtatgacaaaaccaacgtcttggcagattttgagcaactgagagacatcctggactgggaggagagcaatgagctgcaaaacctggagaaggaggaggaagacattctgaaaagccttacgaactctgaaactgagatggtgcagcagacccagtccctgagagagctcatctcagatctggagcatcggctgcaggggtcagtgatggagctgcttcaggtaaaaagtggaaagaagcctgagcactgagattaaagaaaagtgaaggctatttccttctctgcgttgctgtgctttttctaatattaaccatgttctctgcaggaccgcttttctgaatccattgctgaagttataagaataattgaatgtagaagtagcaagagataatcccatttttattaatttatccagagcagtagaaaaatttgacgtagtggagatgatcattagctctagtcatgttgatacggttcc

SEQ ID NO: 278817 - DNA, 470 bp, Homo sapiens
tgggcaggagaaagatctacttaaaaaagaagcaaacaaacaaacaatcaacacttattactgggaaaacaaccaataactatggacagcaaagacagaccccgcgcattcccggaaactactaaatcggagttcacaacgcgcgcacctataagcattttgagcgggaactgcattttaaccccggccaaggagagattccaggaagcgcctgggccccgaggctgaacagtgaagctcatgggtactatctgagggtgcaaccaagcagggggtcaataacaagggtcctccaccaccctgcactcctggaataacccagcgcctgtaatctgagcaacagtttccaaagaccttctctgcagcccgagcctgacgggtatccagggtaaccgcgagggggcggagcttcgggttaggtcccggcgaggttcttcccgcagccaataacgagccgtaaatccccagcc

SEQ ID NO: 278818 - DNA, 467 bp, Homo sapiens
  misc_feature (53)..(53): n is a, c, g, or t
tacgatatttataaggaggcagggggtaaaagatagtagaagatgatgtccangagaggcagcactcgggggaagcagcaccaaggcaggcatcgtcattctgcatatgcaggccttgactggcagcagagctcactgtcctgatgggtacgtcagtagcacacagaaggcctctgcccaccatttctctcttcagcgaacaccttctcaaacatctcatgcttaaacctgccctccaccaggaagctttgcttgaccccaaagtcggccttgcctctctcctggggctcccacagctggagaacatgacctcttgtgaccttttggacctggagctacctcaccaccaggagtgccccgcggaggtaggactgattgtttaccatctgtgcagggcccaggacaatccctgcatgtgccagatgtgcagaaaatacttgctaatggaataaaggaatgagtcccca

SEQ ID NO: 278819 - DNA, 446 bp, Homo sapiens
tatgcctggtgctaccctccccatgaccccaaaaacgagagccatgagacaatgccaccttagccatttcccttgagagaaatgaaggaggaacagacataaggcagagccacctgaggtttttagaatctatatctcacatactgaactagtgtttaatggctctgagaataaaaccaaaccaaatcttccttccacttgagtttccaacataaggacaccttactctctgcacttctccttgaccaggaggcagcactcgggggaagcagcaccaaggcaggcatcgtcattctgcatatgcaggccttgactggcagcagagctcactgtcctgatgggtacgtcagtagcacacagaaggtaaggctcaccgagcacaggccatgaatctcctctgctcgactggatgttctcatactcttggctgggaacatgacctctgc

SEQ ID NO: 278820 - DNA, 557 bp, Homo sapiens
  misc_feature (53)..(53): n is a, c, g, or t
tacgatatttataaggaggcagggggtaaaagatagtagaagatgatgtccangagaggcagcactcgggggaagcagcaccaaggcaggcatcgtcattctgcatatgcaggccttgactggcagcagagctcactgtcctgatgggtacgtcagtagcacacagaaggcctctgcccaccatttctctcttcagcgaacaccttctcaaacatctcatgcttaaacctgccctccaccaggaagctttgcttgaccccaaagtcggccttgcctctctcctggggctcccacagctggagaacatgacctcttgtgaccttttggacctggagctacctcaccaccaggagtgccccgcggaggtaggactgattgtttaccatctgtgcagggcccaggacaatccctgcatgtgccagatgtgcagaaaatacttgctaatggaataaaggaatgagtccccaaaaaaagaaaaaaaagtggcgctcgtgggcctcatccggtggatcttctgcgggcggttcccgttaagggggggggaatgcaggatgccg

SEQ ID NO: 278821 - DNA, 3210 bp, Homo sapiens
gaacaaaccaacatttgagccaggaataactagagaggaacaatggggttattcagaggttttgttttcctcttagttctgtgcctgctgcaccagtcaaatacttccttcattaagctgaataataatggctttgaagatattgtcattgttatagatcctagtgtgccagaagatgaaaaaataattgaacaaatagaggatatggtgactacagcttctacgtacctgtttgaagccacagaaaaaagattttttttcaaaaatgtatctatattaattcctgagaattggaaggaaaatcctcagtacaaaaggccaaaacatgaaaaccataaacatgctgatgttatagttgcaccacctacactcccaggtagagatgaaccatacaccaagcagttcacagaatgtggagagaaaggcgaatacattcacttcacccctgaccttctacttggaaaaaaacaaaatgaatatggaccaccaggcaaactgtttgtccatgagtgggctcacctccggtggggagtgtttgatgagtacaatgaagatcagcctttctaccgtgctaagtcaaaaaaaatcgaagcaacaaggtgttccgcaggtatctctggtagaaatagagtttataagtgtcaaggaggcagctgtcttagtagagcatgcagaattgattctacaacaaaactgtatggaaaagattgtcaattctttcctgataaagtacaaacagaaaaagcatccataatgtttatgcaaagtattgattctgttgttgaattttgtaacgaaaaaacccataatcaagaagctccaagcctacaaaacataaagtgcaattttagaagtacatgggaggtgattagcaattctgaggattttaaaaacaccatacccatggtgacaccacctcctccacctgtcttctcattgctgaagatccgtcaaagaattgtgtgcttagttcttgataagtctggaagcatggggggtaaggaccgcctaaatcgaatgaatcaagcagcaaaacatttcctgctgcagactgttgaaaatggatcctgggtggggatggttcactttgatagtactgccactattgtaaataagctaatccaaataaaaagcagtgatgaaagaaacacactcatggcaggattacctacatatcctctgggaggaacttccatctgctctggaattaaatatgcatttcaggtgattggagagctacattcccaactcgatggatccgaagtactgctgctgactgatggggaggataacactgcaagttcttgtattgatgaagtgaaacaaagtggggccattgttcattttattgctttgggaagagctgctgatgaagcagtaatagagatgagcaagataacaggaggaagtcatttttatgtttcagatgaagctcagaacaatggcctcattgatgcttttggggctcttacatcaggaaatactgatctctcccagaagtcccttcagctcgaaagtaagggattaacactgaatagtaatgcctggatgaacgacactgtcataattgatagtacagtgggaaaggacacgttctttctcatcacatggaacagtctgcctcccagtatttctctctgggatcccagtggaacaataatggaaaatttcacagtggatgcaacttccaaaatggcctatctcagtattccaggaactgcaaaggtgggcacttgggcatacaatcttcaagccaaagcgaacccagaaacattaactattacagtaacttctcgagcagcaaattcttctgtgcctccaatcacagtgaatgctaaaatgaataaggacgtaaacagtttccccagcccaatgattgtttacgcagaaattctacaaggatatgtacctgttcttggagccaatgtgactgctttcattgaatcacagaatggacatacagaagttttggaacttttggataatggtgcaggcgctgattctttcaagaatgatggagtctactccaggtattttacagcatatacagaaaatggcagatatagcttaaaagttcgggctcatggaggagcaaacactgccaggctaaaattacggcctccactgaatagagccgcgtacataccaggctgggtagtgaacggggaaattgaagcaaacccgccaagacctgaaattgatgaggatactcagaccaccttggaggatttcagccgaacagcatccggaggtgcatttgtggtatcacaagtcccaagccttcccttgcctgaccaatacccaccaagtcaaatcacagaccttgatgccacagttcatgaggataagattattcttacatggacagcaccaggagataattttgatgttggaaaagttcaacgttatatcataagaataagtgcaagtattcttgatctaagagacagttttgatgatgctcttcaagtaaatactactgatctgtcaccaaaggaggccaactccaaggaaagctttgcatttaaaccagaaaatatctcagaagaaaatgcaacccacatatttattgccattaaaagtatagataaaagcaatttgacatcaaaagtatccaacattgcacaagtaactttgtttatccctcaagcaaatcctgatgacattgatcctactcctactcctactcctactcctgataaaagtcataattctggagttaatatttctacgctggtattgtctgtgattgggtctgttgtaattgttaactttattttaagtaccaccatttgaaccttaacgaagaaaaaaatcttcaagtagacctagaagagagttttaaaaaacaaaacaatgtaagtaaaggatatttctgaatcttaaaattcatcccatgtgtgatcataaactcataaaaataattttaagatgtcggaaaaggatactttgattaaataaaaacactcatggatatgtaaaaactgtcaagattaaaatttaatagtttcatttatttgttattttatttgtaagaaatagtgatgaacaaagatcctttttcatactgatacctggttgtatattatttgatgcaacagttttctgaaatgatatttcaaattgcatcaagaaattaaaatcatctatctgagtagtcaaaatacaagtaaaggagagcaaataaacaacatttggaaaaaaatgaat

SEQ ID NO: 278822 - DNA, 445 bp, Homo sapiens
gaacaaaccaacatttgagccaggaataactagagaggaacaatggggttattcagaggttttgttttcctcttagttctgtgcctgctgcaccagtcaaatacttccttcattaagctgaataataatggctttgaagatattgtcattgttatagatcctagtgtgccagaagatgaaaaaataattgaacaaatagaggtaagaacaaaatggaatatctttcattaatttttagttttttactattatttttaattgacatataattgtacatatttatggcatacaaagtagtatttctatacatgtatacaatttgtaaagatcaaatcagggtaattagcatattcagcaactcaaacatttatctttgcattgtgtcgggaacattataattattctcttctagctactttgaaatacacaacagattatcagtaac

SEQ ID NO: 278823 - DNA, 945 bp, Homo sapiens
  misc_feature (848)..(848): n is a, c, g, or t
  misc_feature (863)..(863): n is a, c, g, or t
  misc_feature (868)..(868): n is a, c, g, or t
  misc_feature (871)..(871): n is a, c, g, or t
  misc_feature (893)..(893): n is a, c, g, or t
  misc_feature (903)..(903): n is a, c, g, or t
agcatactgagggtttactaatttgtaatcactgactttttcaaatgttgaagtggattcttaatgcatctagctttaaatgcaagagactttataaactgaaggcttgtctgtcagaaggtagtccagtcaaagaaaacataacactaattaatgtcacatactgtgattatacctttggtatctggttgacctgagtttcccaggttgagatgttattgtcatttagtctagacaggattttccaaagcctggtcccaccgaattcctttaaataaatactacctgcagctgggagttaaaaaaattcatgtttaactttccccaaggattgttgattgaaaattctttattttaaaatagaggttatctcttctattctgcataactttgtttattttctctgtaaattttttctcatttcccatttgtctatttgatctaggaacatctgttggtaactgtgctctgaattatgtttgcaggtgattggagagctacattcccaactcgatggatccgaagtactgctgctgactgatggggaggataacactgcaagttcttgtattgatgaagtgaaacaaagtggggccattgttcattttattgctttgggaagagctgctgatgaagcagtaatagagatgagcaagataacaggtaaaacacgatccatttattccaggccttcaatagtaatgcataaatgtaaaggctgacagttcaacaacgtctcttgagtttctgccttggaggcactgaagctggggaccagacccaatctctgttctcgtggcacttggagtgccagttggcttgtatgaatggtagacccctggagtttncacaaagcacatgtntgctnctnctcccgcatggctgtttataanccagataacnggcctaaggacttgcctctccttcccgtgcgtgcccccggtc

SEQ ID NO: 278824 - DNA, 797 bp, Homo sapiens
aggaccaggactaaggatattatgatgttgatggtgatggctacaatggctgaattcgatgtatttgtgatcttatgactggctgagggcaaggaaagatgacagacactgacgaggaaatgggagattgcgagtcccagtgtgtgataaggataacgatggctatatttatattgctgaagttcgtcatgtgatgggacagccggaccccccaagtaactttgtttatccctcaagcaaatcctgatgacattgatcctactcctactcctactcctactcctgataaaagtcataattctggagttaatatttctacgctggtattgtctgtgattgggtctgttgtaattgttaactttattttaagtaccaccatttgaaccttaacgaagaaaaaaatcttcaagtagacctagaagagagttttaaaaaacaaaacaatgtaagtaaaggatatttctgaatcttaaaattcatcccatgtgtgatcataaactcataaaaataattttaagatgtcggaaaaggatactttgattaaataaaaacactcatggatatgtaaaaactgtcaagattaaaatttaatagtttcatttatttgttattttatttgtaagaaatagtgatgaacaaagatcctttttcatactgatacctggttgtatattatttgatgcaacagttttctgaaatgatatttcaaattgcatcaagaaattaaaatcatctatctgagtagtcaaaatacaagtaaaggagagcaaataaacaacatttggaaaaaaatgaat

SEQ ID NO: 278825 - DNA, 1596 bp, Homo sapiens
gaacaaaccaacatttgagccaggaataactagagaggaacaatggggttattcagaggttttgttttcctcttagttctgtgcctgctgcaccagtcaaatacttccttcattaagctgaataataatggctttgaagatattgtcattgttatagatcctagtgtgccagaagatgaaaaaataattgaacaaatagaggatatggtgactacagcttctacgtacctgtttgaagccacagaaaaaagattttttttcaaaaatgtatctatattaattcctgagaattggaaggaaaatcctcagtacaaaaggccaaaacatgaaaaccataaacatgctgatgttatagttgcaccacctacactcccaggtagagatgaaccatacaccaagcagttcacagaatgtggagagaaaggcgaatacattcacttcacccctgaccttctacttggaaaaaaacaaaatgaatatggaccaccaggcaaactgtttgtccatgagtgggctcacctccggtggggagtgtttgatgagtacaatgaagatcagcctttctaccgtgctaagtcaaaaaaaatcgaagcaacaaggtgttccgcaggtatctctggtagaaatagagtttataagtgtcaaggaggcagctgtcttagtagagcatgcagaattgattctacaacaaaactgtatggaaaagattgtcaattctttcctgataaagtacaaacagaaaaagcatccataatgtttatgcaaagtattgattctgttgttgaattttgtaacgaaaaaacccataatcaagaagctccaagcctacaaaacataaagtgcaattttagaagtacatgggaggtgattagcaattctgaggattttaaaaacaccatacccatggtgacaccacctcctccacctgtcttctcattgctgaagatccgtcaaagaattgtgtgcttagttcttgataagtctggaagcatggggggtaaggaccgcctaaatcgaatgaatcaagcagcaaaacatttcctgctgcagactgttgaaaatggatcctgggtggggatggttcactttgatagtactgccactattgtaaataagctaatccaaataaaaagcagtgatgaaagaaacacactcatggcaggattacctacatatcctctgggaggaacttccatctgctctggaattaaatatgcatttcaggtgattggagagctacattcccaactcgatggatccgaagtactgctgctgactgatggggaggataacactgcaagttcttgtattgatgaagtgaaacaaagtggggccattgttcattttattgctttgggaagagctgctgatgaagcagtaatagagatgagcaagataacaggtaaaacacgatccatttattccaggccttcaatagtaatgcataaatgtaaaggctgacagttcaacaacgtctcttgagtttctgccttggaggcactgaagctggggaccagacccaatctctgttctaagggcactggatgttaccatgagctcttgtttttttttttcttcaactcatcttcactttca

SEQ ID NO: 278826 - DNA, 402 bp, Homo sapiens
  misc_feature (1)..(3): n is a, c, g, or t
  misc_feature (12)..(14): n is a, c, g, or t
  misc_feature (305)..(305): n is a, c, g, or t
  misc_feature (320)..(320): n is a, c, g, or t
  misc_feature (325)..(325): n is a, c, g, or t
  misc_feature (328)..(328): n is a, c, g, or t
  misc_feature (350)..(350): n is a, c, g, or t
  misc_feature (360)..(360): n is a, c, g, or t
nnnaaaattttnnnttccggccgcagaactccaccgctgaggccaatggggccattgttcattttattgctttgggaagagctgctgatgaagcagtaatagagatgagcaagataacaggtaaaacacgatccatttattccaggccttcaatagtaatgcataaatgtaaaggctgacagttcaacaacgtctcttgagtttctgccttggaggcactgaagctggggaccagacccaatctctgttctcgtggcacttggagtgccagttggcttgtatgaatggtagacccctggagtttncacaaagcacatgtntgctnctnctcccgcatggctgtttataanccagataacnggcctaaggacttgcctctccttcccgtgcgtgcccccggtc

SEQ ID NO: 278827 - DNA, 118 bp, Homo sapiens
caaagaattgtgtgcttagttcttgataagtctggaagcatgggggtaagatcactttttctggatatagggatgtaggatatttgaagatccgagaacacactgaactctgtctgca

SEQ ID NO: 278828 - DNA, 1080 bp, Homo sapiens
ggtggaccgaattgttggcgagcgggtgtgaacggggaaattgaagcaaacccgccaagacctgaaattgatgaggatactcagaccaccttggaggatttcagccgaacagcatccggaggtgcatttgtggtatcacaagtcccaagccttcccttgcctgaccaatacccaccaagtcaaatcacagaccttgatgccacagttcatgaggataagattattcttacatggacagcaccaggagataattttgatgttggaaaagttcaacgttatatcataagaataagtgcaagtattcttgatctaagagacagttttgatgatgctcttcaagtaaatactactgatctgtcaccaaaggaggccaactccaaggaaagctttgcatttaaaccagaaaatatctcagaagaaaatgcaacccacatatttattgccattaaaagtatagataaaagcaatttgacatcaaaagtatccaacattgcacaagtaactttgtttatccctcaagcaaatcctgatgacattgatcctactcctactcctactcctactcctgataaaagtcataattctggagttaatatttctacgctggtattgtctgtgattgggtctgttgtaattgttaactttattttaagtaccaccatttgaaccttaacgaagaaaaaaatcttcaagtagacctagaagagagttttaaaaaacaaaacaatgtaagtaaaggatatttctgaatcttaaaattcatcccatgtgtgatcataaactcataaaaataattttaagatgtcggaaaaggatactttgattaaataaaaacactcatggatatgtaaaaactgtcaagattaaaatttaatagtttcatttatttgttattttatttgtaagaaatagtgatgaacaaagatcctttttcatactgatacctggttgtatattatttgatgcaacagttttctgaaatgatatttcaaattgcatcaagaaattaaaatcatctatctgagtagtcaaaatacaagtaaaggagagcaaataaacaacatttggaaaaaaatgaat

SEQ ID NO: 278829 - DNA, 1099 bp, Homo sapiens
aatgagcggtgcgcggcgcgccgcgcccggaaccagcaacgcggcaaaggggtcctgcacgtacccgcgcgcggccagggaacgcttgctgagggcgctgctgtcgttggtgttctgtaccgcgcctgcccgacgctcacggctccgggggcccatggccagaagagactcaggaatggcagtctgtcacggttgtgagccgccccttggttagcacacacctcacggacctcggtagggggaaaaaaaccacccatgctcctggacttccccttccgccggcacttgtgcgtcacttccgggaagagcgcatctcgccaaccagaattgaggagggtgtagccagtgctaagttcgcttgcggctgacctttctttggaatgtcgtggaagcaaatactgcacatgcgtgttggtcctgtgagggaaaccagctagtggagagggagaggttgaaggaacagaaaaatgagaagacaactcactggaggctgaagtgggaggatcgcttgagtctggaagcttgagactgcagcaagctgtgatcgtgacactgcactccagcctgggcaacaaagtaagatcctgtctcaaaagaaaaaaaaaaaaaggtgaagctgaacccagatctacacatacagctaatcttaccaaaatgtgtggaagtaaagcaatctgaaggaaattcagtaccatacaatttactgactgaaatacatcatatggctcatactaagaataagagtggagaagaatcattttttcctgctaaaatgatagaggcagaagagcaacagccttgcaagacagacttctattctgaattggccaaaagtggaacttcatgcccacttgaatggatccattagttctcataccatgaagaaattaatagcccagaagccagatcttaaaatccacgatcagatgactgtgattgacaagggaaagaaaagaacttgtggaagaatgtttccagatgtttcaaactattcatcagcttactagtagccctgaagatatctaatggtcacaaaagatgtcataaaagaatttgcagatgacggcgtcaagtacctggaactaaggagcacacccag

SEQ ID NO: 278830 - DNA, 1240 bp, Homo sapiens
aatgagcggtgcgcggcgcgccgcgcccggaaccagcaacgcggcaaaggggtcctgcacgtacccgcgcgcggccagggaacgcttgctgagggcgctgctgtcgttggtgttctgtaccgcgcctgcccgacgctcacggctccgggggcccatggccagaagagactcaggaatggcagtctgtcacggttgtgagccgccccttggttagcacacacctcacggacctcggtagggggaaaaaaaccacccatgctcctggacttccccttccgccggcacttgtgcgtcacttccgggaagagcgcatctcgccaaccagaattgaggagggtgtagccagtgctaagttcgcttgcggctgacctttctttggaatgtcgtgagttccatttgtcccagaatacggtccgctaccgctgtgacatgagtgttagggaaggcgggttgtcacgtttctacaagccttccagtcaaaagggaaaccttgcctaagtccttgtagttgagaaatctctaagaggtggaagcaaatactgcacatgcgtgttggtcctgtgagggaaaccagctagtggagagggagaggttgaaggaacagaaaaatgagaagacaactcactggaggctgaagtgggaggatcgcttgagtctggaagcttgagactgcagcaagctgtgatcgtgacactgcactccagcctgggcaacaaagtaagatcctgtctcaaaagaaaaaaaaaaaaaggtgaagctgaacccagatctacacatacagctaatcttaccaaaatgtgtggaagtaaagcaatctgaaggaaattcagtaccatacaatttactgactgaaatacatcatatggctcatactaagaataagagtggagaagaatcattttttcctgctaaaatgatagaggcagaagagcaacagccttgcaagacagacttctattctgaattggccaaaagtggaacttcatgcccacttgaatggatccattagttctcataccatgaagaaattaatagcccagaagccagatcttaaaatccacgatcagatgactgtgattgacaagggaaagaaaagaacttgtggaagaatgtttccagatgtttcaaactattcatcagcttactagtagccctgaagatatctaatggtcacaaaagatgtcataaaagaatttgcagatgacggcgtcaagtacctggaactaaggagcacacccag

SEQ ID NO: 278831 - DNA, 1139 bp, Homo sapiens
aatgagcggtgcgcggcgcgccgcgcccggaaccagcaacgcggcaaaggggtcctgcacgtacccgcgcgcggccagggaacgcttgctgagggcgctgctgtcgttggtgttctgtaccgcgcctgcccgacgctcacggctccgggggcccatggccagaagagactcaggaatggcagtctgtcacggttgtgagccgccccttggttagcacacacctcacggacctcggtagggggaaaaaaaccacccatgctcctggacttccccttccgccggcacttgtgcgtcacttccgggaagagcgcatctcgccaaccagaattgaggagggtgtagccagtgctaagttcgcttgcggctgacctttctttggaatgtcgtgagttccatttgtcccagaatacggtccgctaccgctgtgacatgagtgttagggaaggcgggttgtcacgtttctacaagccttccagtcaaaagggaaaccttgcctaagtccttgtagttgagaaatctctaagaggaggctgaagtgggaggatcgcttgagtctggaagcttgagactgcagcaagctgtgatcgtgacactgcactccagcctgggcaacaaagtaagatcctgtctcaaaagaaaaaaaaaaaaaggtgaagctgaacccagatctacacatacagctaatcttaccaaaatgtgtggaagtaaagcaatctgaaggaaattcagtaccatacaatttactgactgaaatacatcatatggctcatactaagaataagagtggagaagaatcattttttcctgctaaaatgatagaggcagaagagcaacagccttgcaagacagacttctattctgaattggccaaaagtggaacttcatgcccacttgaatggatccattagttctcataccatgaagaaattaatagcccagaagccagatcttaaaatccacgatcagatgactgtgattgacaagggaaagaaaagaacttgtggaagaatgtttccagatgtttcaaactattcatcagcttactagtagccctgaagatatctaatggtcacaaaagatgtcataaaagaatttgcagatgacggcgtcaagtacctggaactaaggagcacacccag

SEQ ID NO: 278832 - DNA, 998 bp, Homo sapiens
aatgagcggtgcgcggcgcgccgcgcccggaaccagcaacgcggcaaaggggtcctgcacgtacccgcgcgcggccagggaacgcttgctgagggcgctgctgtcgttggtgttctgtaccgcgcctgcccgacgctcacggctccgggggcccatggccagaagagactcaggaatggcagtctgtcacggttgtgagccgccccttggttagcacacacctcacggacctcggtagggggaaaaaaaccacccatgctcctggacttccccttccgccggcacttgtgcgtcacttccgggaagagcgcatctcgccaaccagaattgaggagggtgtagccagtgctaagttcgcttgcggctgacctttctttggaatgtcgaggctgaagtgggaggatcgcttgagtctggaagcttgagactgcagcaagctgtgatcgtgacactgcactccagcctgggcaacaaagtaagatcctgtctcaaaagaaaaaaaaaaaaaggtgaagctgaacccagatctacacatacagctaatcttaccaaaatgtgtggaagtaaagcaatctgaaggaaattcagtaccatacaatttactgactgaaatacatcatatggctcatactaagaataagagtggagaagaatcattttttcctgctaaaatgatagaggcagaagagcaacagccttgcaagacagacttctattctgaattggccaaaagtggaacttcatgcccacttgaatggatccattagttctcataccatgaagaaattaatagcccagaagccagatcttaaaatccacgatcagatgactgtgattgacaagggaaagaaaagaacttgtggaagaatgtttccagatgtttcaaactattcatcagcttactagtagccctgaagatatctaatggtcacaaaagatgtcataaaagaatttgcagatgacggcgtcaagtacctggaactaaggagcacacccag

SEQ ID NO: 278833 - DNA, 1327 bp, Homo sapiens
gaaagtgtcaacatgtttattgctaatataagcatttaatgtcaaagaaatgaaggtaattttacaaactcagtttttgtaagtacatgaagtttctatttgattatgtggttttatatcacattcgttcaaatgcatttctctcccttagagggactattccaacatcactcctttggaattatttcagtcatccttaacatgtgactttaccaaagaccttgaagctaaacaaacaagcaaaacaaaatttcaatgactcttagatgaatggaataagaaatagtcatcacatgtcaattagggatgttcatctccaaccaagacactgtcaaaatgtttcttctgatacagcagttataagtcagagccttcaaaaaacaagggcagaacaagagtacaataaaagaagcatctgcaacttaagcctcccacagtcctaagcctgatatgcgcaaagcaaagcctctttcccgcaaactaaattccatccatttgagctttcagagatcgatgcccaagagctatcattaatatatacagcatattgactctagttgcatcaattatgcctgaagagtttaatacccatccaagtccaaaggtggaagaatacatacactggtatggtaataggcaagagcaggctgtaaaagcaaaggctggctgtgctagtgcagccctgtgggaagttttcttccacagaggctgagtagaacagtcctgctaaagaaaccagtggaataagaacagtcaacgtaggaagagacagaaacattcttctcttccacttattacctgccactgtgttttaaaaggtatatggtattaagaaaagttggctgttgcgtttttttaatttttttaaattatgaactagcgctgctccacttcttcttgcttcttactttgacgtgtcatcctagctgcctgtggtatcatattagggatcccatcaatgattggataagctattcccaactcttcattaatcaattcgtttgttgatgcttcatatctgagcggcttcttggagagcgggcacaccaggaactccagcagcgccggatcgaagtcgcggggcggctcctcagtcttcttgccccggtcggccaaaggccgcgaccccgacgcgtgcaggcacctacgggcgaccgcggacggcggcgcgcgcgttccccgcagcgctgaggcgagcctgcagcgtgctccactcagcatggtctggcagccggagaccaggcctcaccgcagcctcgccacccgtggccgagctcccggcttcccgttcgtccaggccagccgggcaggccccgccccctccgct

SEQ ID NO: 278834 - DNA, 1273 bp, Homo sapiens
gaaagtgtcaacatgtttattgctaatataagcatttaatgtcaaagaaatgaaggtaattttacaaactcagtttttgtaagtacatgaagtttctatttgattatgtggttttatatcacattcgttcaaatgcatttctctcccttagagggactattccaacatcactcctttggaattatttcagtcatccttaacatgtgactttaccaaagaccttgaagctaaacaaacaagcaaaacaaaatttcaatgactcttagatgaatggaataagaaatagtcatcacatgtcaattagggatgttcatctccaaccaagacactgtcaaaatgtttcttctgatacagcagttataagtcagagccttcaaaaaacaagggcagaacaagagtacaataacaaagcctctttcccgcaaactaaattccatccatttgagctttcagagatcgatgcccaagagctatcattaatatatacagcatattgactctagttgcatcaattatgcctgaagagtttaatacccatccaagtccaaaggtggaagaatacatacactggtatggtaataggcaagagcaggctgtaaaagcaaaggctggctgtgctagtgcagccctgtgggaagttttcttccacagaggctgagtagaacagtcctgctaaagaaaccagtggaataagaacagtcaacgtaggaagagacagaaacattcttctcttccacttattacctgccactgtgttttaaaaggtatatggtattaagaaaagttggctgttgcgtttttttaatttttttaaattatgaactagcgctgctccacttcttcttgcttcttactttgacgtgtcatcctagctgcctgtggtatcatattagggatcccatcaatgattggataagctattcccaactcttcattaatcaattcgtttgttgatgcttcatatctgagcggcttcttggagagcgggcacaccaggaactccagcagcgccggatcgaagtcgcggggcggctcctcagtcttcttgccccggtcggccaaaggccgcgaccccgacgcgtgcaggcacctacgggcgaccgcggacggcggcgcgcgcgttccccgcagcgctgaggcgagcctgcagcgtgctccactcagcatggtctggcagccggagaccaggcctcaccgcagcctcgccacccgtggccgagctcccggcttcccgttcgtccaggccagccgggcaggccccgccccctccgct

SEQ ID NO: 278835 - DNA, 1272 bp, Homo sapiens
gaaagtgtcaacatgtttattgctaatataagcatttaatgtcaaagaaatgaaggtaattttacaaactcagtttttgtaagtacatgaagtttctatttgattatgtggttttatatcacattcgttcaaatgcatttctctcccttagagggactattccaacatcactcctttggaattatttcagtcatccttaacatgtgactttaccaaagaccttgaagctaaacaaacaagcaaaacaaaatttcaatgactcttagatgaatggaataagaaatagtcatcacatgtcaattagggatgttcatctccaaccaagacactgtcaaaatgtttcttctgatacagcagttataagtcagagccttcaaaaaacaagggcagaacaagagtacaataaaagaagcatctgcaacttaagcctcccacagtcctaagcctgatatgcgcaaagcaaagcctctttcccgcaaactaaattccatccatttgagctttcagagatcgatgcccaagagctatcattaatatatacagcatattgactctagttgcatcaattatgcctgaagagtttaatacccatccaagtccaaaggtggaagaatacatacactggtatggtaataggcaagcttccacagaggctgagtagaacagtcctgctaaagaaaccagtggaataagaacagtcaacgtaggaagagacagaaacattcttctcttccacttattacctgccactgtgttttaaaaggtatatggtattaagaaaagttggctgttgcgtttttttaatttttttaaattatgaactagcgctgctccacttcttcttgcttcttactttgacgtgtcatcctagctgcctgtggtatcatattagggatcccatcaatgattggataagctattcccaactcttcattaatcaattcgtttgttgatgcttcatatctgagcggcttcttggagagcgggcacaccaggaactccagcagcgccggatcgaagtcgcggggcggctcctcagtcttcttgccccggtcggccaaaggccgcgaccccgacgcgtgcaggcacctacgggcgaccgcggacggcggcgcgcgcgttccccgcagcgctgaggcgagcctgcagcgtgctccactcagcatggtctggcagccggagaccaggcctcaccgcagcctcgccacccgtggccgagctcccggcttcccgttcgtccaggccagccgggcaggccccgccccctccgct

SEQ ID NO: 278836 - DNA, 835 bp, Homo sapiens
cggctctggagggtgcccttttcgcgccgagcccggctcctctttcctgtcggccccgcctcctccccatcgcctggcaacgggacaccggtctggagctaccggattttttccgaccccgccccctcctgcagatcagcgtccccagcggccccccagggcggggcggttacgcccgacgggaacgcccctccccctagaaggtggtggccgcttccacgcgtatgacagggctcgcccctgagtaagggtgggcggatcccagccccgtcgccagaagcttcaagggggctgtcccagggagcatctcccctcatcattacagggtgggagggtccagccagcctgggtgtcttggtgcctgtaacctccccgcctggtcctccgaccgcctggctctcaggaggagttaacttcctgctgcgagtcgaggatggagttacatagtccctgccctgcatctgagatgagcacccatttttggtcaagtcatttatacggagctgtctttcattccaaagagtaacacgcttccctgcagataagagttggagtcagccggtctggaaactgctgaacaccctccaagaaatactgggagtgctggacccttgacccctatgcctccaccgaaccactgacctaaaataaattacaattacagatctttcgacctgtttggtcttacttagaagtaatcccaaaggcctgaggtcacagagatgctaaatgtgaggtttagagaactgtaattaatcatctgcaggaccgaaaaagtgtacattgagcgttttctctttacacgttaaatgaataatgatggatttctattaat

SEQ ID NO: 278837 - DNA, 682 bp, Homo sapiens
aacaactcgagggcggaggccagggaactgccgcccggctttacgtaacttgacccacaggcgggcggcggcaggtggctgcacccggcgagcaaggtgctcgaagccccgagaacgcaggacgccgctcgggcagcgagacggccgggaagcacgagaggccggggagcggcggcggcggcctccttacctttccagatgcccagagagagctgggacgtgtccaagtccaccacatagtcccccaagaaccggttcaacacgtccacgaccaccgactcgaaaaccatgttcctcagccgtggtgggcacggcagccggcccgtgcgctcctcctcccgccgccttccccacgcccctccctcgagagtaacacgcttccctgcagataagagttggagtcagccggtctggaaactgctgaacaccctccaagaaatactgggagtgctggacccttgacccctatgcctccaccgaaccactgacctaaaataaattacaattacagatctttcgacctgtttggtcttacttagaagtaatcccaaaggcctgaggtcacagagatgctaaatgtgaggtttagagaactgtaattaatcatctgcaggaccgaaaaagtgtacattgagcgttttctctttacacgttaaatgaataatgatggatttctattaat

SEQ ID NO: 278838 - DNA, 2687 bp, Homo sapiens
accggcaccggagcgcgccgggtcctcgccgggtcccagccccgcgcgtcggcccagcccagccgggaccccccgcgacatgcgcgtcccagccctgcgctgagcaggcggcaatgtggggactcggggcccggggccccgaccgggggctgctgctggcgctggcgctgggcgggctggcgcgggccgggggcgtcgaggtggagcccggcggcgcgcacggcgagagcgggggcttccaggtggtcaccttcgagtgggcccacgtgcaggatccctacgtcatcgcgctctggatcctcgtggccagcttggccaagatcgggttccacctgtcccacaaggtcaccagcgtggttcccgagagcgccctgctcatcgtgctgggcctggtgctgggcggcatcgtctgggcggccgaccacatcgcgtccttcacactgacgcccaccgtcttcttcttctacctgctgccccccatcgtgctggacgccggctacttcatgcccaaccgcctcttcttcggcaacctggggaccatcctgttgtacgccgtcgtgggtaccgtgtggaacgcggccaccaccgggctgtccctctacggcgtcttcctcagtgggctcatgggcgacctgcagattgggctgctggacttcctcctgtttggcagcctcatggcggctgtggacccggtggccgtcctggccgtgtttgaggaggtccatgtcaacgaggtcctgttcatcatcgtcttcggggagtcgctgctgaacgacgcagtcaccgtggttctgtacaatgtgtttgaatctttcgtggcgctgggaggtgacaacgtgactggcgtggactgcgtgaagggcatagtgtccttcttcgtggtgagcctggggggcacgctggtgggggtggtcttcgccttcctgctgtcgctggtgacgcgcttcaccaagcatgtgcgtatcatcgagcccggcttcgtgttcatcatctcctacctgtcctacctgacgtccgagatgctgtcgctgtcggccatcctcgccatcaccttctgtggcatctgctgtcagaagtatgtgaaggccaacatctcggagcagtcggccaccaccgtgcgctacaccatgaagatgctggccagcagcgccgagaccatcatcttcatgttcctgggtatctcggccgtgaacccgttcatctggacctggaacacggccttcgtgctcctgacgctggtcttcatctccgtgtaccgggccatcggtgtggtcctgcagacctggcttctgaaccgctaccgcatggtgcagctggagcccattgaccaggtggtcctgtcctacgggggcctgcgcggggccgtggcctttgccctggtggtgcttctggatggagacaaggtcaaggagaagaacctgttcgtcagcaccaccatcatcgtagtgttcttcaccgtcatcttccagggcctgaccatcaagcctctggtgcagtggctgaaggtgaagaggagcgagcaccgggaacctcggctcaacgagaagctgcacggccgcgctttcgaccacatcctctcggccatcgaggacatatccggacagatcgggcacaattatctcagagacaagtggtcccacttcgacaggaagttcctcagcagggtcctcatgagacggtcggcccagaagtctcgagaccggatcctgaatgtcttccacgagctgaacctgaaggatgccatcagctacgtggctgagggagagcgccgcgggtccctggccttcatccgctcccccagcaccgacaacgtggtcaacgtggacttcacgccacgatcgtccaccgtggaggcctctgtctcctacctcctgagagaaaatgtcagcgctgtctgcctggacatgcagtctctggagcagcgacggcggagcatccgggacgcggaggacatggtcacgcaccacacgctacagcagtacctgtacaagccgcggcaggagtacaagcatctgtacagccgacacgagctcacgcccacggaggacgagaaacaggaccgggaaatcttccacaggaccatgcggaagcgcctggagtccttcaagtcgaccaagctggggctcaaccagaacaagaaggcagccaagctgtacaagcgggagcgtgcccagaagcggagaaacagcagcatccccaatgggaagctgcccatggagagccctgcgcagaatttcaccatcaaggagaaagacttggaactttcagacaccgaggagccccccaactatgatgaggagatgagtggggggatcgagttcctggctagtgtcaccaaggacacagcgtccgactcccctgcaggaattgacaaccctgtgttttctccggacgaggccctggaccgcagcctcctggccaggctgccgccctggctgtctcccggggagacggtggtcccctcgcagagggcccgcacgcagattccctactctcccggcaccttccgccgcctgatgcccttccgcctcagcagcaagtccgtggactccttcctgcaggcagacggccccgaggagcggccccccgccgccctccccgagtccacacacatgtgacaccggctccgacacgccgctaaccggccgctcgtccccgcgccacggtccgcccaccgccgccgccgc

SEQ ID NO: 278839 - DNA, 1434 bp, Homo sapiens
  misc_feature (1209)..(1209): n is a, c, g, or t
  misc_feature (1264)..(1264): n is a, c, g, or t
accggcaccggagcgcgccgggtcctcgccgggtcccagccccgcgcgtcggcccagcccagccgggaccccccgcgacatgcgcgtcccagccctgcgctgagcaggcggcaatgtggggactcggggcccggggccccgaccgggggctgctgctggcgctggcgctgggcgggctggcgcgggccgggggcgtcgaggtggagcccggcggcgcgcacggcgagagcgggggcttccaggtggtcaccttcgagtgggcccacgtgcaggatccctacgtcatcgcgctctggatcctcgtggccagcttggccaagatcgggttccacctgtcccacaaggtcaccagcgtggttcccgagagcgccctgctcatcgtgctgggcctggtgctgggcggcatcgtctgggcggccgaccacatcgcgtccttcacactgacgcccaccgtccttcctgctgtcgctggtgacgcgcttcaccaagcatgtgcgtatcatcgagcccggcttcgtgttcatcatctcctacctgtcctacctgacgtccgagatgctgtcgctgtcggccatcctcgccatcaccttctgtggcatctgctgtcagaagtatgtgaaggccaacatctcggagcagtcggccaccaccgtgcgctacaccatgaagatgctggccagcagcgccgagaccatcatcttcatgttcctgggtatctcggccgtgaacccgttcatctggacctggaacacggccttcgtgctcctgacgctggtcttcatctccgtgtaccgggccatcggtgtggtcctgcagacctggcttctgaaccgctaccgcatggtgcagctggagcccattgaccaggtggtcctgtcctacgggggcctgcgcggggccgtggcctttgccctggtggtgcttctggatggagacaaggtcaaggagaagaacctgttcgtcagcaccaccatcatcgtagtgttcttcaccgtcatcttccagggcctgaccatcaagcctctggtgcagtggctgaaggtgaagaggagcgagcaccgggaacctcggctcaacgagaagctgcacggccgcgctttcgaccacatcctctcggccatcgaggacatatccggacagatcgggcacaattatctcagagacaaggctcaagcctgtaatcccagcactttgggagactgaggtggncagctcacttgaggtcaggagtttgagaccagcctagccaacatggtgaaacccngtctctactaaaaatacaaacattagccaggggtggtggcgtgggcctgtaatcccagctactcaggaggctaaggcacaagaatcgcttgaacccgggaggtggaggctgcggtgagccgagattgcgccattacattccagcctggtgacagagcgagacttcgtccc

SEQ ID NO: 278840 - DNA, 1115 bp, Homo sapiens
gtgcagatgctggggtccccgagtcttacagccagggctttggagagggaccagtaaggaaagggacccacttcagacaggaggccaggaaggcctcgtggggagtcagcctaagccccgaggggagaaggggctggccagatggcagatgtccccgtgccccagccgggtgcccaccgtgggaaggcgaggggcacgcaggaggcagccagggccagatgcccgccgtgggaaggcgaggggcgcgcaagagaccccaccctgagggagcctgtatggctcagcgctggtccccacgcaggagagaaaatgtcagcgctgtctgcctggacatgcagtctctggagcagcgacggcggagcatccgggacgcggaggacatggtcacgcaccacacgctacagcagtacctgtacaagccgcggcaggagtacaagcatctgtacagccgacacgagctcacgcccacggaggacgagaaacaggaccgggaaatcttccacaggaccatgcggaagcgcctggagtccttcaagtcgaccaagctggggctcaaccagaacaagaaggcagccaagctgtacaagcgggagcgtgcccagaagcggagaaacagcagcatccccaatgggaagctgcccatggagagccctgcgcagaatttcaccatcaaggagaaagacttggaactttcagacaccgaggagccccccaactatgatgaggagatgagtggggggatcgagttcctggctagtgtcaccaaggacacagcgtccgactcccctgcaggaattgacaaccctgtgttttctccggacgaggccctggaccgcagcctcctggccaggctgccgccctggctgtctcccggggagacggtggtcccctcgcagagggcccgcacgcagattccctactctcccggcaccttccgccgcctgatgcccttccgcctcagcagcaagtccgtggactccttcctgcaggcagacggccccgaggagcggccccccgccgccctccccgagtccacacacatgtgacaccggctccgacacgccgctaaccggccgctcgtccccgcgccacggtccgcccaccgccgccgccgc

SEQ ID NO: 278841 - DNA, 484 bp, Homo sapiens
gcggccgcgcggacgcacctgcggggtcacccgggcgtcagccccgcgccccccgcggcccgtggccctccccgcagggacggggccgaacgtggccgcccaggggaggcagtaaaatcagcctccagccaagtgtgtttgctcaggtcctaaactctgagtccgcagactgagatgacgccccggattttgtgggcagcgctgcaacttaccctctccgaaagcccgggagtaggggagcggctcctccggcccccagccctcggcgctcccagtcacctctccgaaatgactggaggtccagttgagcggtgactgtcggtgcttctgagtggcaaccttggtgacttcctctctaccgccgttatgtttctctctttgatagcctttaaaaaatattgaaaatgtgagactgataatgattgagaaacaaatattttatgcaattaaaactgaaattatgaataaaatgtttcttactgtt

SEQ ID NO: 278842 - DNA, 521 bp, Homo sapiens
gcggccgcgcggacgcacctgcggggtcacccgggcgtcagccccgcgccccccgcggcccgtggccctccccgcagggacggggccgaacgtggccgcccaggggaggcagtaaaatcagcctccagccaagtgtgtttgctcaggtaaaccctgcttgttagggatgtgaaacaaactatcaggggtgcggcctgcaagccgggcttgctctctcccttcctttcacatgttaacctctggctgtggcttcacctgacagtgattaagcacaggcctcctgggcgggaccacccacgggtgtgatgacgccaaacccaccggcgaggggcctcctggggacgcggtgtctgggagaagccaagcaagagtccgctgttatcttggcttgggatatttattttcaacacatttaaatcacagttctctagatctgcagcaaaataaccattgaagagcaaatacaacgttttaccaatgaaagagtaaaactttttaacacctcactaggaactgtctct

SEQ ID NO: 278843 - DNA, 314 bp, Homo sapiens
ctaaacttgaaaaatatgcaggaagcatgtctgccatttactctagagggagacattatctgtatctttgaagactgtaagtaagcctgtcctttgctccacggctctgagagtctaccttccaacattctttaaaagtttcggattatgaaataaaatgctgttcatccactgaagaacagacccttgcttcctgcactatcttcaaaagtttaggtcggaggagcttcctttttcagacaatacatctttgatgatcgaaaacaacaacaacctgatacagttccttgcagttctaaaagcccaatagtcca

SEQ ID NO: 278844 - DNA, 181 bp, Homo sapiens
ctaaacttgaaaaatatgcaggaagcatgtctgccatttactctagagggagacattatctgtatctttgaagactgtaagtaagcctgtcctttgctccacggctctgagagtctaccttccaacattctttaaaaggtaagttggctgggcatggtggctcacgcctataatcccagca

SEQ ID NO: 278845 - DNA, 807 bp, Homo sapiens
ctaaacttgaaaaatatgcaggaagcatgtctgccatttactctagagggagacattatctgtatctttgaagactgtaagtaagcctgtcctttgctccacggctctgagagtctaccttccaacattctttaaaagtttcggattatgaaataaaatgctgttcatccactgaagaacagacccttgcttcctgcactatcttcaaaagtttaggtcggaggaggtaaaattttaaaaactgatttgttctccttgggatacagtgagatgtggaattcgttaggaatgataattattaatagaaaagatcaaaagaaggaaagaaacgttaatagtgtttataagcattgtgaactttcaacaaagctgaaacgttacgatttcaagatgaaaaaacggctttggggaagggaaatccacctcgagaatgaagacaagtgcggagcgaatagaatttcaggggagatgaaaaggggattgggaaaaacgtgggatctggtaacaaaaaggggggtttgttcttgaagggcgttctgcggggcgggcgttaagaggggtgcgtgcgtgcgcctgggtgaagtttgtactcagggctgcgataatcgaggtgacaaagttgtggaagtagaattcggaggtccgggagcaggaaggggaaggaatgtggggatttccaggctgggctgacaagttccgggcgctgctctcagggggaagggaggtctcctcgagtgccagatagcccgtccgaaaccaccgacactctaactccagctacgcgacccagcacccggcccctcctca

SEQ ID NO: 278846 - DNA, 423 bp, Homo sapiens
gatttacataatcttctaacatcttcctgggttcccagctatacactgaaaaaaagcagttgctgagtctaccaacagccttgtcatgtgagacaaggtgaattacataactgcatcataatctacttactacttcttatgggttgaattgtgtcctgaagaaaaatatgctaaagtcctcgcacctggtacctgtgaatgtgaccttacatatatctatagcacttggccctctacctcacacaagtgaaaacttcactccagatttgaatcccagtggtttctggatcagatccccctctccaggaaaatcctgttaacggttcttctgggtcacccaaccaatttgaatggccactttccttctacagaagtaagaaatttctattaaatcttaaattaaaaattttatgcatcaaggat

SEQ ID NO: 278847 - DNA, 637 bp, Homo sapiens
gatttacataatcttctaacatcttcctgggttcccagctatacactgaaaaaaagcagttgctgagtctaccaacagccttgtcatgtgagacaaggtgaattacataactgcatcataatctacttactacttcttatgggttgaattgtgtcctgaagaaaaatatgctaaagtcctcgcacctggtacctgtgaatgtgaccttacatatatctatagcacttggccctctacctcacacaaggtaagcattcgaaaaatggttgaaaggaaggagcttagaaaggaataaatttcaggtgaaatggtgaccaactcaagttgtgatcgaagttttacagagcaacagctctcaaccactaagccatggcactggtacagaactaccaattatgaagtacagacaattgccataagcaacattaaggatcgaggtttaggaggaattttccttgttttttaaaataaacataaaatagaactaattcaaggtaatccctataataatgacacccttactcactcacattctgatgctttcttgaatgtcagtgggagaagtagcattagagtaacataccagaattgcatccaaccctggaatactcacaaaagagcattttgtgggaaaaac

SEQ ID NO: 278848 - DNA, 2162 bp, Homo sapiens
gaattccgggtctcaaatagggattggtttaaatgatctggagacagcaccaaagcaaataataaactaaaaaatgtccagtcattaaactgttaaaatgaaattcaggtttccaaagtactttagaaatcatgtaatccaggctggggaagatggcggtggctggggcggtgtccggggagccgctggtgcactggtgcacccagcagttgcggaagactttcggcctggatgtcagcgaggagatcattcagtacgttttgtcaattgagagtgctgaagagatacgagaatatgttactgatctcctccagggaaatgaaggcaaaaaaggtcaattcatagaagaacttataaccaaatggcaaaagaatgatcaggagttgatttcggatcctttgcagcagtgcttcaaaaaagatgaaattttagatgggcagaaatcaggcgaccatctaaagcggggtaggaagaaagggagaaacagacaggaagttcctgcatttactgaacctgacacgactgcagaggttaaaacaccttttgatttggccaaggcacaagagaacagcaactccgtaaagaagaagacaaagtttgtcaatttatacacaagagagggacaggacaggcttgcagtcctgctccctggtcgtcacccttgtgattgcctgggccagaagcacaagctcatcaataactgtctgatctgtgggcgcattgtctgtgaacaagaaggctcaggcccttgcttattctgtggcactctggtgtgtactcatgaggaacaagatattttacagcgtgactcaaacaagagccagaaactgctaaagaaactcatgtcaggagtggagaattctggaaaggtggacatctctaccaaggaccttcttcctcatcaagaattgcgaattaagtctggtctggagaaggctatcaagcataaagacaaactgttagagtttgacagaactagtattcgaaggacccaagtcattgatgatgagtcagattactttgccagtgattctaaccaatggttgtccaaacttgagcgggaaaccttgcagaagcgagaggaggagctgagagaacttcgacacgcctctcgactttctaagaaggtcaccattgactttgcaggaaggaagatcctggaagaagaaaattcactagcagagtatcatagcagactagatgagacaatacaggccattgccaatggaaccttgaaccagccactgaccaaattggatagatcttctgaagagcctttgggagttctggtaaatcccaacatgtaccagtcccctccccagtgggttgaccacacaggtgcagcctcacagaagaaggctttccgttcttcaggatttggactagagttcaactcatttcagcaccagttgcgaatccaggatcaagaatttcaggaaggctttgatggtggctggtgcctctctgtacatcagccctgggcttctctgcttgtcagagggattaaaagggtggagggcagatcctggtacaccccccacagaggacgactttggatagcagccacagctaaaaaaccctcccctcaagaagtctcagaactccaggctacatatcgtcttcttcgtgggaaagatgtggaatttcctaatgactatccgtcaggttgtcttctgggctgtgtggacctaattgactgcttgtcccagaagcaatttaaggagcagtttccagacatcagtcaagaatctgattctccatttgttttcatctgcaaaaatcctcaggaaatggttgtgaagtttcctattaaaggaaatccaaaaatctggaaattggattccaagatccatcaaggagcaaagaaggggttaatgaagcagaataaagctgtctgacccaggagaaaaggaactatacagcatagtggagttttgtgtactaaaattgctatctactggtcctttggaattgaagtagtagaaacctaaaggcttggcgtcaggcttgaatatctcagaacttaaactcttaccaaaatctgtatatttttcttaaggagtgggattcctactttatgtaatggggtcgaaatctttgaacacattatttataaaaacctgtttaaaaattctaatctaagtcttttgacatttttctta

SEQ ID NO: 278849 - DNA, 650 bp, Homo sapiens
tttaatgaagttgttcccactataggaaatcagagatggcaggcaatagactgtataatgctgtactaaggattgtagaaaggtgaaggtttgttcttgcttgttgagcataatcctctttacctgtgaaatggaaagtagtatcatcagaatgttgaggtgaaatctgggacatcttctgttctccttaaattcaaaagctgtcccaactatcctgaccttttattttatattcaacagtttccagacatcagtcaagaatctgattctccatttgttttcatctgcaaaaatcctcaggaaatggttgtgaagtttcctattaaaggaaatccaaaaatctggaaattggattccaagatccatcaaggagcaaagaaggggttaatgaagcagaataaagctgtctgacccaggagaaaaggaactatacagcatagtggagttttgtgtactaaaattgctatctactggtcctttggaattgaagtagtagaaacctaaaggcttggcgtcaggcttgaatatctcagaacttaaactcttaccaaaatctgtatatttttcttaaggagtgggattcctactttatgtaatggggtcgaaatctttgaacacattatttataaaaacctgtttaaaaattctaa

SEQ ID NO: 278850 - DNA, 454 bp, Homo sapiens
ttttggtctctctgttctgtccaaatgagacaagcatttccagttgtccagaactcagccagtaatctgattctccatttgttttcatctgcaaaaatcctcaggaaatggttgtgaagtttcctattaaaggaaatccaaaaatctggaaattggattccaagatccatcaaggagcaaagaaggggttaatgaagcagaataaagctgtctgacccaggagaaaaggaactatacagcatagtggagttttgtgtactaaaattgctatctactggtcctttggaattgaagtagtagaaacctaaaggcttggcgtcaggcttgaatatctcagaacttaaactcttaccaaaatctgtatatttttcttaaggagtgggattcctactttatgtaatggggtcgaaatctttgaacacattatttataaaaacctgtttaaaaattctaa

SEQ ID NO: 278851 - DNA, 462 bp, Homo sapiens
acagaatgaaactctgaagtttggaagtgtctgagtcctgaagtaagataattgaatgtgacaggaacacagtaaccagaagacctgggaggctgcaaaagatttgcattgcaaatacaaaaataaataatgagacttatttttctcccttacagggaaattggattccaagatccatcaaggagcaaagaaggggttaatgaagcagaataaagctgtctgacccaggagaaaaggaactatacagcatagtggagttttgtgtactaaaattgctatctactggtcctttggaattgaagtagtagaaacctaaaggcttggcgtcaggcttgaatatctcagaacttaaactcttaccaaaatctgtatatttttcttaaggagtgggattcctactttatgtaatggggtcgaaatctttgaacacattatttataaaaacctgtttaaaaattctaa

SEQ ID NO: 278852 - DNA, 360 bp, Homo sapiens
gtgtgtttgttgatgatttaatattattttagatttccgggagttacgtcaggggaaattggattccaagatccatcaaggagcaaagaaggggttaatgaagcagaataaagctgtctgacccaggagaaaaggaactatacagcatagtggagttttgtgtactaaaattgctatctactggtcctttggaattgaagtagtagaaacctaaaggcttggcgtcaggcttgaatatctcagaacttaaactcttaccaaaatctgtatatttttcttaaggagtgggattcctactttatgtaatggggtcgaaatctttgaacacattatttataaaaacctgtttaaaaattctaa

SEQ ID NO: 278853 - DNA, 917 bp, Homo sapiens
ggatcaggtgaaaagcagtcaagagttgagagagatgacttgtcgctattctgatggaggagaaattagtggacagagttcatcctcaagtgaaaagtattgtgagagaaaagtgtttttgacaaaagatactgctcttgagaaggcatcatctatagacctcttggttcaactggataatttgctataggatttgttatatattatgggatattccaggaaactagaatttatatccttcccactaaatttctatttgtttaagggtggagggcagatcctggtacaccccccacagaggacgactttggatagcagccacagctaaaaaaccctcccctcaagaagtctcagaactccaggctacatatcgtcttcttcgtgggaaagaggtaacagccgcatattctcctttcaattttactttatggagagaagtcattgacgttcatcttctttcacttccttctttctttggctttttctttgttaaaagagacttttaatctttgtatatgtttgtttgtttagtggtaaatcattgacagcgttcaaagcattaatctgtcaaaacagtgcaaataaaaatatcaatttccaacacaagaaatcaactagtcttaatttttttatctgagaaaatcatcttctttactctaaaggtaaaatgactagtgtaaactctgagatccttacattgggaagaacaaccacaaataggaattttcattgagagtggcctaaatagacacctactattggatttgtacaaatcaaagttgattgatttaagcaacgtattttgggaatcaccccaagaatactaactttggatccttaaaaagacttctgacctttgggcatcctgtttttcctttgtgttatccagctcatacagttgttttgagggtagaata

SEQ ID NO: 278854 - DNA, 2678 bp, Homo sapiens
cctgtagtcccagctacttgggaggctgaggcaggagaatggcatgaacccgggaggcggagcttgcagtgagccgagatcacgccactgcactcaagcctgggcgacagtgcgagactccgtctcaaaataaataaattaaattaattaattaattaaaaaattaaaacccccaccagagcaaaaacttacagcgcttacaataccttccacgtgctgttttattttacataaaaccatgacgattaaaaagctggcctctcagccttccgggtattggtttgttttccccctaaactgtcgtttttataggcacttgcactgtcttcttagcagaattgccaatggccttcctcgagtcctacgtttagcgattggcaagaatcatgcactgacagagctcgactccggagggcacaaggaagtagacaacaaagcaggaagaagcaggaggcgcacagatgagcgggatctgcactggaggcggtgcgaccttgcggggcggtgcaagctggcggaacccgcgtgagagaggttggtgttgcgaagggaactagtccggtgcaggacgtggggcttttgcagctcagctggttccggctggggaagatggcggtggctggggcggtgtccggggagccgctggtgcactggtgcacccagcagttgcggaagactttcggcctggatgtcagcgaggagatcattcagtgagaacagttcgggtccaagcggggaaggagctctgggatgtgcactgcctgagcgaaccgggaagcggggaggactgaaaagtacgttttgtcaattgagagtgctgaagagatacgagaatatgttactgatctcctccagggaaatgaaggcaaaaaaggtcaattcatagaagaacttataaccaaatggcaaaagaatgatcaggagttgatttcggatcctttgcagcagtgcttcaaaaaagatgaaattttagatgggcagaaatcaggcgaccatctaaagcggggtaggaagaaagggagaaacagacaggaagttcctgcatttactgaacctgacacgactgcagaggttaaaacaccttttgatttggccaaggcacaagagaacagcaactccgtaaagaagaagacaaagtttgtcaatttatacacaagagagggacaggacaggcttgcagtcctgctccctggtcgtcacccttgtgattgcctgggccagaagcacaagctcatcaataactgtctgatctgtgggcgcattgtctgtgaacaagaaggctcaggcccttgcttattctgtggcactctggtgtgtactcatgaggaacaagatattttacagcgtgactcaaacaagagccagaaactgctaaagaaactcatgtcaggagtggagaattctggaaaggtggacatctctaccaaggaccttcttcctcatcaagaattgcgaattaagtctggtctggagaaggctatcaagcataaagacaaactgttagagtttgacagaactagtattcgaaggacccaagtcattgatgatgagtcagattactttgccagtgattctaaccaatggttgtccaaacttgagcgggaaaccttgcagaagcgagaggaggagctgagagaacttcgacacgcctctcgactttctaagaaggtcaccattgactttgcaggaaggaagatcctggaagaagaaaattcactagcagagtatcatagcagactagatgagacaatacaggccattgccaatggaaccttgaaccagccactgaccaaattggatagatcttctgaagagcctttgggagttctggtaaatcccaacatgtaccagtcccctccccagtgggttgaccacacaggtgcagcctcacagaagaaggctttccgttcttcaggatttggactagagttcaactcatttcagcaccagttgcgaatccaggatcaagaatttcaggaaggctttgatggtggctggtgcctctctgtacatcagccctgggcttctctgcttgtcagagggattaaaagggtggagggcagatcctggtacaccccccacagaggacgactttggatagcagccacagctaaaaaaccctcccctcaagaagtctcagaactccaggctacatatcgtcttcttcgtgggaaagatgtggaatttcctaatgactatccgtcaggttgtcttctgggctgtgtggacctaattgactgcttgtcccagaagcaatttaaggagcagtttccagacatcagtcaagaatctgattctccatttgttttcatctgcaaaaatcctcaggaaatggttgtgaagtttcctattaaaggaaatccaaaaatctggaaattggattccaagatccatcaaggagcaaagaaggggttaatgaagcagaataaagctgtctgacccaggagaaaaggaactatacagcatagtggagttttgtgtactaaaattgctatctactggtcctttggaattgaagtagtagaaacctaaaggcttggcgtcaggcttgaatatctcagaacttaaactcttaccaaaatctgtatatttttcttaaggagtgggattcctactttatgtaatggggtcgaaatctttgaacacattatttataaaaacctgtttaaaaattctaa

SEQ ID NO: 278855 - DNA, 3127 bp, Homo sapiens
  misc_feature (3104)..(3104): n is a, c, g, or t
cctgtagtcccagctacttgggaggctgaggcaggagaatggcatgaacccgggaggcggagcttgcagtgagccgagatcacgccactgcactcaagcctgggcgacagtgcgagactccgtctcaaaataaataaattaaattaattaattaattaaaaaattaaaacccccaccagagcaaaaacttacagcgcttacaataccttccacgtgctgttttattttacataaaaccatgacgattaaaaagctggcctctcagccttccgggtattggtttgttttccccctaaactgtcgtttttataggcacttgcactgtcttcttagcagaattgccaatggccttcctcgagtcctacgtttagcgattggcaagaatcatgcactgacagagctcgactccggagggcacaaggaagtagacaacaaagcaggaagaagcaggaggcgcacagatgagcgggatctgcactggaggcggtgcgaccttgcggggcggtgcaagctggcggaacccgcgtgagagaggttggtgttgcgaagggaactagtccggtgcaggacgtggggcttttgcagctcagctggttccggctggggaagatggcggtggctggggcggtgtccggggagccgctggtgcactggtgcacccagcagttgcggaagactttcggcctggatgtcagcgaggagatcattcagtacgttttgtcaattgagagtgctgaagagatacgagaatatgttactgatctcctccagggaaatgaaggcaaaaaaggtcaattcatagaagaacttataaccaaatggcaaaagaatgatcaggagttgatttcggatcctttgcagcagtgcttcaaaaaagatgaaattttagatgggcagaaatcaggcgaccatctaaagcggggtaggaagaaagggagaaacagacaggaagttcctgcatttactgaacctgacacgactgcagaggttaaaacaccttttgatttggccaaggcacaagagaacagcaactccgtaaagaagaagacaaagtttgtcaatttatacacaagagagggacaggacaggcttgcagtcctgctccctggtcgtcacccttgtgattgcctgggccagaagcacaagctcatcaataactgtctgatctgtgggcgcattgtctgtgaacaagaaggctcaggcccttgcttattctgtggcactctggtgtgtactcatgaggaacaagatattttacagcgtgactcaaacaagagccagaaactgctaaagaaactcatgtcaggagtggagaattctggaaaggtggacatctctaccaaggaccttcttcctcatcaagaattgcgaattaagtctggtctggagaaggctatcaagcataaagacaaactgttagagtttgacagaactagtattcgaaggacccaagtcattgatgatgagtcagattactttgccagtgattctaaccaatggttgtccaaacttgagcgggaaaccttgcagaagcgagaggaggagctgagagaacttcgacacgcctctcgactttctaagaaggtcaccattgactttgcaggaaggaagatcctggaagaagaaaattcactagcagagtatcatagcagactagatgagacaatacaggccattgccaatggaaccttgaaccagccactgaccaaattggatagatcttctgaagagcctttgggagttctggtaaatcccaacatgtaccagtcccctccccagtgggttgaccacacaggtgcagcctcacagaagaaggctttccgttcttcaggatttggactagagttcaactcatttcagcaccagttgcgaatccaggatcaagaatttcaggaaggctttgatggtggctggtgcctctctgtacatcagccctgggcttctctgcttgtcagagggattaaaagggtggagggcagatcctggtacaccccccacagaggacgactttggatagcagccacagctaaaaaaccctcccctcaagaagtctcagaactccaggctacatatcgtcttcttcgtgggaaagatgtggaatttcctaatgactatccgtcaggttgtcttctgggctgtgtggacctaattgactgcttgtcccagaagcaatttaaggagcagtttccagacatcagtcaagaatctgattctccatttgttttcatctgcaaaaatcctcaggaaatggttgtgaagtttcctattaaaggaaatccaaaaatctggaaattggattccaagatccatcaaggagcaaagaaggggttaatgaagcagaataaagctgtctgacccaggagaaaaggaactatacagcatagtggagttttgtgtactaaaattgctatctactggtcctttggaattgaagtagtagaaacctaaaggcttggcgtcaggcttgaatatctcagaacttaaactcttaccaaaatctgtatatttttcttaaggagtgggattcctactttatgtaatggggtcgaaatctttgaacacattatttataaaaacctgtttaaaaattctaaactaagagaacacttgaactgtctatggtttagacctgcaccccataaagtgggaattagatctgctctatcgaactggaagaaggaattatgaaagaattttcggctttgagagggttacagggggagccttgtgtgagctcttctttgtggggggggaatattaccacccctcgaaaaagtaaattcctgggggttttagagttgggacgtagttttacttttcctaggggggataagtgtttttatagcgatacgtgggaccccgagaaaaaactagtttataataagcgcttctaaataggaaaaacctgaagaaggggccgtgtagagtgtttctcatcctctccctccccaaaagaagatatataatatctcttctcctgtatgacgttgaacaccctatgtgctatattagcaccggggtgctgctataaatgactcttcgagttattgattagactaaacgcataaatataaataactctcctttctgcttctgaatagtanagtttattatttcacaccgtatg

SEQ ID NO: 278856 - DNA, 2464 bp, Homo sapiens
cctgtagtcccagctacttgggaggctgaggcaggagaatggcatgaacccgggaggcggagcttgcagtgagccgagatcacgccactgcactcaagcctgggcgacagtgcgagactccgtctcaaaataaataaattaaattaattaattaattaaaaaattaaaacccccaccagagcaaaaacttacagcgcttacaataccttccacgtgctgttttattttacataaaaccatgacgattaaaaagctggcctctcagccttccgggtattggtttgttttccccctaaactgtcgtttttataggcacttgcactgtcttcttagcagaattgccaatggccttcctcgagtcctacgtttagcgattggcaagaatcatgcactgacagagctcgactccggagggcacaaggaagtagacaacaaagcaggaagaagcaggaggcgcacagatgagcgggatctgcactggaggcggtgcgaccttgcggggcggtgcaagctggcggaacccgcgtgagagaggttggtgttgcgaagggaactagtccggtgcaggacgtggggcttttgcagctcagctggttccggctggggaagatggcggtggctggggcggtgtccggggagccgctggtgcactggtgcacccagcagttgcggaagactttcggcctggatgtcagcgaggagatcattcagtacgttttgtcaattgagagtgctgaagagatacgagaatatgttactgatctcctccagggaaatgaaggcaaaaaaggtcaattcatagaagaacttataaccaaatggcaaaagaatgatcaggagttgatttcggatcctttgcagcagtgcttcaaaaaagatgaaattttagatgggcagaaatcaggcgaccatctaaagcggggtaggaagaaagggagaaacagacaggaagttcctgcatttactgaacctgacacgactgcagaggttaaaacaccttttgatttggccaaggcacaagagaacagcaactccgtaaagaagaagacaaagtttgtcaatttatacacaagagagggacaggacaggcttgcagtcctgctccctggtcgtcacccttgtgattgcctgggccagaagcacaagctcatcaataactgtctgatctgtgggcgcattgtctgtgaacaagaaggctcaggcccttgcttattctgtggcactctggtgtgtactcatgaggaacaagatattttacagcgtgactcaaacaagagccagaaactgctaaagaaactcatgtcagtattcgaaggacccaagtcattgatgatgagtcagattactttgccagtgattctaaccaatggttgtccaaacttgagcgggaaaccttgcagaagcgagaggaggagctgagagaacttcgacacgcctctcgactttctaagaaggtcaccattgactttgcaggaaggaagatcctggaagaagaaaattcactagcagagtatcatagcagactagatgagacaatacaggccattgccaatggaaccttgaaccagccactgaccaaattggatagatcttctgaagagcctttgggagttctggtaaatcccaacatgtaccagtcccctccccagtgggttgaccacacaggtgcagcctcacagaagaaggctttccgttcttcaggatttggactagagttcaactcatttcagcaccagttgcgaatccaggatcaagaatttcaggaaggctttgatggtggctggtgcctctctgtacatcagccctgggcttctctgcttgtcagagggattaaaagggtggagggcagatcctggtacaccccccacagaggacgactttggatagcagccacagctaaaaaaccctcccctcaagaagtctcagaactccaggctacatatcgtcttcttcgtgggaaagatgtggaatttcctaatgactatccgtcaggttgtcttctgggctgtgtggacctaattgactgcttgtcccagaagcaatttaaggagcagtttccagacatcagtcaagaatctgattctccatttgttttcatctgcaaaaatcctcaggaaatggttgtgaagtttcctattaaaggaaatccaaaaatctggaaattggattccaagatccatcaaggagcaaagaaggggttaatgaagcagaataaagctgtctgacccaggagaaaaggaactatacagcatagtggagttttgtgtactaaaattgctatctactggtcctttggaattgaagtagtagaaacctaaaggcttggcgtcaggcttgaatatctcagaacttaaactcttaccaaaatctgtatatttttcttaaggagtgggattcctactttatgtaatggggtcgaaatctttgaacacattatttataaaaacctgtttaaaaattctaa

SEQ ID NO: 278857 - DNA, 2227 bp, Homo sapiens
cctgtagtcccagctacttgggaggctgaggcaggagaatggcatgaacccgggaggcggagcttgcagtgagccgagatcacgccactgcactcaagcctgggcgacagtgcgagactccgtctcaaaataaataaattaaattaattaattaattaaaaaattaaaacccccaccagagcaaaaacttacagcgcttacaataccttccacgtgctgttttattttacataaaaccatgacgattaaaaagctggcctctcagccttccgggtattggtttgttttccccctaaactgtcgtttttataggcacttgcactgtcttcttagcagaattgccaatggccttcctcgagtcctacgtttagcgattggcaagaatcatgcactgacagagctcgactccggagggcacaaggaagtagacaacaaagcaggaagaagcaggaggcgcacagatgagcgggatctgcactggaggcggtgcgaccttgcggggcggtgcaagctggcggaacccgcgtgagagagggaaatgaaggcaaaaaaggtcaattcatagaagaacttataaccaaatggcaaaagaatgatcaggagttgatttcggatcctttgcagcagtgcttcaaaaaagatgaaattttagatgggcagaaatcaggcgaccatctaaagcggggtaggaagaaagggagaaacagacaggaagttcctgcatttactgaacctgacacgactgcagaggttaaaacaccttttgatttggccaaggcacaagagaacagcaactccgtaaagaagaagacaaagtttgtcaatttatacacaagagagggacaggacaggcttgcagtcctgctccctggtcgtcacccttgtgattgcctgggccagaagcacaagctcatcaataactgtctgatctgtgggcgcattgtctgtgaacaagaaggctcaggcccttgcttattctgtggcactctggtgtgtactcatgaggaacaagatattttacagcgtgactcaaacaagagccagaaactgctaaagaaactcatgtcagtattcgaaggacccaagtcattgatgatgagtcagattactttgccagtgattctaaccaatggttgtccaaacttgagcgggaaaccttgcagaagcgagaggaggagctgagagaacttcgacacgcctctcgactttctaagaaggtcaccattgactttgcaggaaggaagatcctggaagaagaaaattcactagcagagtatcatagcagactagatgagacaatacaggccattgccaatggaaccttgaaccagccactgaccaaattggatagatcttctgaagagcctttgggagttctggtaaatcccaacatgtaccagtcccctccccagtgggttgaccacacaggtgcagcctcacagaagaaggctttccgttcttcaggatttggactagagttcaactcatttcagcaccagttgcgaatccaggatcaagaatttcaggaaggctttgatggtggctggtgcctctctgtacatcagccctgggcttctctgcttgtcagagggattaaaagggtggagggcagatcctggtacaccccccacagaggacgactttggatagcagccacagctaaaaaaccctcccctcaagaagtctcagaactccaggctacatatcgtcttcttcgtgggaaagatgtggaatttcctaatgactatccgtcaggttgtcttctgggctgtgtggacctaattgactgcttgtcccagaagcaatttaaggagcagtttccagacatcagtcaagaatctgattctccatttgttttcatctgcaaaaatcctcaggaaatggttgtgaagtttcctattaaaggaaatccaaaaatctggaaattggattccaagatccatcaaggagcaaagaaggggttaatgaagcagaataaagctgtctgacccaggagaaaaggaactatacagcatagtggagttttgtgtactaaaattgctatctactggtcctttggaattgaagtagtagaaacctaaaggcttggcgtcaggcttgaatatctcagaacttaaactcttaccaaaatctgtatatttttcttaaggagtgggattcctactttatgtaatggggtcgaaatctttgaacacattatttataaaaacctgtttaaaaattctaa

SEQ ID NO: 278858 - DNA, 2619 bp, Homo sapiens
cctgtagtcccagctacttgggaggctgaggcaggagaatggcatgaacccgggaggcggagcttgcagtgagccgagatcacgccactgcactcaagcctgggcgacagtgcgagactccgtctcaaaataaataaattaaattaattaattaattaaaaaattaaaacccccaccagagcaaaaacttacagcgcttacaataccttccacgtgctgttttattttacataaaaccatgacgattaaaaagctggcctctcagccttccgggtattggtttgttttccccctaaactgtcgtttttataggcacttgcactgtcttcttagcagaattgccaatggccttcctcgagtcctacgtttagcgattggcaagaatcatgcactgacagagctcgactccggagggcacaaggaagtagacaacaaagcaggaagaagcaggaggcgcacagatgagcgggatctgcactggaggcggtgcgaccttgcggggcggtgcaagctggcggaacccgcgtgagagaggttggtgttgcgaagggaactagtccggtgcaggacgtggggcttttgcagctcagctggttccggctggggaagatggcggtggctggggcggtgtccggggagccgctggtgcactggtgcacccagcagttgcggaagactttcggcctggatgtcagcgaggagatcattcagtacgttttgtcaattgagagtgctgaagagatacgagaatatgttactgatctcctccagggaaatgaaggcaaaaaaggtcaattcatagaagaacttataaccaaatggcaaaagaatgatcaggagttgatttcggatcctttgcagcagtgcttcaaaaaagatgaaattttagatgggcagaaatcaggcgaccatctaaagcggggtaggaagaaagggagaaacagacaggaagttcctgcatttactgaacctgacacgactgcagaggttaaaacaccttttgatttggccaaggcacaagagaacagcaactccgtaaagaagaagacaaagtttgtcaatttatacacaagagagggacaggacaggcttgcagtcctgctccctggtcgtcacccttgtgattgcctgggccagaagcacaagctcatcaataactgtctgatctgtgggcgcattgtctgtgaacaagaaggctcaggcccttgcttattctgtggcactctggtgtgtactcatgaggaacaagatattttacagcgtgactcaaacaagagccagaaactgctaaagaaactcatgtcaggagtggagaattctggaaaggtggacatctctaccaaggaccttcttcctcatcaagaattgcgaattaagtctggtctggagaaggctatcaagcataaagacaaactgttagagtttgacagaactagtattcgaaggacccaagtcattgatgatgagtcagattactttgccagtgattctaaccaatggttgtccaaacttgagcgggaaaccttgcagaagcgagaggaggagctgagagaacttcgacacgcctctcgactttctaagaaggtcaccattgactttgcaggaaggaagatcctggaagaagaaaattcactagcagagtatcatagcagactagatgagacaatacaggccattgccaatggaaccttgaaccagccactgaccaaattggatagatcttctgaagagcctttgggagttctggtaaatcccaacatgtaccagtcccctccccagtgggttgaccacacaggtgcagcctcacagaagaaggctttccgttcttcaggatttggactagagttcaactcatttcagcaccagttgcgaatccaggatcaagaatttcaggaaggctttgatggtggctggtgcctctctgtacatcagccctgggcttctctgcttgtcagagggattaaaagggtggagggcagatcctggtacaccccccacagaggacgactttggatagcagccacagctaaaaaaccctcccctcaagaagtctcagaactccaggctacatatcgtcttcttcgtgggaaagaggtaacagccgcatattctcctttcaattttactttatggagagaagtcattgacgttcatcttctttcacttccttctttctttggctttttctttgttaaaagagacttttaatctttgtatatgtttgtttgtttagtggtaaatcattgacagcgttcaaagcattaatctgtcaaaacagtgcaaataaaaatatcaatttccaacacaagaaatcaactagtcttaatttttttatctgagaaaatcatcttctttactctaaaggtaaaatgactagtgtaaactctgagatccttacattgggaagaacaaccacaaataggaattttcattgagagtggcctaaatagacacctactattggatttgtacaaatcaaagttgattgatttaagcaacgtattttgggaatcaccccaagaatactaactttggatccttaaaaagacttctgacctttgggcatcctgtttttcctttgtgttatccagctcatacagttgttttgagggtagaata

SEQ ID NO: 278859 - DNA, 892 bp, Homo sapiens
ggatcaggtgaaaagcagtcaagagttgagagagatgacttgtcgctattctgatggaggagaaattagtggacagagttcatcctcaagtgaaaagtattgtgagagaaaagtgtttttgacaaaagatactgctcttgagaaggcatcatctatagacctcttggttcaactggataatttgctataggatttgttatatattatgggatattccaggaaactagaatttatatccttcccactaaatttctatttgtttaagggtggagggcagatcctggtacaccccccacagaggacgactttggatagcagccacagctaaaaaaccctcccctcaagaagtctcagaactccaggctacatatcgtcttcttcgtgggaaagatgtggaatttcctaatgactatccgtcaggttgtcttctgggctgtgtggacctaattgactgcttgtcccagaagcaatttaaggagcagtttccagacatcagtcaagaatctgattctccatttgttttcatctgcaaaaatcctcaggaaatggttgtgaagtttcctattaaaggaaatccaaaaatctggaaattggattccaagatccatcaaggagcaaagaaggggttaatgaagcagaataaagctgtctgacccaggagaaaaggaactatacagcatagtggagttttgtgtactaaaattgctatctactggtcctttggaattgaagtagtagaaacctaaaggcttggcgtcaggcttgaatatctcagaacttaaactcttaccaaaatctgtatatttttcttaaggagtgggattcctactttatgtaatggggtcgaaatctttgaacacattatttataaaaacctgtttaaaaattctaa

SEQ ID NO: 278860 - DNA, 492 bp, Homo sapiens
caaggagatctctgaatctcctgactcttggttgtttgtgataaaagagcattccgttctgattcttctgggaggatttcagtttccagacatcagtcaagaatctgattctccatttgttttcatctgcaaaaatcctcaggaaatggttgtgaagtttcctattaaaggaaatccaaaaatctggaaattggattccaagatccatcaaggagcaaagaaggggttaatgaagcagaataaagctgtctgacccaggagaaaaggaactatacagcatagtggagttttgtgtactaaaattgctatctactggtcctttggaattgaagtagtagaaacctaaaggcttggcgtcaggcttgaatatctcagaacttaaactcttaccaaaatctgtatatttttcttaaggagtgggattcctactttatgtaatggggtcgaaatctttgaacacattatttataaaaacctgtttaaaaattctaa

SEQ ID NO: 278861 - DNA, 855 bp, Homo sapiens
ggatcaggtgaaaagcagtcaagagttgagagagatgacttgtcgctattctgatggaggagaaattagtggacagagttcatcctcaagtgaaaagtattgtgagagaaaagtgtttttgacaaaagatactgctcttgagaaggcatcatctatagacctcttggttcaactggataatttgctataggatttgttatatattatgggatattccaggaaactagaatttatatccttcccactaaatttctatttgtttaagggtggagggcagatcctggtacaccccccacagaggacgactttggatagcagccacagctaaaggtaacagccgcatattctcctttcaattttactttatggagagaagtcattgacgttcatcttctttcacttccttctttctttggctttttctttgttaaaagagacttttaatctttgtatatgtttgtttgtttagtggtaaatcattgacagcgttcaaagcattaatctgtcaaaacagtgcaaataaaaatatcaatttccaacacaagaaatcaactagtcttaatttttttatctgagaaaatcatcttctttactctaaaggtaaaatgactagtgtaaactctgagatccttacattgggaagaacaaccacaaataggaattttcattgagagtggcctaaatagacacctactattggatttgtacaaatcaaagttgattgatttaagcaacgtattttgggaatcaccccaagaatactaactttggatccttaaaaagacttctgacctttgggcatcctgtttttcctttgtgttatccagctcatacagttgttttgagggtagaata

SEQ ID NO: 278862 - DNA, 601 bp, Homo sapiens
ggtgttgcgaagggaactagtccggtgcaggacgtggggcttttgcagctcagctggttccggctggggaagatggcggtggctggggcggtgtccggggagccgctggtgcactggtgcacccagcagttgcggaagactttcggcctggatgtcagcgaggagatcattcagtgagaacagttcgggtccaagcggggaaggagctctgggatgtgcactgcctgagcgaaccgggaagcggggaggactgaaaagttaagagagaaatgtgataaaggggctgcagtctgtagtctgtaggcgtcgaattttggcctccacctttgtagtttagtttctggaatagggtgtccggctccacagtctgccggtcgggcttttttcctgggaagacgcccaatctgtaataattagaaatgcaaggctgtcccaggagccagtttcctttctagagagaaggggcaggtcaaactgtatttcctaactttgaaccccttactcttttatttatttattattattgttgttattattgagacggagtctctgtcgcccaggctggcgtgcggtggcgcgatcttggctcactgcaacctcc

SEQ ID NO: 278863 - DNA, 2594 bp, Homo sapiens
cctgtagtcccagctacttgggaggctgaggcaggagaatggcatgaacccgggaggcggagcttgcagtgagccgagatcacgccactgcactcaagcctgggcgacagtgcgagactccgtctcaaaataaataaattaaattaattaattaattaaaaaattaaaacccccaccagagcaaaaacttacagcgcttacaataccttccacgtgctgttttattttacataaaaccatgacgattaaaaagctggcctctcagccttccgggtattggtttgttttccccctaaactgtcgtttttataggcacttgcactgtcttcttagcagaattgccaatggccttcctcgagtcctacgtttagcgattggcaagaatcatgcactgacagagctcgactccggagggcacaaggaagtagacaacaaagcaggaagaagcaggaggcgcacagatgagcgggatctgcactggaggcggtgcgaccttgcggggcggtgcaagctggcggaacccgcgtgagagaggttggtgttgcgaagggaactagtccggtgcaggacgtggggcttttgcagctcagctggttccggctggggaagatggcggtggctggggcggtgtccggggagccgctggtgcactggtgcacccagcagttgcggaagactttcggcctggatgtcagcgaggagatcattcagtacgttttgtcaattgagagtgctgaagagatacgagaatatgttactgatctcctccagggaaatgaaggcaaaaaaggtcaattcatagaagaacttataaccaaatggcaaaagaatgatcaggagttgatttcggatcctttgcagcagtgcttcaaaaaagatgaaattttagatgggcagaaatcaggcgaccatctaaagcggggtaggaagaaagggagaaacagacaggaagttcctgcatttactgaacctgacacgactgcagaggttaaaacaccttttgatttggccaaggcacaagagaacagcaactccgtaaagaagaagacaaagtttgtcaatttatacacaagagagggacaggacaggcttgcagtcctgctccctggtcgtcacccttgtgattgcctgggccagaagcacaagctcatcaataactgtctgatctgtgggcgcattgtctgtgaacaagaaggctcaggcccttgcttattctgtggcactctggtgtgtactcatgaggaacaagatattttacagcgtgactcaaacaagagccagaaactgctaaagaaactcatgtcaggagtggagaattctggaaaggtggacatctctaccaaggaccttcttcctcatcaagaattgcgaattaagtctggtctggagaaggctatcaagcataaagacaaactgttagagtttgacagaactagtattcgaaggacccaagtcattgatgatgagtcagattactttgccagtgattctaaccaatggttgtccaaacttgagcgggaaaccttgcagaagcgagaggaggagctgagagaacttcgacacgcctctcgactttctaagaaggtcaccattgactttgcaggaaggaagatcctggaagaagaaaattcactagcagagtatcatagcagactagatgagacaatacaggccattgccaatggaaccttgaaccagccactgaccaaattggatagatcttctgaagagcctttgggagttctggtaaatcccaacatgtaccagtcccctccccagtgggttgaccacacaggtgcagcctcacagaagaaggctttccgttcttcaggatttggactagagttcaactcatttcagcaccagttgcgaatccaggatcaagaatttcaggaaggctttgatggtggctggtgcctctctgtacatcagccctgggcttctctgcttgtcagagggattaaaagggtggagggcagatcctggtacaccccccacagaggacgactttggatagcagccacagctaaaaaaccctcccctcaagaagtctcagaactccaggctacatatcgtcttcttcgtgggaaagatgtggaatttcctaatgactatccgtcaggttgtcttctgggctgtgtggacctaattgactgcttgtcccagaagcaatttaaggagcagtttccagacatcagtcaagaatctgattctccatttgttttcatctgcaaaaatcctcaggaaatggttgtgaagtttcctattaaaggaaatccaaaaatctggaaattggattccaagatccatcaaggagcaaagaaggggttaatgaagcagaataaagctgtctgacccaggagaaaaggaactatacagcatagtggagttttgtgtactaaaattgctatctactggtcctttggaattgaagtagtagaaacctaaaggcttggcgtcaggcttgaatatctcagaacttaaactcttaccaaaatctgtatatttttcttaaggagtgggattcctactttatgtaatggggtcgaaatctttgaacacattatttataaaaacctgtttaaaaattctaa

SEQ ID NO: 278864 - DNA, 2076 bp, Homo sapiens
gaattccgggtctcaaatagggattggtttaaatgatctggagacagcaccaaagcaaataataaactaaaaaatgtccagtcattaaactgttaaaatgaaattcaggtttccaaagtactttagaaatcatgtaatccaggctggggaagatggcggtggctggggcggtgtccggggagccgctggtgcactggtgcacccagcagttgcggaagactttcggcctggatgtcagcgaggagatcattcaggaaatgaaggcaaaaaaggtcaattcatagaagaacttataaccaaatggcaaaagaatgatcaggagttgatttcggatcctttgcagcagtgcttcaaaaaagatgaaattttagatgggcagaaatcaggcgaccatctaaagcggggtaggaagaaagggagaaacagacaggaagttcctgcatttactgaacctgacacgactgcagaggttaaaacaccttttgatttggccaaggcacaagagaacagcaactccgtaaagaagaagacaaagtttgtcaatttatacacaagagagggacaggacaggcttgcagtcctgctccctggtcgtcacccttgtgattgcctgggccagaagcacaagctcatcaataactgtctgatctgtgggcgcattgtctgtgaacaagaaggctcaggcccttgcttattctgtggcactctggtgtgtactcatgaggaacaagatattttacagcgtgactcaaacaagagccagaaactgctaaagaaactcatgtcaggagtggagaattctggaaaggtggacatctctaccaaggaccttcttcctcatcaagaattgcgaattaagtctggtctggagaaggctatcaagcataaagacaaactgttagagtttgacagaactagtattcgaaggacccaagtcattgatgatgagtcagattactttgccagtgattctaaccaatggttgtccaaacttgagcgggaaaccttgcagaagcgagaggaggagctgagagaacttcgacacgcctctcgactttctaagaaggtcaccattgactttgcaggaaggaagatcctggaagaagaaaattcactagcagagtatcatagcagactagatgagacaatacaggccattgccaatggaaccttgaaccagccactgaccaaattggatagatcttctgaagagcctttgggagttctggtaaatcccaacatgtaccagtcccctccccagtgggttgaccacacaggtgcagcctcacagaagaaggctttccgttcttcaggatttggactagagttcaactcatttcagcaccagttgcgaatccaggatcaagaatttcaggaaggctttgatggtggctggtgcctctctgtacatcagccctgggcttctctgcttgtcagagggattaaaagggtggagggcagatcctggtacaccccccacagaggacgactttggatagcagccacagctaaaaaaccctcccctcaagaagtctcagaactccaggctacatatcgtcttcttcgtgggaaagatgtggaatttcctaatgactatccgtcaggttgtcttctgggctgtgtggacctaattgactgcttgtcccagaagcaatttaaggagcagtttccagacatcagtcaagaatctgattctccatttgttttcatctgcaaaaatcctcaggaaatggttgtgaagtttcctattaaaggaaatccaaaaatctggaaattggattccaagatccatcaaggagcaaagaaggggttaatgaagcagaataaagctgtctgacccaggagaaaaggaactatacagcatagtggagttttgtgtactaaaattgctatctactggtcctttggaattgaagtagtagaaacctaaaggcttggcgtcaggcttgaatatctcagaacttaaactcttaccaaaatctgtatatttttcttaaggagtgggattcctactttatgtaatggggtcgaaatctttgaacacattatttataaaaacctgtttaaaaattctaa

SEQ ID NO: 278865 - DNA, 2624 bp, Homo sapiens
cctgtagtcccagctacttgggaggctgaggcaggagaatggcatgaacccgggaggcggagcttgcagtgagccgagatcacgccactgcactcaagcctgggcgacagtgcgagactccgtctcaaaataaataaattaaattaattaattaattaaaaaattaaaacccccaccagagcaaaaacttacagcgcttacaataccttccacgtgctgttttattttacataaaaccatgacgattaaaaagctggcctctcagccttccgggtattggtttgttttccccctaaactgtcgtttttataggcacttgcactgtcttcttagcagaattgccaatggccttcctcgagtcctacgtttagcgattggcaagaatcatgcactgacagagctcgactccggagggcacaaggaagtagacaacaaagcaggaagaagcaggaggcgcacagatgagcgggatctgcactggaggcggtgcgaccttgcggggcggtgcaagctggcggaacccgcgtgagagaggttggtgttgcgaagggaactagtccggtgcaggacgtggggcttttgcagctcagctggttccggctggggaagatggcggtggctggggcggtgtccggggagccgctggtgcactggtgcacccagcagttgcggaagactttcggcctggatgtcagcgaggagatcattcagtgagaacagttcgggtccaagcggggaaggagctctgggatgtgcactgcctgagcgaaccgggaagcggggaggactgaaaagtacgttttgtcaattgagagtgctgaagagatacgagaatatgttactgatctcctccagggaaatgaaggcaaaaaaggtcaattcatagaagaacttataaccaaatggcaaaagaatgatcaggagttgatttcggatcctttgcagcagtgcttcaaaaaagatgaaattttagatgggcagaaatcaggcgaccatctaaagcggggtaggaagaaagggagaaacagacaggaagttcctgcatttactgaacctgacacgactgcagaggttaagacaaagtttgtcaatttatacacaagagagggacaggacaggcttgcagtcctgctccctggtcgtcacccttgtgattgcctgggccagaagcacaagctcatcaataactgtctgatctgtgggcgcattgtctgtgaacaagaaggctcaggcccttgcttattctgtggcactctggtgtgtactcatgaggaacaagatattttacagcgtgactcaaacaagagccagaaactgctaaagaaactcatgtcaggagtggagaattctggaaaggtggacatctctaccaaggaccttcttcctcatcaagaattgcgaattaagtctggtctggagaaggctatcaagcataaagacaaactgttagagtttgacagaactagtattcgaaggacccaagtcattgatgatgagtcagattactttgccagtgattctaaccaatggttgtccaaacttgagcgggaaaccttgcagaagcgagaggaggagctgagagaacttcgacacgcctctcgactttctaagaaggtcaccattgactttgcaggaaggaagatcctggaagaagaaaattcactagcagagtatcatagcagactagatgagacaatacaggccattgccaatggaaccttgaaccagccactgaccaaattggatagatcttctgaagagcctttgggagttctggtaaatcccaacatgtaccagtcccctccccagtgggttgaccacacaggtgcagcctcacagaagaaggctttccgttcttcaggatttggactagagttcaactcatttcagcaccagttgcgaatccaggatcaagaatttcaggaaggctttgatggtggctggtgcctctctgtacatcagccctgggcttctctgcttgtcagagggattaaaagggtggagggcagatcctggtacaccccccacagaggacgactttggatagcagccacagctaaaaaaccctcccctcaagaagtctcagaactccaggctacatatcgtcttcttcgtgggaaagatgtggaatttcctaatgactatccgtcaggttgtcttctgggctgtgtggacctaattgactgcttgtcccagaagcaatttaaggagcagtttccagacatcagtcaagaatctgattctccatttgttttcatctgcaaaaatcctcaggaaatggttgtgaagtttcctattaaaggaaatccaaaaatctggaaattggattccaagatccatcaaggagcaaagaaggggttaatgaagcagaataaagctgtctgacccaggagaaaaggaactatacagcatagtggagttttgtgtactaaaattgctatctactggtcctttggaattgaagtagtagaaacctaaaggcttggcgtcaggcttgaatatctcagaacttaaactcttaccaaaatctgtatatttttcttaaggagtgggattcctactttatgtaatggggtcgaaatctttgaacacattatttataaaaacctgtttaaaaattctaa

SEQ ID NO: 278866 - DNA, 2376 bp, Homo sapiens
cctgtagtcccagctacttgggaggctgaggcaggagaatggcatgaacccgggaggcggagcttgcagtgagccgagatcacgccactgcactcaagcctgggcgacagtgcgagactccgtctcaaaataaataaattaaattaattaattaattaaaaaattaaaacccccaccagagcaaaaacttacagcgcttacaataccttccacgtgctgttttattttacataaaaccatgacgattaaaaagctggcctctcagccttccgggtattggtttgttttccccctaaactgtcgtttttataggcacttgcactgtcttcttagcagaattgccaatggccttcctcgagtcctacgtttagcgattggcaagaatcatgcactgacagagctcgactccggagggcacaaggaagtagacaacaaagcaggaagaagcaggaggcgcacagatgagcgggatctgcactggaggcggtgcgaccttgcggggcggtgcaagctggcggaacccgcgtgagagaggttggtgttgcgaagggaactagtccggtgcaggacgtggggcttttgcagctcagctggttccggctggggaagatggcggtggctggggcggtgtccggggagccgctggtgcactggtgcacccagcagttgcggaagactttcggcctggatgtcagcgaggagatcattcagtacgttttgtcaattgagagtgctgaagagatacgagaatatgttactgatctcctccagggaaatgaaggcaaaaaaggtcaattcatagaagaacttataaccaaatggcaaaagaatgatcaggagttgatttcggatcctttgcagcagtgcttcaaaaaagatgaaattttagatgggcagaaatcaggcgaccatctaaagcggggtaggaagaaagggagaaacagacaggaagttcctgcatttactgaacctgacacgactgcagaggttaaaacaccttttgatttggccaaggcacaagagaacagcaactccgtaaagaagaagacaaagtttgtcaatttatacacaagagagggacaggacaggcttgcagtcctgctccctggtcgtcacccttgtgattgcctgggccagaagcacaagctcatcaataactgtctgatctgtgggcgcattgtctgtgaacaagaaggctcaggcccttgcttattctgtggcactctggtgtgtactcatgaggaacaagatattttacagcgtgactcaaacaagagccagaaactgctaaagaaactcatgtcaggagtggagaattctggaaaggtggacatctctaccaaggaccttcttcctcatcaagaattgcgaattaagtctggtctggagaaggctatcaagcataaagacaaactgttagagtttgacagaactagtattcgaaggacccaagtcattgatgatgagtcagattactttgccagtgattctaaccaatggttgtccaaacttgagcgggaaaccttgcagaagcgagaggaggagctgagagaacttcgacacgcctctcgactttctaagaaggtcaccattgactttgcaggaaggaagatcctggaagaagaaaattcactagcagagtatcatagcagactagatgagacaatacaggccattgccaatggaaccttgaaccagccactgaccaaattggatagatcttctgaagagcctttgggagttctggtaaatcccaacatgtaccagtcccctccccagtgggttgaccacacaggtgcagcctcacagaagaaggctttccgttcttcaggatttggactagagttcaactcatttcagcaccagttgcgaatccaggatcaagaatttcaggaaggctttgatggtggctggtgcctctctgtacatcagccctgggcttctctgcttgtcagagggattaaaagggtggagggcagatcctggtacaccccccacagaggacgactttggatagcagccacagctaaaaaaccctcccctcaagaagtctcagaactccaggctacatatcgtcttcttcgtgggaaagaggtaacagccgcatattctcctttcaattttactttatggagagaagtcattgacgttcatcttctttcacttccttcttcttggttttctgtaaagaaatttatctggtatgtggggagggaatcatgaagggtcaagctatctgcaacggggataatatattcccaaaaaaaaggggggtaattctcgggcataggcctggaaggcaagaggtaaagggggaagaggagaatggtggcacgggggacaaacgctatttgtgtgtaggatgagaaacaacag

SEQ ID NO: 278867 - DNA, 2492 bp, Homo sapiens
cctgtagtcccagctacttgggaggctgaggcaggagaatggcatgaacccgggaggcggagcttgcagtgagccgagatcacgccactgcactcaagcctgggcgacagtgcgagactccgtctcaaaataaataaattaaattaattaattaattaaaaaattaaaacccccaccagagcaaaaacttacagcgcttacaataccttccacgtgctgttttattttacataaaaccatgacgattaaaaagctggcctctcagccttccgggtattggtttgttttccccctaaactgtcgtttttataggcacttgcactgtcttcttagcagaattgccaatggccttcctcgagtcctacgtttagcgattggcaagaatcatgcactgacagagctcgactccggagggcacaaggaagtagacaacaaagcaggaagaagcaggaggcgcacagatgagcgggatctgcactggaggcggtgcgaccttgcggggcggtgcaagctggcggaacccgcgtgagagaggttggtgttgcgaagggaactagtccggtgcaggacgtggggcttttgcagctcagctggttccggctggggaagatggcggtggctggggcggtgtccggggagccgctggtgcactggtgcacccagcagttgcggaagactttcggcctggatgtcagcgaggagatcattcagtacgttttgtcaattgagagtgctgaagagatacgagaatatgttactgatctcctccagggaaatgaaggcaaaaaaggtcaattcatagaagaacttataaccaaatggcaaaagaatgatcaggagttgatttcggatcctttgcagcagtgcttcaaaaaagatgaaattttagatgggcagaaatcaggcgaccatctaaagcggggtaggaagaaagggagaaacagacaggaagttcctgcatttactgaacctgacacgactgcagaggttaaaacaccttttgatttggccaaggcacaagagaacagcaactccgtaaagaagaagacaaagtttgtcaatttatacacaagagagggacaggacaggcttgcagtcctgctccctggtcgtcacccttgtgattgcctgggccagaagcacaagctcatcaataactgtctgatctgtgggcgcattgtctgtgaacaagaaggctcaggcccttgcttattctgtggcactctggtgtgtactcatgaggaacaagatattttacagcgtgactcaaacaagagccagaaactgctaaagaaactcatgtcaggagtggagaattctggaaaggtggacatctctaccaaggaccttcttcctcatcaagaattgcgaattaagtctggtctggagaaggctatcaagcataaagacaaactgttagagtttgacagaactagtattcgaaggacccaagtcattgatgatgagtcagattactttgccagtgattctaaccaatggttgtccaaacttgagcgggaaaccttgcagaagcgagaggaggagctgagagaacttcgacacgcctctcgactttctaagaaggtcaccattgactttgcaggaaggaagatcctggaagaagaaaattcactagcagagtatcatagcagtgggttgaccacacaggtgcagcctcacagaagaaggctttccgttcttcaggatttggactagagttcaactcatttcagcaccagttgcgaatccaggatcaagaatttcaggaaggctttgatggtggctggtgcctctctgtacatcagccctgggcttctctgcttgtcagagggattaaaagggtggagggcagatcctggtacaccccccacagaggacgactttggatagcagccacagctaaaaaaccctcccctcaagaagtctcagaactccaggctacatatcgtcttcttcgtgggaaagaggtaacagccgcatattctcctttcaattttactttatggagagaagtcattgacgttcatcttctttcacttccttctttctttggctttttctttgttaaaagagacttttaatctttgtatatgtttgtttgtttagtggtaaatcattgacagcgttcaaagcattaatctgtcaaaacagtgcaaataaaaatatcaatttccaacacaagaaatcaactagtcttaatttttttatctgagaaaatcatcttctttactctaaaggtaaaatgactagtgtaaactctgagatccttacattgggaagaacaaccacaaataggaattttcattgagagtggcctaaatagacacctactattggatttgtacaaatcaaagttgattgatttaagcaacgtattttgggaatcaccccaagaatactaactttggatccttaaaaagacttctgacctttgggcatcctgtttttcctttgtgttatccagctcatacagttgttttgagggtagaata

SEQ ID NO: 278868 - DNA, 453 bp, Homo sapiens
gacaccggatacgagctccgtataaattcaaatgacttctagttttccagacatcagtcaagaatctgattctccatttgttttcatctgcaaaaatcctcaggaaatggttgtgaagtttcctattaaaggaaatccaaaaatctggaaattggattccaagatccatcaaggagcaaagaaggggttaatgaagcagaataaagctgtctgacccaggagaaaaggaactatacagcatagtggagttttgtgtactaaaattgctatctactggtcctttggaattgaagtagtagaaacctaaaggcttggcgtcaggcttgaatatctcagaacttaaactcttaccaaaatctgtatatttttcttaaggagtgggattcctactttatgtaatggggtcgaaatctttgaacacattatttataaaaacctgtttaaaaattctaa

SEQ ID NO: 278869 - DNA, 1778 bp, Homo sapiens
ttaaccataataatcggaaggctttatagaaccctaaaatatccaactatcattcaatttaaaatttatcacacaaaaaatgagttttatagaatgcttcaaaaaaagccattaaaataaccaaaactaaaaccaagagtttgtaggaaaataccaatatgcaaacattccaaaaggagagcctttattttgccagccaaggtggtattatttgctttaaaaaaaaaatcaatgtaacattggttgtcttttgagaaagttccttgctgggattcttttgctggaaaattctcatgctgagggtaaacaactttggtttgctttttagtgcctgagatctgaaggcagaaggaagattcaaatagaaagaataatggcccattcaacagctgactcctacagacattctgactaagatgcctgttgcaattcccctgagcaacttaataactgtgttttcaaggttaaactcaagaaccaatcagttatctgtaaatgaatatccaacttttctgaaaggaaaaaggtaacatgttaatataaacagcaaatacatacatcatttataaaactgcctcagatcaattaacaagataaacatacttaaaaaaaattcttgccttttgttttaatgggccatagcaaatactatctctgtataatgatcagtaaagagctgtcaaatagataaaaagactcacaatattgaatgttaaaacaaaccctaaatgaagaaaacattaaataatgctattaggtagtattccttatttccatttttattaaatctgagaactcaacagggttaatcatcaaatgaaaaacatgatttttaaaaagggaataatgaagcaaacattttaatctgtcttaattttaagaacccataatttacatatacagtgtgtttaagcaattttcgtatttgtactacagcaaaaaatgattttacttaccagaagtattgtcatactccaaatggtatccgtgaataaagatttaaaaaaataaaaaataaagtccagcttttttctcatggtcattacacaaaacagttttttatacagttgttttaaattatgaaagggaaaccagagaacagcaagtggaacttaaattttaatactcaaacatatttttatacctcaccacttttcttgaagtggatggtttcaatccactttcatggtttgctgacgtgcattttccctcagtgcaacattactaaaaagcttgtgtgtggaccacactatggcaatgacgtgagattttataaaccatcaccatcgtgttagccttattcacattaatgttttttattaggttctaaaatagcccatttatttttttttcctaaaatattagggttttttccattcattattatatcctatagctctagaagtgtgactccaggattatgctattgaggacataaggcactctctttactttcttgtcagttttgaaaacttctgggaacagattttaatgaatctatttaatgtaatagaatgtttacattccatccaatttacctttatacctagaccttaaggttttattcagctgagtatggaaatgtgtaatatctatttatgtaaataagtagtaaactatggctgagcaattgtgtatttgagtaaattttatagtattcaaacccatggaatagtctttgataaaaataactatccattaaaatgttaccgactatatagtaggatagctctaaattactaaaattgtatataatttattaaatttgacaaacactg

SEQ ID NO: 278870 - DNA, 858 bp, Homo sapiens
ttctcaacttcccttcaatgggaagcattatggaatttcagcagtagtgatgaatcaaattattgaattaaatttcttcttaagaagtaaaaactcagaatgtaccatcttgtttcctttcagtttattaaatggcatcataaagatgactttgctaagttaatagagttaaaaatttttttaatataagccaaaatattaactttaatgaaacattgacttggcaaatgaatttcctataaattatcattggtcagaatgctgttttgtttaataatattacgcaacataaaccataggtgttattagaagtggagaactgcctttttcatctggggcttttaaggacttgctataaatgattattttttaaatgctttataaatcttcatggtttttctatttctgatacactcagctatagttaataccagagtatcctaccaggagtaatatttggaatatttaaatctagtaaaagaagaaagttgtacttcctggctgggagtattaggagatgggagtagagattcacttttaagttcttgaaaatatatgcattctcctaaatattaacaaaaatgatttggggaaatgacatggcttgattgttctgtttaaatttgtactgtggcttatgttacacatgttcatgttcacctctcattcacctgttttatatggtttaaaattctctttaacaaaattcagaaaattcacctgaaacgtattttgacctaaaagaaacatatttttgtatcagtattgaattttggacagtgcccccatataaggaagttactgttttaaaataaagcaaactaactgttttattttccttggaaaaaaaaaaattcc

SEQ ID NO: 278871 - DNA, 832 bp, Homo sapiens
agcggactaggaagagacttgtgccacccggggcaagaacatcagagatccagtgacagcccagcgacctccgggatcaattgcaatgggaggtgtgttttatggaccatgtgctgctatgtatgcctgaagaagtacttgaaatgcaaatttggggagactttgccatataaatgcttggctggattaagcgcctaattaggatggtttttcaacaagttggagtaagcatgcaatcggtactttggtctaggaagccatatggttcgtctcgaagtatcgtaaggaaaattggtactaatttgtctctgattcagtgtccaagagttcagtttcagattaacagccatgcaacagaatggagtcccagccacccaggagaggatgcagtggcgtcttttgctgatgttggatgggtagccaaagaagaaggagagtgttcagcaagactaaggacagaggtcagatcaaggccaccccttcaggatgaccttcttttctttgagaaggccccaagcagacagatttccttaccagacttgtctcaagaagagcctcagctgaagaccccagcgctggcaaatgaggaagcactgcagaagatttgcgctctcgaaaatgaacttgctgctctcagagctcagattgccaaaattgtgacccagcaggagcagcaaaatctcactgcaggtgacttagattctaccacatttggtaccatacaacgcaaaaagtaaaccagaacagaaaaggaatgacggaaaggggtcaaagaaagcaaggagggagcagaggaagagaaagagaaaaagaaaagagaagaaagaaaaga

SEQ ID NO: 278872 - DNA, 571 bp, Homo sapiens
tggaatataaaagagagattttatttaaaaaaaaagaaaaactttagaaggaaaaagactcgttaaagtcagaacctgctggacaagaaggcctatggcaaatcctactgaagataaatttataagccttaagagaataaggactatgacaaaaacaatccaaaccacaataattcatggtaggaaatattgtggcatctacataataaaatggttgaggtccttcttttgttaattttgaggcctataattgctccttaactggtcaggtatcttagatatcagctggctcacaggagaatgtatcttcataatataaacccaaacgttgcttataataaactgtacatataaaaaatcttaaaagaaaagttcaatattgcaatatagatgtctaatttctaggtaaatttagtaaacagaatatgttcaacatggagaaaatcacactccagaaataagttaaaaatatttcaacatctaaaaaaaaattcagcagcacccacagatacagcacatagaagaaattaaaaaattatgaatagttttaataaataacactaatatcata

SEQ ID NO: 278873 - DNA, 608 bp, Homo sapiens
aaaagctgcatgcaagataccaactgaggattataataccaagacagacacttcaatttcagattgagctgaaataaaaagaataaaagaaaagactcgttaaagtcagaacctgctggacaagaaggcctatggcaaatcctactgaagataaatttataagccttaagagaataaggactatgacaaaaacaatccaaaccacaataattcatggtaggaaatattgtggcatctacataataaaatggttgaggtccttcttttgttaattttgaggcctataattgctccttaactggtcaggtatcttagatatcagctggctcacaggagaatgtatcttcataatataaacccaaacgttgcttataataaactgtacatataaaaaatcttaaaagaaaagttcaatattgcaatatagatgtctaatttctaggtaaatttagtaaacagaatatgttcaacatggagaaaatcacactccagaaataagttaaaaatatttcaacatctaaaaaaaaattcagcagcacccacagatacagcacatagaagaaattaaaaaattatgaatagttttaataaataacactaatatcata

SEQ ID NO: 278874 - DNA, 2707 bp, Homo sapiens
agcggactaggaagagacttgtgccacccggggcaagaacatcagagatccagtgacagcccagcgacctccgggatcaattgcaatgggaggtgtgttttatggaccatgtgctgctatgtatgcctgaagaagtacttgaaatgcaaatttggggagactttgccatataaatgcttggctggattaagcgcctaattaggatggtttttcaacaagttggagtaagcatgcaatcggtactttggtctaggaagccatatggttcgtctcgaagtatcgtaaggaaaattggtactaatttgtctctgattcagtgtccaagagttcagtttcagattaacagccatgcaacagaatggagtcccagccacccaggagaggatgcagtggcgtcttttgctgatgttggatgggtagccaaagaagaaggagagtgttcagcaagactaaggacagaggtcagatcaaggccaccccttcaggatgaccttcttttctttgagaaggccccaagcagacagatttccttaccagacttgtctcaagaagagcctcagctgaagaccccagcgctggcaaatgaggaagcactgcagaagatttgcgctctcgaaaatgaacttgctgctctcagagctcagattgccaaaattgtgacccagcaggagcagcaaaatctcactgcaggtgacttagattctaccacatttggtaccataccaccacaccctccacctcccccaccgcccctgcctccccctgcactggggctccaccaaagtacatctgctgttgatctgattaaagaacgaagagagaaaagagccaatgctggaaagactttggttaagaacaatccaaagaaacctgaaatgccaaatatgctagagatccttaaagagatgaacagtgtaaaacttcggtcagtgaagaggtcagagcaagatgtgaagcccaagccagtggatgctactgaccctgctgccctcatagcagaggctctgaaaaagaaatttgcttatcggtatcgaagtgatagccaagatgaagttgaaaaaggaattccaaagtctgaatcagaggccacctcagagagagtgttgtttgggccacacatgttgaagccaacaggaaaaatgaaggctttaattgaaaatgtatcagactcctaatagacaatgagctgcgaaaagactcctggttcccctgttgatttgtgagggccaagtttgctagtagaaatcgacactgtttagtaaatacctctttagtattcagtggtcttcttttcaggctaattagtggattaagcaataatgaaagcactaagtttggttttgcttttgtgagatggtcagctttggtgctctccacaacatgtgtgttctgacatgtttctaatatgtggccagggcgttcagatttccagttttgaaaacaattgtatagatttcacaacacaaaaaggacatttgtggatgttactgcacattttaaattcttaacactaatttatctgtataagtgttttatatgcatatttttggacataaacagtttatgtaaaattagtaatgaatgatggcaacgagggcactgttatcttcgtttgttttcaatgatcatttagcattcaatgatggaacagctggtataacataagttgttggcatgaaatatttgagattggaaacttcttgccttgaacagaacttatatcttagattctctctcacattttcttggagctggggtttgaataggaaccagatgatgttcactgctgaaattccataatgcttcccattgaagggaagttgagaaccaggaaagctgctttcacgtcattgccatccagtactgacagggaagaaagatgtagttttccagtagtgatgaatcaaattattgaattaaatttcttcttaagaagtaaaaactcagaatgtaccatcttgtttcctttcagtttattaaatggcatcataaagatgactttgctaagttaatagagttaaaaatttttttaatataagccaaaatattaactttaatgaaacattgacttggcaaatgaatttcctataaattatcattggtcagaatgctgttttgtttaataatattacgcaacataaaccataggtgttattagaagtggagaactgcctttttcatctggggcttttaaggacttgctataaatgattattttttaaatgctttataaatcttcatggtttttctatttctgatacactcagctatagttaataccagagtatcctaccaggagtaatatttggaatatttaaatctagtaaaagaagaaagttgtacttcctggctgggagtattaggagatgggagtagagattcacttttaagttcttgaaaatatatgcattctcctaaatattaacaaaaatgatttggggaaatgacatggcttgattgttctgtttaaatttgtactgtggcttatgttacacatgttcatgttcacctctcattcacctgttttatatggtttaaaattctctttaacaaaattcagaaaattcacctgaaacgtattttgacctaaaagaaacatatttttgtatcagtattgaattttggacagtgcccccatataaggaagttactgttttaaaataaagcaaactaactgttttattttccttggaaaaaaaaaaattcc

SEQ ID NO: 278875 - DNA, 2772 bp, Homo sapiens
ccgactgtgactctcagcagccggcttgcggagcggttgccgcgtcctctgccgagcttcttgtgcccgcctccgagcctgaggaaacagctgattgatcagcctggctcaggcttggggcggggattggctgattggcagcaacgccattcgggacagccaagctagaagcctgaggagccggagagggtgctggctgccgcgcggccgagtgtgttttatggaccatgtgctgctatgtatgcctgaagaagtacttgaaatgcaaatttggggagactttgccatataaatgcttggctggattaagcgcctaattaggatggtttttcaacaagttggagtaagcatgcaatcggtactttggtctaggaagccatatggttcgtctcgaagtatcgtaaggaaaattggtactaatttgtctctgattcagtgtccaagagttcagtttcagattaacagccatgcaacagaatggagtcccagccacccaggagaggatgcagtggcgtcttttgctgatgttggatgggtagccaaagaagaaggagagtgttcagcaagactaaggacagaggtcagatcaaggccaccccttcaggatgaccttcttttctttgagaaggccccaagcagacagatttccttaccagacttgtctcaagaagagcctcagctgaagaccccagcgctggcaaatgaggaagcactgcagaagatttgcgctctcgaaaatgaacttgctgctctcagagctcagattgccaaaattgtgacccagcaggagcagcaaaatctcactgcaggtgacttagattctaccacatttggtaccataccaccacaccctccacctcccccaccgcccctgcctccccctgcactggggctccaccaaagtacatctgctgttgatctgattaaagaacgaagagagaaaagagccaatgctggaaagactttggttaagaacaatccaaagaaacctgaaatgccaaatatgctagagatccttaaagagatgaacagtgtaaaacttcggtcagtgaagaggtcagagcaagatgtgaagcccaagccagtggatgctactgaccctgctgccctcatagcagaggctctgaaaaagaaatttgcttatcggtatcgaagtgatagccaagatgaagttgaaaaaggaattccaaagtctgaatcagaggccacctcagagagagtgttgtttgggccacacatgttgaagccaacaggaaaaatgaaggctttaattgaaaatgtatcagactcctaatagacaatgagctgcgaaaagactcctggttcccctgttgatttgtgagggccaagtttgctagtagaaatcgacactgtttagtaaatacctctttagtattcagtggtcttcttttcaggctaattagtggattaagcaataatgaaagcactaagtttggttttgcttttgtgagatggtcagctttggtgctctccacaacatgtgtgttctgacatgtttctaatatgtggccagggcgttcagatttccagttttgaaaacaattgtatagatttcacaacacaaaaaggacatttgtggatgttactgcacattttaaattcttaacactaatttatctgtataagtgttttatatgcatatttttggacataaacagtttatgtatgatcatttagcattcaatgatggaacagctggtataacataagttgttggcatgaaatatttgagattggaaacttcttgccttgaacagaacttatatcttagattctctctcacattttcttggagctggggtttgaataggaaccagatgatgttcactgctgaaattccataatgcttcccattgaagggaagttgagaaccaggaaagctgctttcacgtcattgccatccagtactgacagggaagaaagatgtagttttccagtagtgatgaatcaaattattgaattaaatttcttcttaagaagtaaaaactcagaatgtaccatcttgtttcctttcagtttattaaatggcatcataaagatgactttgctaagttaatagagttaaaaatttttttaatataagccaaaatattaactttaatgaaacattgacttggcaaatgaatttcctataaattatcattggtcagaatgctgttttgtttaataatattacgcaacataaaccataggtgttattagaagtggagaactgcctttttcatctggggcttttaaggacttgctataaatgattattttttaaatgctttataaatcttcatggtttttctatttctgatacactcagctatagttaataccagagtatcctaccaggagtaatatttggaatatttaaatctagtaaaagaagaaagttgtacttcctggctgggagtattaggagatgggagtagagattcacttttaagttcttgaaaatatatgcattctcctaaatattaacaaaaatgatttggggaaatgacatggcttgattgttctgtttaaatttgtactgtggcttatgttacacatgttcatgttcacctctcattcacctgttttatatggtttaaaattctctttaacaaaattcagaaaattcacctgaaacgtattttgacctaaaagaaacatatttttgtatcagtattgaattttggacagtgcccccatataaggaagttactgttttaaaataaagcaaactaactgttttattttccttggaaaaaaaaaaattcc

SEQ ID NO: 278876 - DNA, 2416 bp, Homo sapiens
ccgactgtgactctcagcagccggcttgcggagcggttgccgcgtcctctgccgagcttcttgtgcccgcctccgagcctgaggaaacagctgattgatcagcctggctcaggcttggggcggggattggctgattggcagcaacgccattcgggacagccaagctagaagcctgaggagccggagagggtgctggctgccgcgcggccgagtgtgttttatggaccatgtgctgctatgtatgcctgaagaagtacttgaaatgcaaatttggggagactttgccatataaatgcttggctggattaagcgcctaattaggatggtttttcaacaagttggagtaagcatgcaatcggtactttggtctaggaagccatatggttcgtctcgaagtatcgtaaggaaaattggtactaatttgtctctgattcagtgtccaagagttcagtttcagattaacagccatgcaacagaatggagtcccagccacccaggagaggatgcagtggcgtcttttgctgatgttggatgggtagccaaagaagaaggagagtgttcagcaagactaaggacagaggtcagatcaaggccaccccttcaggatgaccttcttttctttgagaaggccccaagcagacagatttccttaccagacttgtctcaagaagagcctcagctgaagaccccagcgctggcaaatgaggaagcactgcagaagatttgcgctctcgaaaatgaacttgctgctctcagagctcagattgccaaaattgtgacccagcaggagcagcaaaatctcactgcaggtgacttagattctaccacatttggtaccataccaccacaccctccacctcccccaccgcccctgcctccccctgcactggggctccaccaaagtacatctgctgttgatctgattaaagaacgaagagagaaaagagccaatgctggaaagactttggttaagaacaatccaaagaaacctgaaatgccaaatatgctagagatccttaaagagatgaacagtgtaaaacttcggtcagtgaagaggtcagagcaagatgtgaagcccaagccagtggatgctactgaccctgctgccctcatagcagaggctctgaaaaagaaatttgcttatcggtatcgaagtgatagccaagatgaagttgaaaaaggaattccaaagtctgaatcagaggccacctcagagagagtgttgtttgggccacacatgttgaagccaacaggaaaaatgaaggctttaattgaaaatgtatcagactcctaatagacaatgagctgcgaaaagactcctggttcccctgttgatttgtgagggccaagtttgctagtagaaatcgacactgtttagtaaatacctctttagtattcagtggtcttcttttcaggctaattagtggattaagcaataatgaaagcactaagtttggttttgcttttgtgagatggtcagctttggtgctctccacaacatgtgtgttctgacatgtttctaatatgtggccagggcgttcagatttccagttttgaaaacaattgtatagatttcacaacacaaaaaggacatttgtggatgttactgcacattttaaattcttaacactaatttatctgtataagtgttttatatgcatatttttggacataaacagtttatgtaaaattagtaatgaatgatggcaacgagggcactgttatcttcgtttgttttcaatgatcatttagcattcaatgatggaacagctggtataacataagttgttggcatgaaatatttgagattggaaacttcttgccttgaacagaacttatatcttagattctctctcacattttcttggagctggggtttgaataggaaccagatgatgttcactgctgaaattccataatgcttcccattgaagggaagttgagaaccaggaaagctgctttcacgtcattgccatccagtactgacagggaagaaagatgtagttttccagtagtgatgaatcaaattattgaattaaatttcttcttaagaagtaaaaactcagaatgtaccatcttgtttcctttcagtttattaaatggcatcataaagatgactttgctaagttaatagagttaaaaatttttttaatataagccaaaatattaactttaatgaaacattgacttggcaaatgaatttcctataaattatcattggtcagaatgctgttttatatggtttaaaattctctttaacaaaattcagaaaattcacctgaaacgtattttgacctaaaagaaacatatttttgtatcagtattgaattttggacagtgcccccatataaggaagttactgttttaaaataaagcaaactaactgttttattttccttggaaaaaaaaaaattcc

SEQ ID NO: 278877 - DNA, 2660 bp, Homo sapiens
ccgactgtgactctcagcagccggcttgcggagcggttgccgcgtcctctgccgagcttcttgtgcccgcctccgagcctgaggaaacagctgattgatcagcctggctcaggcttggggcggggattggctgattggcagcaacgccattcgggacagccaagctagaagcctgaggagccggagagggtgctggctgccgcgcggccgagtgtgttttatggaccatgtgctgctatgtatgcctgaagaagtacttgaaatgcaaatttggggagactttgccatataaatgcttggctggattaagcgcctaattaggatggtttttcaacaagttggagtaagcatgcaatcggtactttggtctaggaagccatatggttcgtctcgaagtatcgtaaggaaaattggtactaatttgtctctgattcagtgtccaagagttcagtttcagattaacagccatgcaacagaatggagtcccagccacccaggagaggatgcagtggcgtcttttgctgatgttggatgggtagccaaagaagaaggagagtgttcagcaagactaaggacagaggtcagatcaaggccaccccttcaggatgaccttcttttctttgagaaggccccaagcagacagatttccttaccagacttgtctcaagaagagcctcagctgaagaccccagcgctggcaaatgaggaagcactgcagaagatttgcgctctcgaaaatgaacttgtgttgatctgattaaagaacgaagagagaaaagagccaatgctggaaagactttggttaagaacaatccaaagaaacctgaaatgccaaatatgctagagatccttaaagagatgaacagtgtaaaacttcggtcagtgaagaggtcagagcaagatgtgaagcccaagccagtggatgctactgaccctgctgccctcatagcagaggctctgaaaaagaaatttgcttatcggtatcgaagtgatagccaagatgaagttgaaaaaggaattccaaagtctgaatcagaggccacctcagagagagtgttgtttgggccacacatgttgaagccaacaggaaaaatgaaggctttaattgaaaatgtatcagactcctaatagacaatgagctgcgaaaagactcctggttcccctgttgatttgtgagggccaagtttgctagtagaaatcgacactgtttagtaaatacctctttagtattcagtggtcttcttttcaggctaattagtggattaagcaataatgaaagcactaagtttggttttgcttttgtgagatggtcagctttggtgctctccacaacatgtgtgttctgacatgtttctaatatgtggccagggcgttcagatttccagttttgaaaacaattgtatagatttcacaacacaaaaaggacatttgtggatgttactgcacattttaaattcttaacactaatttatctgtataagtgttttatatgcatatttttggacataaacagtttatgtaaaattagtaatgaatgatggcaacgagggcactgttatcttcgtttgttttcaatgatcatttagcattcaatgatggaacagctggtataacataagttgttggcatgaaatatttgagattggaaacttcttgccttgaacagaacttatatcttagattctctctcacattttcttggagctggggtttgaataggaaccagatgatgttcactgctgaaattccataatgcttcccattgaagggaagttgagaaccaggaaagctgctttcacgtcattgccatccagtactgacagggaagaaagatgtagttttccagtagtgatgaatcaaattattgaattaaatttcttcttaagaagtaaaaactcagaatgtaccatcttgtttcctttcagtttattaaatggcatcataaagatgactttgctaagttaatagagttaaaaatttttttaatataagccaaaatattaactttaatgaaacattgacttggcaaatgaatttcctataaattatcattggtcagaatgctgttttgtttaataatattacgcaacataaaccataggtgttattagaagtggagaactgcctttttcatctggggcttttaaggacttgctataaatgattattttttaaatgctttataaatcttcatggtttttctatttctgatacactcagctatagttaataccagagtatcctaccaggagtaatatttggaatatttaaatctagtaaaagaagaaagttgtacttcctggctgggagtattaggagatgggagtagagattcacttttaagttcttgaaaatatatgcattctcctaaatattaacaaaaatgatttggggaaatgacatggcttgattgttctgtttaaatttgtactgtggcttatgttacacatgttcatgttcacctctcattcacctgttttatatggtttaaaattctctttaacaaaattcagaaaattcacctgaaacgtattttgacctaaaagaaacatatttttgtatcagtattgaattttggacagtgcccccatataaggaagttactgttttaaaataaagcaaactaactgttttattttccttggaaaaaaaaaaattcc

SEQ ID NO: 278878 - DNA, 2777 bp, Homo sapiens
ccgactgtgactctcagcagccggcttgcggagcggttgccgcgtcctctgccgagcttcttgtgcccgcctccgagcctgaggaaacagctgattgatcagcctggctcaggcttggggcggggattggctgattggcagcaacgccattcgggacagccaagctagaagcctgaggagccggagagggtgctggctgccgcgcggccgagtgtgttttatggaccatgtgctgctatgtatgcctgaagaagtacttgaaatgcaaatttggggagactttgccatataaatgcttggctggattaagcgcctaattaggatggtttttcaacaagttggagtaagcatgcaatcggtactttggtctaggaagccatatggttcgtctcgaagtatcgtaaggaaaattggtactaatttgtctctgattcagtgtccaagagttcagtttcagattaacagccatgcaacagaatggagtcccagccacccaggagaggatgcagtggcgtcttttgctgatgttggatgggtagccaaagaagaaggagagtgttcagcaagactaaggacagaggtcagatcaaggccaccccttcaggatgaccttcttttctttgagaaggccccaagcagacagatttccttaccagacttgtctcaagaagagcctcagctgaagaccccagcgctggcaaatgaggaagcactgcagaagatttgcgctctcgaaaatgaacttgctgctctcagagctcagattgccaaaattgtgacccagcaggagcagcaaaatctcactgcaggtgacttagattctaccacatttggtaccataccaccacaccctccacctcccccaccgcccctgcctccccctgcactggggctccaccaaagtacatctgctgttgatctgattaaagaacgaagagagaaaagagccaatgctggaaagactttggttaagaacaatccaaagaaacctgaaatgccaaatatgctagagatccttaaagagatgaacagtgtaaaacttcggtcagtgaagaggtcagagcaagatgtgaagcccaagccagtggatgctactgaccctgctgccctcatagcagaggctctgaaaaagaaatttgcttatcggtatcgaagtgatagccaagatgaagttgaaaaaggaattccaaagtctgaatcagaggccacctcagagagagtgttgtcccttccagctggctttattcagccccacgtgtccaagcattgtctgggatagccttgtattggaaaacctggcccattctgtaaataaaggctccactagtgcctgagatctgaaggcagaaggaagattcaaatagaaagaataatggcccattcaacagctgactcctacagacattctgactaagatgcctgttgcaattcccctgagcaacttaataactgtgttttcaaggttaaactcaagaaccaatcagttatctgtaaatgaatatccaacttttctgaaaggaaaaaggtaacatgttaatataaacagcaaatacatacatcatttataaaactgcctcagatcaattaacaagataaacatacttaaaaaaaattcttgccttttgttttaatgggccatagcaaatactatctctgtataatgatcagtaaagagctgtcaaatagataaaaagactcacaatattgaatgttaaaacaaaccctaaatgaagaaaacattaaataatgctattaggtagtattccttatttccatttttattaaatctgagaactcaacagggttaatcatcaaatgaaaaacatgatttttaaaaagggaataatgaagcaaacattttaatctgtcttaattttaagaacccataatttacatatacagtgtgtttaagcaattttcgtatttgtactacagcaaaaaatgattttacttaccagaagtattgtcatactccaaatggtatccgtgaataaagatttaaaaaaataaaaaataaagtccagcttttttctcatggtcattacacaaaacagttttttatacagttgttttaaattatgaaagggaaaccagagaacagcaagtggaacttaaattttaatactcaaacatatttttatacctcaccacttttcttgaagtggatggtttcaatccactttcatggtttgctgacgtgcattttccctcagtgcaacattactaaaaagcttgtgtgtggaccacactatggcaatgacgtgagattttataaaccatcaccatcgtgttagccttattcacattaatgttttttattaggttctaaaatagcccatttatttttttttcctaaaatattagggttttttccattcattattatatcctatagctctagaagtgtgactccaggattatgctattgaggacataaggcactctctttactttcttgtcagttttgaaaacttctgggaacagattttaatgaatctatttaatgtaatagaatgtttacattccatccaatttacctttatacctagaccttaaggttttattcagctgagtatggaaatgtgtaatatctatttatgtaaataagtagtaaactatggctgagcaattgtgtatttgagtaaattttatagtattcaaacccatggaatagtctttgataaaaataactatccattaaaatgttaccgactatatagtaggatagctctaaattactaaaattgtatataatttattaaatttgacaaacactg

SEQ ID NO: 278879 - DNA, 1846 bp, Homo sapiens
ccgactgtgactctcagcagccggcttgcggagcggttgccgcgtcctctgccgagcttcttgtgcccgcctccgagcctgaggaaacagctgattgatcagcctggctcaggcttggggcggggattggctgattggcagcaacgccattcgggacagccaagctagaagcctgaggagccggagagggtgctggctgccgcgcggccgagtgtgttttatggaccatgtgctgctatgtatgcctgaagaagtacttgaaatgcaaatttggggagactttgccatataaatgcttggctggattaagcgcctaattaggatggtttttcaacaagttggagtaagcatgcaatcggtactttggtctaggaagccatatggttcgtctcgaagtatcgtaaggaaaattggtactaatttgtctctgattcagtgtccaagagttcagtttcagattaacagccatgcaacagaatggagtcccagccacccaggagaggatgcagtggcgtcttttgctgatgttggatgggtagccaaagaagaaggagagtgttcagcaagactaaggacagaggtcagatcaaggccaccccttcaggatgaccttcttttctttgagaaggccccaagcagacagatttccttaccagacttgtctcaagaagagcctcagctgaagaccccagcgctggcaaatgaggaagcactgcagaagatttgcgctctcgaaaatgaacttgctgctctcagagctcagattgccaaaattgtgacccagcaggagcagcaaaatctcactgcaggtgacttagattctaccacatttggtaccataccaccacaccctccacctcccccaccgcccctgcctccccctgcactggggctccaccaaagtacatctgctgttgatctgattaaagaacgaagagagaaaagagccaatgctggaaagactttggttaagaacaatccaaagaaacctgaaatgccaaatatgctagagatccttaaagagatgaacagtgtaaaacttcggtcagtgaagaggtcagagcaagatgtgaagcccaagccagtggatgctactgaccctgctgccctcatagcagaggctctgaaaaagaaatttgcttatcggtatcgaagtgatagccaagatgaagttgaaaaaggaattccaaagtctgaatcagaggccacctcagagagagtgttgtcccttccagctggctttattcagccccacgtgtccaagcattgtctgggatagccttgtattggaaaacctggcccattctgtaaataaaggctccactagaaaagactcgttaaagtcagaacctgctggacaagaaggcctatggcaaatcctactgaagataaatttataagccttaagagaataaggactatgacaaaaacaatccaaaccacaataattcatggtaggaaatattgtggcatctacataataaaatggttgaggtccttcttttgttaattttgaggcctataattgctccttaactggtcaggtatcttagatatcagctggctcacaggagaatgtatcttcataatataaacccaaacgttgcttataataaactgtacatataaaaaatcttaaaagaaaagttcaatattgcaatatagatgtctaatttctaggtaaatttagtaaacagaatatgttcaacatggagaaaatcacactccagaaataagttaaaaatatttcaacatctaaaaaaaaattcagcagcacccacagatacagcacatagaagaaattaaaaaattatgaatagttttaataaataacactaatatcata

SEQ ID NO: 278880 - DNA, 1440 bp, Homo sapiens
ccgactgtgactctcagcagccggcttgcggagcggttgccgcgtcctctgccgagcttcttgtgcccgcctccgagcctgaggaaacagctgattgatcagcctggctcaggcttggggcggggattggctgattggcagcaacgccattcgggacagccaagctagaagcctgaggagccggagagggtgctggctgccgcgcggccgagtgtgttttatggaccatgtgctgctatgtatgcctgaagaagtacttgaaatgcaaatttggggagactttgccatataaatgcttggctggattaagcgcctaattaggatggtttttcaacaagttggagtaagcatgcaatcggtactttggtctaggaagccatatggttcgtctcgaagtatcgtaaggaaaattggtactaatttgtctctgattcagtgtccaagagttcagtttcagattaacagccatgcaacagaatggagtcccagccacccaggagaggatgcagtggcgtcttttgctgatgttggatgggtagccaaagaagaaggagagtgttcagcaagactaaggacagaggtcagatcaaggccaccccttcaggatgaccttcttttctttgagaaggccccaagcagacagatttccttaccagacttgtctcaagaagagcctcagctgaagaccccagcgctggcaaatgaggaagcactgcagaagatttgcgctctcgaaaatgaacttgctgctctcagagctcagattgccaaaattgtgacccagcaggagcagcaaaatctcactgcaggtgacttagattctaccacatttggtaccataccaccacaccctccacctcccccaccgcccctgcctccccctgcactggggctccaccaaagtacatctgctgttgatctgattaaagaacgaagagagaaaagagccaatgctggaaagactttggttaagaacaatccaaagaaacctgaaatgccaaatatgctagagatccttaaagagatgaacagtgtaaaacttcggtcagtgaagaggtcagagcaagatgtgaagcccaagccagtggatgctactgaccctgctgccctcatagcagaggctctgaaaaagaaatttgcttatcggtatcgaagtgatagccaagatgaagttgaaaaaggaattccaaagtctgaatcagaggccacctcagagagagtgttgtcccttccagctggctttattcagccccacgtgtccaagcattgtctgggatagccttgtattggaaaacctggcccattctgtaaataaaggctccactagactgaagtgtgaaattgtacacccatgacaagtggatccctgtattacttcatggagcagaatagaatatctccaccctactacatgccagcaaaataaaatgttttcttata

SEQ ID NO: 278881 - DNA, 951 bp, Homo sapiens
ccgactgtgactctcagcagccggcttgcggagcggttgccgcgtcctctgccgagcttcttgtgcccgcctccgagcctgaggaaacagctgattgatcagcctggctcaggcttggggcggggattggctgattggcagcaacgccattcgggacagccaagctagaagcctgaggagccggagagggtgctggctgccgcgcggccgagtgtgttttatggaccatgtgctgctatgtatgcctgaagaagtacttgaaatgcaaatttggggagactttgccatataaatgcttggctggattaagcgcctaattaggatggtttttcaacaagttggagtaagcatgcaatcggtactttggtctaggaagccatatggttcgtctcgaagtatcgtaaggaaaattggtactaatttgtctctgattcagtgtccaagagttcagtttcagattaacagccatgcaacagaatggagtcccagccacccaggagaggatgcagtggcgtcttttgctgatgttggatgggtagccaaagaagaaggagagtgttcagcaagactaaggacagaggtcagatcaaggccaccccttcaggatgaccttcttttctttgagaaggccccaagcagacagatttccttaccagacttgtctcaagaagagcctcagctgaagaccccagcgctggcaaatgaggaagcactgcagaagatttgcgctctcgaaaatgaacttgctgctctcagagctcagattgccaaaattgtgacccagcaggagcagcaaaatctcactgcaggtgacttagattctaccacatttggtaccatacaacgcaaaaagtaaaccagaacagaaaaggaatgacggaaaggggtcaaagaaagcaaggagggagcagaggaagagaaagagaaaaagaaaagagaagaaagaaaaga

SEQ ID NO: 278882 - DNA, 625 bp, Homo sapiens
aagcctgtaacaatttgaacttcttccaccagctccttagctgattgcctaagtttctaaatttgataggaatttgtttagatgtgaggtttagcattgtttcttgtgtttaatgtgtttctgtgctcaactgattttcttcttttgcctcttcataccctttcagaaaaagactcgttaaagtcagaacctgctggacaagaaggcctatggcaaatcctactgaagataaatttataagccttaagagaataaggactatgacaaaaacaatccaaaccacaataattcatggtaggaaatattgtggcatctacataataaaatggttgaggtccttcttttgttaattttgaggcctataattgctccttaactggtcaggtatcttagatatcagctggctcacaggagaatgtatcttcataatataaacccaaacgttgcttataataaactgtacatataaaaaatcttaaaagaaaagttcaatattgcaatatagatgtctaatttctaggtaaatttagtaaacagaatatgttcaacatggagaaaatcacactccagaaataagttaaaaatatttcaacatctaaaaaaaaattcagcagcacccacagat

SEQ ID NO: 278883 - DNA, 2826 bp, Homo sapiens
ccgactgtgactctcagcagccggcttgcggagcggttgccgcgtcctctgccgagcttcttgtgcccgcctccgagcctgaggaaacagctgattgatcagcctggctcaggcttggggcggggattggctgattggcagcaacgccattcgggacagccaagctagaagcctgaggagccggagagggtgctggctgccgcgcggccgagtgtgttttatggaccatgtgctgctatgtatgcctgaagaagtacttgaaatgcaaatttggggagactttgccatataaatgcttggctggattaagcgcctaattaggatggtttttcaacaagttggagtaagcatgcaatcggtactttggtctaggaagccatatggttcgtctcgaagtatcgtaaggaaaattggtactaatttgtctctgattcagtgtccaagagttcagtttcagattaacagccatgcaacagaatggagtcccagccacccaggagaggatgcagtggcgtcttttgctgatgttggatgggtagccaaagaagaaggagagtgttcagcaagactaaggacagaggtcagatcaaggccaccccttcaggatgaccttcttttctttgagaaggccccaagcagacagatttccttaccagacttgtctcaagaagagcctcagctgaagaccccagcgctggcaaatgaggaagcactgcagaagatttgcgctctcgaaaatgaacttgctgctctcagagctcagattgccaaaattgtgacccagcaggagcagcaaaatctcactgcaggtgacttagattctaccacatttggtaccataccaccacaccctccacctcccccaccgcccctgcctccccctgcactggggctccaccaaagtacatctgctgttgatctgattaaagaacgaagagagaaaagagccaatgctggaaagactttggttaagaacaatccaaagaaacctgaaatgccaaatatgctagagatccttaaagagatgaacagtgtaaaacttcggtcagtgaagaggtcagagcaagatgtgaagcccaagccagtggatgctactgaccctgctgccctcatagcagaggctctgaaaaagaaatttgcttatcggtatcgaagtgatagccaagatgaagttgaaaaaggaattccaaagtctgaatcagaggccacctcagagagagtgttgtttgggccacacatgttgaagccaacaggaaaaatgaaggctttaattgaaaatgtatcagactcctaatagacaatgagctgcgaaaagactcctggttcccctgttgatttgtgagggccaagtttgctagtagaaatcgacactgtttagtaaatacctctttagtattcagtggtcttcttttcaggctaattagtggattaagcaataatgaaagcactaagtttggttttgcttttgtgagatggtcagctttggtgctctccacaacatgtgtgttctgacatgtttctaatatgtggccagggcgttcagatttccagttttgaaaacaattgtatagatttcacaacacaaaaaggacatttgtggatgttactgcacattttaaattcttaacactaatttatctgtataagtgttttatatgcatatttttggacataaacagtttatgtaaaattagtaatgaatgatggcaacgagggcactgttatcttcgtttgttttcaatgatcatttagcattcaatgatggaacagctggtataacataagttgttggcatgaaatatttgagattggaaacttcttgccttgaacagaacttatatcttagattctctctcacattttcttggagctggggtttgaataggaaccagatgatgttcactgctgaaattccataatgcttcccattgaagggaagttgagaaccaggaaagctgctttcacgtcattgccatccagtactgacagggaagaaagatgtagttttccagtagtgatgaatcaaattattgaattaaatttcttcttaagaagtaaaaactcagaatgtaccatcttgtttcctttcagtttattaaatggcatcataaagatgactttgctaagttaatagagttaaaaatttttttaatataagccaaaatattaactttaatgaaacattgacttggcaaatgaatttcctataaattatcattggtcagaatgctgttttgtttaataatattacgcaacataaaccataggtgttattagaagtggagaactgcctttttcatctggggcttttaaggacttgctataaatgattattttttaaatgctttataaatcttcatggtttttctatttctgatacactcagctatagttaataccagagtatcctaccaggagtaatatttggaatatttaaatctagtaaaagaagaaagttgtacttcctggctgggagtattaggagatgggagtagagattcacttttaagttcttgaaaatatatgcattctcctaaatattaacaaaaatgatttggggaaatgacatggcttgattgttctgtttaaatttgtactgtggcttatgttacacatgttcatgttcacctctcattcacctgttttatatggtttaaaattctctttaacaaaattcagaaaattcacctgaaacgtattttgacctaaaagaaacatatttttgtatcagtattgaattttggacagtgcccccatataaggaagttactgttttaaaataaagcaaactaactgttttattttccttggaaaaaaaaaaattcc

SEQ ID NO: 278884 - DNA, 2772 bp, Homo sapiens
ccgactgtgactctcagcagccggcttgcggagcggttgccgcgtcctctgccgagcttcttgtgcccgcctccgagcctgaggaaacagctgattgatcagcctggctcaggcttggggcggggattggctgattggcagcaacgccattcgggacagccaagctagaagcctgaggagccggagagggtgctggctgccgcgcggccgagtgtgttttatggaccatgtgctgctatgtatgcctgaagaagtacttgaaatgcaaatttggggagactttgccatataaatgcttggctggattaagcgcctaattaggatggtttttcaacaagttggagtaagcatgcaatcggtactttggtctaggaagccatatggttcgtctcgaagtatcgtaaggaaaattggtactaatttgtctctgattcagtgtccaagagttcagtttcagattaacagccatgcaacagaatggagtcccagccacccaggagaggatgcagtggcgtcttttgctgatgttggatgggtagccaaagaagaaggagagtgttcagcaagactaaggacagaggtcagatcaaggccaccccttcaggatgaccttcttttctttgagaaggccccaagcagacagatttccttaccagacttgtctcaagaagagcctcagctgaagaccccagcgctggcaaatgaggaagcactgcagaagatttgcgctctcgaaaatgaacttgctgctctcagagctcagattgccaaaattgtgacccagcaggagcagcaaaatctcactgcaggtgacttagattctaccacatttggtaccataccaccacaccctccacctcccccaccgcccctgcctccccctgcactggggctccaccaaagtacatctgctgttgatctgattaaagaacgaagagagaaaagagccaatgctggaaagactttggttaagaacaatccaaagaaacctgaaatgccaaatatgctagagatccttaaagagatgaacagtgtaaaacttcggtcagtgaagaggtcagagcaagatgtgaagcccaagccagtggatgctactgaccctgctgccctcatagcagaggctctgaaaaagaaatttgcttatcggtatcgaagtgatagccaagatgaagttgaaaaaggaattccaaagtctgaatcagaggccacctcagagagagtgttgtttgggccacacatgttgaagccaacaggaaaaatgaaggctttaattgaaaatgtatcagactcctaatagacaatgagctgcgaaaagactcctggttcccctgttgatttgtgagggccaagtttgctagtagaaatcgacactgtttagtaaatacctctttagtattcagtggtcttcttttcaggctaattagtggattaagcaataatgaaagcactaagtttggttttgcttttgtgagatggtcagctttggtgctctccacaacatgtgtgttctgacatgtttctaatatgtggccagggcgttcagatttccagttttgacattttaaattcttaacactaatttatctgtataagtgttttatatgcatatttttggacataaacagtttatgtaaaattagtaatgaatgatggcaacgagggcactgttatcttcgtttgttttcaatgatcatttagcattcaatgatggaacagctggtataacataagttgttggcatgaaatatttgagattggaaacttcttgccttgaacagaacttatatcttagattctctctcacattttcttggagctggggtttgaataggaaccagatgatgttcactgctgaaattccataatgcttcccattgaagggaagttgagaaccaggaaagctgctttcacgtcattgccatccagtactgacagggaagaaagatgtagttttccagtagtgatgaatcaaattattgaattaaatttcttcttaagaagtaaaaactcagaatgtaccatcttgtttcctttcagtttattaaatggcatcataaagatgactttgctaagttaatagagttaaaaatttttttaatataagccaaaatattaactttaatgaaacattgacttggcaaatgaatttcctataaattatcattggtcagaatgctgttttgtttaataatattacgcaacataaaccataggtgttattagaagtggagaactgcctttttcatctggggcttttaaggacttgctataaatgattattttttaaatgctttataaatcttcatggtttttctatttctgatacactcagctatagttaataccagagtatcctaccaggagtaatatttggaatatttaaatctagtaaaagaagaaagttgtacttcctggctgggagtattaggagatgggagtagagattcacttttaagttcttgaaaatatatgcattctcctaaatattaacaaaaatgatttggggaaatgacatggcttgattgttctgtttaaatttgtactgtggcttatgttacacatgttcatgttcacctctcattcacctgttttatatggtttaaaattctctttaacaaaattcagaaaattcacctgaaacgtattttgacctaaaagaaacatatttttgtatcagtattgaattttggacagtgcccccatataaggaagttactgttttaaaataaagcaaactaactgttttattttccttggaaaaaaaaaaattcc

SEQ ID NO: 278885 - DNA, 2860 bp, Homo sapiens
ccgactgtgactctcagcagccggcttgcggagcggttgccgcgtcctctgccgagcttcttgtgcccgcctccgagcctgaggaaacagctgattgatcagcctggctcaggcttggggcggggattggctgattggcagcaacgccattcgggacagccaagctagaagcctgaggagccggagagggtgctggctgccgcgcggccgagtgtgttttatggaccatgtgctgctatgtatgcctgaagaagtacttgaaatgcaaatttggggagactttgccatataaatgcttggctggattaagcgcctaattaggatggtttttcaacaagttggagtaagcatgcaatcggtactttggtctaggaagccatatggttcgtctcgaagtatcgtaaggaaaattggtactaatttgtctctgattcagtgtccaagagttcagtttcagctgtagtaggacaggaccttgctgggaaccttcaattaacagccatgcaacagaatggagtcccagccacccaggagaggatgcagtggcgtcttttgctgatgttggatgggtagccaaagaagaaggagagtgttcagcaagactaaggacagaggtcagatcaaggccaccccttcaggatgaccttcttttctttgagaaggccccaagcagacagatttccttaccagacttgtctcaagaagagcctcagctgaagaccccagcgctggcaaatgaggaagcactgcagaagatttgcgctctcgaaaatgaacttgctgctctcagagctcagattgccaaaattgtgacccagcaggagcagcaaaatctcactgcaggtgacttagattctaccacatttggtaccataccaccacaccctccacctcccccaccgcccctgcctccccctgcactggggctccaccaaagtacatctgctgttgatctgattaaagaacgaagagagaaaagagccaatgctggaaagactttggttaagaacaatccaaagaaacctgaaatgccaaatatgctagagatccttaaagagatgaacagtgtaaaacttcggtcagtgaagaggtcagagcaagatgtgaagcccaagccagtggatgctactgaccctgctgccctcatagcagaggctctgaaaaagaaatttgcttatcggtatcgaagtgatagccaagatgaagttgaaaaaggaattccaaagtctgaatcagaggccacctcagagagagtgttgtttgggccacacatgttgaagccaacaggaaaaatgaaggctttaattgaaaatgtatcagactcctaatagacaatgagctgcgaaaagactcctggttcccctgttgatttgtgagggccaagtttgctagtagaaatcgacactgtttagtaaatacctctttagtattcagtggtcttcttttcaggctaattagtggattaagcaataatgaaagcactaagtttggttttgcttttgtgagatggtcagctttggtgctctccacaacatgtgtgttctgacatgtttctaatatgtggccagggcgttcagatttccagttttgaaaacaattgtatagatttcacaacacaaaaaggacatttgtggatgttactgcacattttaaattcttaacactaatttatctgtataagtgttttatatgcatatttttggacataaacagtttatgtaaaattagtaatgaatgatggcaacgagggcactgttatcttcgtttgttttcaatgatcatttagcattcaatgatggaacagctggtataacataagttgttggcatgaaatatttgagattggaaacttcttgccttgaacagaacttatatcttagattctctctcacattttcttggagctggggtttgaataggaaccagatgatgttcactgctgaaattccataatgcttcccattgaagggaagttgagaaccaggaaagctgctttcacgtcattgccatccagtactgacagggaagaaagatgtagttttccagtagtgatgaatcaaattattgaattaaatttcttcttaagaagtaaaaactcagaatgtaccatcttgtttcctttcagtttattaaatggcatcataaagatgactttgctaagttaatagagttaaaaatttttttaatataagccaaaatattaactttaatgaaacattgacttggcaaatgaatttcctataaattatcattggtcagaatgctgttttgtttaataatattacgcaacataaaccataggtgttattagaagtggagaactgcctttttcatctggggcttttaaggacttgctataaatgattattttttaaatgctttataaatcttcatggtttttctatttctgatacactcagctatagttaataccagagtatcctaccaggagtaatatttggaatatttaaatctagtaaaagaagaaagttgtacttcctggctgggagtattaggagatgggagtagagattcacttttaagttcttgaaaatatatgcattctcctaaatattaacaaaaatgatttggggaaatgacatggcttgattgttctgtttaaatttgtactgtggcttatgttacacatgttcatgttcacctctcattcacctgttttatatggtttaaaattctctttaacaaaattcagaaaattcacctgaaacgtattttgacctaaaagaaacatatttttgtatcagtattgaattttggacagtgcccccatataaggaagttactgttttaaaataaagcaaactaactgttttattttccttggaaaaaaaaaaattcc

SEQ ID NO: 278886 - DNA, 2441 bp, Homo sapiens
ccgactgtgactctcagcagccggcttgcggagcggttgccgcgtcctctgccgagcttcttgtgcccgcctccgagcctgaggaaacagctgattgatcagcctggctcaggcttggggcggggattggctgattggcagcaacgccattcgggacagccaagctagaagcctgaggagccggagagggtgctggctgccgcgcggccgagtgtgttttatggaccatgtgctgctatgtatgcctgaagaagtacttgaaatgcaaatttggggagactttgccatataaatgcttggctggattaagcgcctaattaggatggtttttcaacaagttggagtaagcatgcaatcggtactttggtctaggaagccatatggttcgtctcgaagtatcgtaaggaaaattggtactaatttgtctctgattcagtgtccaagagttcagtttcagattaacagccatgcaacagaatggagtcccagcctccccctgcactggggctccaccaaagtacatctgctgttgatctgattaaagaacgaagagagaaaagagccaatgctggaaagactttggttaagaacaatccaaagaaacctgaaatgccaaatatgctagagatccttaaagagatgaacagtgtaaaacttcggtcagtgaagaggtcagagcaagatgtgaagcccaagccagtggatgctactgaccctgctgccctcatagcagaggctctgaaaaagaaatttgcttatcggtatcgaagtgatagccaagatgaagttgaaaaaggaattccaaagtctgaatcagaggccacctcagagagagtgttgtttgggccacacatgttgaagccaacaggaaaaatgaaggctttaattgaaaatgtatcagactcctaatagacaatgagctgcgaaaagactcctggttcccctgttgatttgtgagggccaagtttgctagtagaaatcgacactgtttagtaaatacctctttagtattcagtggtcttcttttcaggctaattagtggattaagcaataatgaaagcactaagtttggttttgcttttgtgagatggtcagctttggtgctctccacaacatgtgtgttctgacatgtttctaatatgtggccagggcgttcagatttccagttttgaaaacaattgtatagatttcacaacacaaaaaggacatttgtggatgttactgcacattttaaattcttaacactaatttatctgtataagtgttttatatgcatatttttggacataaacagtttatgtaaaattagtaatgaatgatggcaacgagggcactgttatcttcgtttgttttcaatgatcatttagcattcaatgatggaacagctggtataacataagttgttggcatgaaatatttgagattggaaacttcttgccttgaacagaacttatatcttagattctctctcacattttcttggagctggggtttgaataggaaccagatgatgttcactgctgaaattccataatgcttcccattgaagggaagttgagaaccaggaaagctgctttcacgtcattgccatccagtactgacagggaagaaagatgtagttttccagtagtgatgaatcaaattattgaattaaatttcttcttaagaagtaaaaactcagaatgtaccatcttgtttcctttcagtttattaaatggcatcataaagatgactttgctaagttaatagagttaaaaatttttttaatataagccaaaatattaactttaatgaaacattgacttggcaaatgaatttcctataaattatcattggtcagaatgctgttttgtttaataatattacgcaacataaaccataggtgttattagaagtggagaactgcctttttcatctggggcttttaaggacttgctataaatgattattttttaaatgctttataaatcttcatggtttttctatttctgatacactcagctatagttaataccagagtatcctaccaggagtaatatttggaatatttaaatctagtaaaagaagaaagttgtacttcctggctgggagtattaggagatgggagtagagattcacttttaagttcttgaaaatatatgcattctcctaaatattaacaaaaatgatttggggaaatgacatggcttgattgttctgtttaaatttgtactgtggcttatgttacacatgttcatgttcacctctcattcacctgttttatatggtttaaaattctctttaacaaaattcagaaaattcacctgaaacgtattttgacctaaaagaaacatatttttgtatcagtattgaattttggacagtgcccccatataaggaagttactgttttaaaataaagcaaactaactgttttattttccttggaaaaaaaaaaattcc

SEQ ID NO: 278887 - DNA, 1744 bp, Homo sapiens
ccgactgtgactctcagcagccggcttgcggagcggttgccgcgtcctctgccgagcttcttgtgcccgcctccgagcctgaggaaacagctgattgatcagcctggctcaggcttggggcggggattggctgattggcagcaacgccattcgggacagccaagctagaagcctgaggagccggagagggtgctggctgccgcgcggccgagtgtgttttatggaccatgtgctgctatgtatgcctgaagaagtacttgaaatgcaaatttggggagactttgccatataaatgcttggctggattaagcgcctaattaggatggtttttcaacaagttggagtaagcatgcaatcggtactttggtctaggaagccatatggttcgtctcgaagtatcgtaaggaaaattggtactaatttgtctctgattcagtgtccaagagttcagtttcagattaacagccatgcaacagaatggagtcccagccacccaggagaggatgcagtggcgtcttttgctgatgttggatgggtagccaaagaagaaggagagtgttcagcaagactaaggacagaggtcagatcaaggccaccccttcaggatgaccttcttttctttgagaaggccccaagcagacagatttccttaccagacttgtctcaagaagagcctcagctgaagaccccagcgctggcaaatgaggaagcactgcagaagatttgcgctctcgaaaatgaacttgctgctctcagagctcagattgccaaaattgtgacccagcaggagcagcaaaatctcactgcaggtgacttagattctaccacatttggtaccataccaccacaccctccacctcccccaccgcccctgcctccccctgcactggggctccaccaaagtacatctgctgttgatctgattaaagaacgaagagagaaaagagccaatgctggaaagactttggttaagaacaatccaaagaaacctgaaatgccaaatatgctagagatccttaaagagatgaacagtgtaaaacttcggtcagtgaagaggtcagagcaagatgtgaagcccaagccagtggatgctactgaccctgctgccctcatagcagaggctctgaaaaagaaatttgcttatcggtatcgaagtgatagccaagatgaagttgaaaaaggaattccaaagtctgaatcagaggccacctcagagagagtgttgaaaagactcgttaaagtcagaacctgctggacaagaaggcctatggcaaatcctactgaagataaatttataagccttaagagaataaggactatgacaaaaacaatccaaaccacaataattcatggtaggaaatattgtggcatctacataataaaatggttgaggtccttcttttgttaattttgaggcctataattgctccttaactggtcaggtatcttagatatcagctggctcacaggagaatgtatcttcataatataaacccaaacgttgcttataataaactgtacatataaaaaatcttaaaagaaaagttcaatattgcaatatagatgtctaatttctaggtaaatttagtaaacagaatatgttcaacatggagaaaatcacactccagaaataagttaaaaatatttcaacatctaaaaaaaaattcagcagcacccacagatacagcacatagaagaaattaaaaaattatgaatagttttaataaataacactaatatcata

SEQ ID NO: 278888 - DNA, 1540 bp, Homo sapiens
ccgactgtgactctcagcagccggcttgcggagcggttgccgcgtcctctgccgagcttcttgtgcccgcctccgagcctgaggaaacagctgattgatcagcctggctcaggcttggggcggggattggctgattggcagcaacgccattcgggacagccaagctagaagcctgaggagccggagagggtgctggctgccgcgcggccgagtgtgttttatggaccatgtgctgctatgtatgcctgaagaagtacttgaaatgcaaatttggggagactttgccatataaatgcttggctggattaagcgcctaattaggatggtttttcaacaagttggagtaagcatgcaatcggtactttggtctaggaagccatatggttcgtctcgaagtatcgtaaggaaaattggtactaatttgtctctgattcagtgtccaagagttcagtttcagattaacagccatgcaacagaatggagtcccagccacccaggagaggatgcagtggcgtcttttgctgatgttggatgggtagccaaagaagaaggagagtgttcagcaagactaaggacagaggtcagatcaaggccaccccttcaggatgaccttcttttctttgagaaggccccaagcagacagatttccttaccagacttgtctcaagaagagcctcagctgaagaccccagcgctggcaaatgaggaagcactgcagaagatttgcgctctcgaaaatgaacttgctgctctcagagctcagattgccaaaattgtgacccagcaggagcagcaaaatctcactgcaggtgacttagattctaccacatttggtaccataccaccacaccctccacctcccccaccgcccctgcctccccctgcactggggctccaccaaagtacatctgctgttgatctgattaaagaacgaagagagaaaagagccaatgctggaaagactttggttaagaacaatccaaagaaacctgaaatgccaaatatgctagagatccttaaagagatgaacagtgtaaaacttcggtcagtgaagaggtcagagcaagatgtgaagcccaagccagtggatgctactgaccctgctgccctcatagcagaggctctgaaaaagaaatttgcttatcggtatcgaagtgatagccaagatgaagttgaaaaaggaattccaaagtctgaatcagaggccacctcagagagagtgttgtcccttccagctggctttattcagccccacgtgtccaagcattgtctgggatagccttgtattggaaaacctggcccattctgtaaataaaggctccactaggtaagtcataaaaccttgagaaaataggagaaaaagttattaacatatatgctgaaactctatctttaaaacatcatctatacaacattaaccttcctacatcctactccagtattacccagatcttattcttcaaaagattcctgtgtatgtgtaggtgacagagtctgtaatgtacatatccactttgaagaactgatttcttaagtaact

SEQ ID NO: 278889 - DNA, 3097 bp, Homo sapiens
ggcacgagggccagctgctgtagaagaggggaggaaacaagccagtgcaaggggagcaaaagagaaaaggagccaggctgggcttcctgatcccacagcatcgcagagctcgggaggcacagctcacagacacaggaaacacaggactgctattctgctctcctgcccacggtgatctggtgccagctggtggaacagtgggtgatggcgtccctgctgcaagaccagctgaccactgatcaggacttgctgctgatgcaggaaggcatgccgatgcgcaaggtgaggtccaaaagctggaagaagctaagatacttcagacttcagaatgacggcatgacagtctggcatgcacggcaggccaggggcagtgccaagcccagcttctcaatctctgatgtggagacaatacgtaatggccatgattccgagttgctgcgtagcctggcagaggagctccccctggagcagggcttcaccattgtcttccatggccgccgctccaacctggacctgatggccaacagtgttgaggaggcccagatatggatgcgagggctccagctgttggtggatcttgtcaccagcatggaccatcaggagcgcctggaccaatggctgagcgattggtttcaacgtggagacaaaaatcaggatggtaagatgagtttccaagaagttcagcggttattgcacctaatgaatgtggaaatggaccaagaatatgccttcagtctttttcaggcagcagacacgtcccagtctggaaccctggaaggagaagaattcgtacagttctataaggcattgactaaacgtgctgaggtgcaggaactgtttgaaagtttttcagctgatgggcagaagctgactctgctggaatttttggatttcctccaagaggagcagaaggagagagactgcacctctgagcttgctctggaactcattgaccgctatgaaccttcagacagtggcaaactgcggcatgtgctgagtatggatggcttcctcagctacctctgctctaaggatggagacatcttcaacccagcctgcctccccatctatcaggatatgactcaacccctgaaccactacttcatctgctcttctcataacacctacctagtgggggaccagctttgcggccagagcagcgtcgagggatatatacgggccctgaagcgggggtgccgctgcgtggaggtggatgtatgggatggacctagcggggaacctgtcgtttaccacggacacaccctgacctcccgcatcctgttcaaagatgtcgtggccacagtagcacagtatgccttccagacatcagactacccagtcatcttgtccctggagacccactgcagctgggagcagcagcagaccatggcccgtcatctgactgagatcctgggggagcagctgctgagcaccaccttggatggggtgctgcccactcagctgccctcgcctgaggagcttcggaggaagatcctggtgaaggggaagaagttaacacttgaggaagacctggaatatgaggaagaggaagcagaacctgagttggaagagtcagaattggcgctggagtcccagtttgagactgagcctgagccccaggagcagaaccttcagaataaggacaaaaagaagaaatccaagcccatcttgtgtccagccctctcttccctggttatctacttgaagtctgtctcattccgcagcttcacacattcaaaggagcactaccacttctacgagatatcatctttctctgaaaccaaggccaagcgcctcatcaaggaggctggcaatgagtttgtgcagcacaatacttggcagttaagccgtgtgtatcccagcggcctgaggacagactcttccaactacaacccccaggaactctggaatgcaggctgccagatggtggccatgaatatgcagactgcagggcttgaaatggacatctgtgatgggcatttccgccagaatggcggctgtggctatgtgctgaagccagacttcctgcgtgatatccagagttctttccaccctgagaagcccatcagccctttcaaagcccagactctcttaatccaggtgatcagcggtcagcaactccccaaagtggacaagaccaaagaggggtccattgtggatccactggtgaaagtgcagatctttggcgttcgtctagacacagcacggcaggagaccaactatgtggagaacaatggttttaatccatactgggggcagacactatgtttccgggtgctggtgcctgaacttgccatgctgcgttttgtggtaatggattatgactggaaatcccgaaatgactttattggtcagtacaccctgccttggacctgcatgcaacaaggttaccgccacattcacctgctgtccaaagatggcatcagcctccgcccagcttccatctttgtgtatatctgcatccaggaaggcctggagggggatgagtcctgaggtgggcatttcacgggaagggttggtatgctggctttagacggggagaaacatctggaaggatgctcgagagaacaaatggaggtggtgaaaatcaagctttggattgtgcattcctaggcacaaaattacctcattcttcctaacaagcaatctgggacctgattttccaccttttttctcttttcttcccttcctttgttttcataagcctttggtatctttcctgcccttttcctttgtgtactctatactggagttcccttcttcctcttgctgtaggctcaatcccataccgacatctacaactaatctttcccatcaactctgtgtgaaggcaggttgcaactagaaattcagaggggcttggaatagagaaacctaaagaagcatcatcccctccatccccaacttcctcaaagcccaaagccaagggaaggataaatcaaggctcaaggcttccccagcaaagattagggaaagagacttgaccccaggactgtactacgactcttaagagaacactgcacagcactcaaagtcccccactggactgcttcctccttagccccactggtataaatacatctctctccaatttggc

SEQ ID NO: 278890 - DNA, 3287 bp, Homo sapiens
ggcacgagggccagctgctgtagaagaggggaggaaacaagccagtgcaaggggagcaaaagagaaaaggagccaggctgggcttcctgatcccacagcatcgcagagctcgggaggcacagctcacagacacaggaaacacaggactgctattctgctctcctgcccacggtgatctggtgccagctggtggaacagtgggtgatggcgtccctgctgcaagaccagctgaccactgatcaggacttgctgctgatgcaggaaggcatgccgatgcgcaagtctcaatctctgatgtggagacaatacgtaatggccatgattccgagttgctgcgtagcctggcagaggagctccccctggagcagggcttcaccattgtcttccatggccgccgctccaacctggacctgatggccaacagtgttgaggaggcccagatatggatgcgagggctccagctgttggtggatcttgtcaccagcatggaccatcaggagcgcctggaccagtatcggcaggatggagtcagggtgggggtgagggatcacgctatccctgaaggagccagatgcaacaggtttaggaaaggcagcagacacgtcccagtctggaaccctggaaggagaagaattcgtacagttctataaggcattgactaaacgtgctgaggtgcaggaactgtttgaaagtttttcagctgatgggcagaagctgactctgctggaatttttggatttcctccaagaggagcagaaggagagagactgcacctctgagcttgctctggaactcattgaccgctatgaaccttcagacagtggcaaactgcggcatgtgctgagtatggatggcttcctcagctacctctgctctaaggatggagacatcttcaacccagcctgcctccccatctatcaggatatgactcaacccctgaaccactacttcatctgctcttctcataacacctacctagtgggggaccagctttgcggccagagcagcgtcgagggatatatacgggccctgaagcgggggtgccgctgcgtggaggtggatgtatgggatggacctagcggggaacctgtcgtttaccacggacacaccctgacctcccgcatcctgttcaaagatgtcgtggccacagtagcacagtatgccttccagacatcagactacccagtcatcttgtccctggagacccactgcagctgggagcagcagcagaccatggcccgtcatctgactgagatcctgggggagcagctgctgagcaccaccttggatggggtgctgcccactcagctgccctcgcctgaggagcttcggaggaagatcctggtgaaggggaagaagttaacacttgaggaagacctggaatatgaggaagaggaagcagaacctgagttggaagagtcagaattggcgctggagtcccagtttgagactgagcctgagccccaggagcagaaccttcagaataaggacaaaaagaagaaatccaagcccatcttgtgtccagccctctcttccctggttatctacttgaagtctgtctcattccgcagcttcacacattcaaaggagcactaccacttctacgagatatcatctttctctgaaaccaaggccaagcgcctcatcaaggaggctggtcaggaccaaaatggagggatggggagggaagtgggatggataggttcaggcctgatggactggcaggtaagtcccaagaaaaaagacaaggtagctaaggagagatgaaggagttcagaaactccttagagcagacaagggcagaggagttatgaatagtggctcaagggtctaggggcaggaaagctggtctggatggacagagtagagaggcacagtgaaactttctggagccagcttcagatgctggagagaagggtgaagagtaggcagggtccttgggactagggaagtgggagattccaccccacttccatctccctctctatacccttttacaggcaatgagtttgtgcagcacaatacttggcagttaagccgtgtgtatcccagcggcctgaggacagactcttccaactacaacccccaggaactctggaatgcaggctgccagatggtggccatgaatatgcagactgcagggcttgaaatggacatctgtgatgggcatttccgccagaatggcggctgtggctatgtgctgaagccagacttcctgcgtgatatccagagttctttccaccctgagaagcccatcagccctttcaaagcccagactctcttaatccaggtgatcagcggtcagcaactccccaaagtggacaagaccaaagaggggtccattgtggatccactggtgaaagtgcagatctttggcgttcgtctagacacagcacggcaggagaccaactatgtggagaacaatggttttaatccatactgggggcagacactatgtttccgggtgctggtgcctgaacttgccatgctgcgttttgtggtaatggattatgactggaaatcccgaaatgactttattggtcagtacaccctgccttggacctgcatgcaacaaggttaccgccacattcacctgctgtccaaagatggcatcagcctccgcccagcttccatctttgtgtatatctgcatccaggaaggcctggagggggatgagtcctgaggtgggcatttcacgggaagggttggtatgctggctttagacggggagaaacatctggaaggatgctcgagagaacaaatggaggtggtgaaaatcaagctttggattgtgcattcctaggcacaaaattacctcattcttcctaacaagcaatctgggacctgattttccaccttttttctcttttcttcccttcctttgttttcataagcctttggtatctttcctgcccttttcctttgtgtactctatactggagttcccttcttcctcttgctgtaggctcaatcccataccgacatctacaactaatctttcccatcaactctgtgtgaaggcaggttgcaactagaaattcagaggggcttggaatagagaaacctaaagaagcatcatcccctccatccccaacttcctcaaagcccaaagccaagggaaggataaatcaaggctcaaggcttccccagcaaagattagggaaagagacttgaccccaggactgtactacgactcttaagagaacactgcacagcactcaaagtcccccactggactgcttcctccttagccccactggtataaatacatctctctccaatttggc

SEQ ID NO: 278891 - DNA, 3676 bp, Homo sapiens
ggcacgagggccagctgctgtagaagaggggaggaaacaagccagtgcaaggggagcaaaagagaaaaggagccaggctgggcttcctgatcccacagcatcgcagagctcgggaggcacagctcacagacacaggaaacacaggactgctattctgctctcctgcccacggtgatctggtgccagctggtggaacagtgggtgatggcgtccctgctgcaagaccagctgaccactgatcaggacttgctgctgatgcaggaaggcatgccgatgcgcaaggtgaggtccaaaagctggaagaagctaagatacttcagacttcagaatgacggcatgacagtctggcatgcacggcaggccaggggcagtgccaagcccagcttctcaatctctgatgtggagacaatacgtaatggccatgattccgagttgctgcgtagcctggcagaggagctccccctggagcagggcttcaccattgtcttccatggccgccgctccaacctggacctgatggccaacagtgttgaggaggcccagatatggatgcgagggctccagctgttggtggatcttgtcaccagcatggaccatcaggagcgcctggaccaatggctgagcgattggtttcaacgtggagacaaaaatcaggatggtaagatgagtttccaagaagttcagcggttattgcacctaatgaatgtggaaatggaccaagaatatgccttcagtctttttcaggcagcagacacgtcccagtctggaaccctggaaggagaagaattcgtacagttctataaggcattgactaaacgtgctgaggtgcaggaactgtttgaaagtttttcagctgatgggcagaagctgactctgctggaatttttggatttcctccaagaggagcagaaggagagagactgcacctctgagcttgctctggaactcattgaccgctatgaaccttcagacagtggcaaactgcggcatgtgctgagtatggatggcttcctcagctacctctgctctaaggatggagacatcttcaacccagcctgcctccccatctatcaggatatgactcaacccctgaaccactacttcatctgctcttctcataacacctacctagtgggggaccagctttgcggccagagcagcgtcgagggatatatacgggccctgaagcgggggtgccgctgcgtggaggtggatgtatgggatggacctagcggggaacctgtcgtttaccacggacacaccctgacctcccgcatcctgttcaaagatgtcgtggccacagtagcacagtatgccttccagacatcagactacccagtcatcttgtccctggagacccactgcagctgggagcagcagcagaccatggcccgtcatctgactgagatcctgggggagcagctgctgagcaccaccttggatggggtgctgcccactcagctgccctcgcctgaggagcttcggaggaagatcctggtgaaggggaagaagttaacacttgaggaagacctggaatatgaggaagaggaagcagaacctgagttggaagagtcagaattggcgctggagtcccagtttgagactgagcctgagccccaggagcagaaccttcagaataaggacaaaaagaagaaatccaagcccatcttgtgtccagccctctcttccctggttatctacttgaagtctgtctcattccgcagcttcacacattcaaaggagcactaccacttctacgagatatcatctttctctgaaaccaaggccaagcgcctcatcaaggaggctggtcaggaccaaaatggagggatggggagggaagtgggatggataggttcaggcctgatggactggcaggtaagtcccaagaaaaaagacaaggtagctaaggagagatgaaggagttcagaaactccttagagcagacaagggcagaggagttatgaatagtggctcaagggtctaggggcaggaaagctggtctggatggacagagtagagaggcacagtgaaactttctggagccagcttcagatgctggagagaagggtgaagagtaggcagggtccttgggactagggaagtgggagattccaccccacttccatctccctctctatacccttttacaggcaatgagtttgtgcagcacaatacttggcagttaagccgtgtgtatcccagcggcctgaggacagactcttccaactacaacccccaggaactctggaatgcaggctgccagatgggtgaggaggcagcagggactgggaagagggagtggaggagcagcaggtgggaaataagttctctagtgatggtagggttggggaatgctcaagaaaattgctaggctgagaaatgctatcagtggatattaccagcaggtaccgtgcacccagtacctatcttcttaactccctgaaagaggggctggaaggcctccatggtgaatcttgctcttcttttctcctggggccctcagtggccatgaatatgcagactgcagggcttgaaatggacatctgtgatgggcatttccgccagaatggcggctgtggctatgtgctgaagccagacttcctgcgtgatatccagagttctttccaccctgagaagcccatcagccctttcaaagcccagactctcttaatccaggtgatcagcggtcagcaactccccaaagtggacaagaccaaagaggggtccattgtggatccactggtgaaagtgcagatctttggcgttcgtctagacacagcacggcaggagaccaactatgtggagaacaatggttttaatccatactgggggcagacactatgtttccgggtgctggtgcctgaacttgccatgctgcgttttgtggtaatggattatgactggaaatcccgaaatgactttattggtcagtacaccctgccttggacctgcatgcaacaaggttaccgccacattcacctgctgtccaaagatggcatcagcctccgcccagcttccatctttgtgtatatctgcatccaggaaggcctggagggggatgagtcctgaggtgggcatttcacgggaagggttggtatgctggctttagacggggagaaacatctggaaggatgctcgagagaacaaatggaggtggtgaaaatcaagctttggattgtgcattcctaggcacaaaattacctcattcttcctaacaagcaatctgggacctgattttccaccttttttctcttttcttcccttcctttgttttcataagcctttggtatctttcctgcccttttcctttgtgtactctatactggagttcccttcttcctcttgctgtaggctcaatcccataccgacatctacaactaatctttcccatcaactctgtgtgaaggcaggttgcaactagaaattcagaggggcttggaatagagaaacctaaagaagcatcatcccctccatccccaacttcctcaaagcccaaagccaagggaaggataaatcaaggctcaaggcttccccagcaaagattagggaaagagacttgaccccaggactgtactacgactcttaagagaacactgcacagcactcaaagtcccccactggactgcttcctccttagccccactggtataaatacatctctctccaatttggc

SEQ ID NO: 278892 - DNA, 3754 bp, Homo sapiens
ggcacgagggccagctgctgtagaagaggggaggaaacaagccagtgcaaggggagcaaaagagaaaaggagccaggctgggcttcctgatcccacagcatcgcagagctcgggaggcacagctcacagacacaggaaacacaggactgctattctgctctcctgcccacggtgatctggtgccagctggtggaacagtgggtgatggcgtccctgctgcaagaccagctgaccactgatcaggacttgctgctgatgcaggaaggcatgccgatgcgcaaggtgaggtccaaaagctggaagaagctaagatacttcagacttcagaatgacggcatgacagtctggcatgcacggcaggccaggggcagtgccaagcccagcttctcaatctctgatgtggagacaatacgtaatggccatgattccgagttgctgcgtagcctggcagaggagctccccctggagcagggcttcaccattgtcttccatggccgccgctccaacctggacctgatggccaacagtgttgaggaggcccagatatggatgcgagggctccagctgttggtggatcttgtcaccagcatggaccatcaggagcgcctggaccaatggctgagcgattggtttcaacgtggagacaaaaatcaggatggtaagatgagtttccaagaagttcagcggttattgcacctaatgaatgtggaaatggaccaagaatatgccttcagtctttttcaggcagcagacacgtcccagtctggaaccctggaaggagaagaattcgtacagttctataaggcattgactaaacgtgctgaggtgcaggaactgtttgaaagtttttcagctgatgggcagaagctgactctgctggaatttttggatttcctccaagaggagcagaaggagagagactgcacctctgagcttgctctggaactcattgaccgctatgaaccttcagacagtggcaaactgcggcatgtgctgagtatggatggcttcctcagctacctctgctctaaggatggagacatcttcaacccagcctgcctccccatctatcaggatatgactcaacccctgaaccactacttcatctgctcttctcataacacctacctagtgggggaccagctttgcggccagagcagcgtcgagggatatatacgggccctgaagcgggggtgccgctgcgtggaggtggatgtatgggatggacctagcggggaacctgtcgtttaccacggacacaccctgacctcccgcatcctgttcaaagatgtcgtggccacagtagcacagtatgccttccagacatcagactacccagtcatcttgtccctggagacccactgcagctgggagcagcagcagaccatggcccgtcatctgactgagatcctgggggagcagctgctgagcaccaccttggatggggtgctgcccactcagctgccctcgcctgaggagcttcggaggaagatcctggtgaaggggaagaagttaacacttgaggaagacctggaatatgaggaagaggaagcagaacctgagttggaagagtcagaattggcgctggagtcccagtttgagactgagcctgagccccaggagcagaaccttcagaataaggacaaaaagaagaaatccaagcccatcttgtgtccagccctctcttccctggttatctacttgaagtctgtctcattccgcagcttcacacattcaaaggagcactaccacttctacgagatatcatctttctctgaaaccaaggccaagcgcctcatcaaggaggctggtcaggaccaaaatggagggatggggagggaagtgggatggataggttcaggcctgatggactggcaggtaagtcccaagaaaaaagacaaggtagctaaggagagatgaaggagttcagaaactccttagagcagacaagggcagaggagttatgaatagtggctcaagggtctaggggcaggaaagctggtctggatggacagagtagagaggcacagtgaaactttctggagccagcttcagatgctggagagaagggtgaagagtaggcagggtccttgggactagggaagtgggagattccaccccacttccatctccctctctatacccttttacaggcaatgagtttgtgcagcacaatacttggcagttaagccgtgtgtatcccagcggcctgaggacagactcttccaactacaacccccaggaactctggaatgcaggctgccagatgggtgaggaggcagcagggactgggaagagggagtggaggagcagcaggtgggaaataagttctctagtgatggtagggttggggaatgctcaagaaaattgctaggctgagaaatgctatcagtggatattaccagcaggtaccgtgcacccagtacctatcttcttaactccctgaaagaggggctggaaggcctccatggtgaatcttgctcttcttttctcctggggccctcagtggccatgaatatgcagactgcagggcttgaaatggacatctgtgatgggcatttccgccagaatggcggctgtggctatgtgctgaagccagacttcctgcgtgatatccagagttctttccaccctgagaagcccatcagccctttcaaagcccagactctcttaatccaggtgatcagcggtcagcaactccccaaagtggacaagaccaaagaggggtccattgtggatccactggtgaaagtgcagatctttggcgttcgtctagacacagcacggcaggagaccaactatgtggagaacaatggttttaatccatactgggggcagacactatgtttccgggtgctggtgcctgaacttgccatgctgcgttttgtggtaatggattatgactggaaatcccgaaatgactttattggtcagtacaccctgccttggacctgcatgcaacaaggtgagccagcccctttgacccctggccaataccccagctctggctgccttcctaatgctgtcctcctgccccttccaggttaccgccacattcacctgctgtccaaagatggcatcagcctccgcccagcttccatctttgtgtatatctgcatccaggaaggcctggagggggatgagtcctgaggtgggcatttcacgggaagggttggtatgctggctttagacggggagaaacatctggaaggatgctcgagagaacaaatggaggtggtgaaaatcaagctttggattgtgcattcctaggcacaaaattacctcattcttcctaacaagcaatctgggacctgattttccaccttttttctcttttcttcccttcctttgttttcataagcctttggtatctttcctgcccttttcctttgtgtactctatactggagttcccttcttcctcttgctgtaggctcaatcccataccgacatctacaactaatctttcccatcaactctgtgtgaaggcaggttgcaactagaaattcagaggggcttggaatagagaaacctaaagaagcatcatcccctccatccccaacttcctcaaagcccaaagccaagggaaggataaatcaaggctcaaggcttccccagcaaagattagggaaagagacttgaccccaggactgtactacgactcttaagagaacactgcacagcactcaaagtcccccactggactgcttcctccttagccccactggtataaatacatctctctccaatttggc

SEQ ID NO: 278893 - DNA, 3845 bp, Homo sapiens
ggcacgagggccagctgctgtagaagaggggaggaaacaagccagtgcaaggggagcaaaagagaaaaggagccaggctgggcttcctgatcccacagcatcgcagagctcgggaggcacagctcacagacacaggaaacacaggactgctattctgctctcctgcccacggtgatctggtgccagctggtggaacagtgggtgatggcgtccctgctgcaagaccagctgaccactgatcaggacttgctgctgatgcaggaaggcatgccgatgcgcaaggtgaggtccaaaagctggaagaagctaagatacttcagacttcagaatgacggcatgacagtctggcatgcacggcaggccaggggcagtgccaagcccagcttctcaatctctgatgtggagacaatacgtaatggccatgattccgagttgctgcgtagcctggcagaggagctccccctggagcagggcttcaccattgtcttccatggccgccgctccaacctggacctgatggccaacagtgttgaggaggcccagatatggatgcgagggctccagctgttggtggatcttgtcaccagcatggaccatcaggagcgcctggaccaatggctgagcgattggtttcaacgtggagacaaaaatcaggatggtaagatgagtttccaagaagttcagcggttattgcacctaatgaatgtggaaatggaccaagaatatgccttcagtctttttcaggcagcagacacgtcccagtctggaaccctggaaggagaagaattcgtacagttctataaggcattgactaaacgtgctgaggtgcaggaactgtttgaaagtttttcagctgatgggcagaagctgactctgctggaatttttggatttcctccaagaggagcagaaggagagagactgcacctctgagcttgctctggaactcattgaccgctatgaaccttcagacagtggcaaactgcggcatgtgctgagtatggatggcttcctcagctacctctgctctaaggatggagacatcttcaacccagcctgcctccccatctatcaggatatgactcaacccctgaaccactacttcatctgctcttctcataacacctacctagtgggggaccagctttgcggccagagcagcgtcgagggatatatacgggccctgaagcgggggtgccgctgcgtggaggtggatgtatgggatggacctagcggggaacctgtcgtttaccacggacacaccctgacctcccgcatcctgttcaaagatgtcgtggccacagtagcacagtatgccttccagacatcagactacccagtcatcttgtccctggagacccactgcagctgggagcagcagcagaccatggcccgtcatctgactgagatcctgggggagcagctgctgagcaccaccttggatggggtgctgcccactcagctgccctcgcctgaggagcttcggaggaagatcctggtgaaggggaagaagttaacacttgaggaagacctggaatatgaggaagaggaagcagaacctgagttggaagagtcagaattggcgctggagtcccagtttgagactgagcctgagccccaggagcagaaccttcagaataaggacaaaaagaagaaatccaagcccatcttgtgtccagccctctcttccctggttatctacttgaagtctgtctcattccgcagcttcacacattcaaaggagcactaccacttctacgagatatcatctttctctgaaaccaaggccaagcgcctcatcaaggaggctggtcaggaccaaaatggagggatggggagggaagtgggatggataggttcaggcctgatggactggcaggtaagtcccaagaaaaaagacaaggtagctaaggagagatgaaggagttcagaaactccttagagcagacaagggcagaggagttatgaatagtggctcaagggtctaggggcaggaaagctggtctggatggacagagtagagaggcacagtgaaactttctggagccagcttcagatgctggagagaagggtgaagagtaggcagggtccttgggactagggaagtgggagattccaccccacttccatctccctctctatacccttttacaggcaatgagtttgtgcagcacaatacttggcagttaagccgtgtgtatcccagcggcctgaggacagactcttccaactacaacccccaggaactctggaatgcaggctgccagatgggtgaggaggcagcagggactgggaagagggagtggaggagcagcaggtgggaaataagttctctagtgatggtagggttggggaatgctcaagaaaattgctaggctgagaaatgctatcagtggatattaccagcaggtaccgtgcacccagtacctatcttcttaactccctgaaagaggggctggaaggcctccatggtgaatcttgctcttcttttctcctggggccctcagtggccatgaatatgcagactgcagggcttgaaatggacatctgtgatgggcatttccgccagaatggcggctgtggctatgtgctgaagccagacttcctgcgtgatatccagagttctttccaccctgagaagcccatcagccctttcaaagcccagactctcttaatccaggtgatcagcggtcagcaactccccaaagtggacaagaccaaagaggggtccattgtggatccactggtgaaagtgcagatctttggcgttcgtctagacacagcacggcaggagaccaactatgtggagaacaatggttttaatccatactgggggcagacactatgtttccgggtgctggtgcctgaacttgccatgctgcgttttgtggtaatggattatgactggaaatcccgaaatgactttattggtcagtacaccctgccttggacctgcatgcaacaaggttaccgccacattcacctgctgtccaaagatggcatcagcctccgcccagcttccatctttgtgtatatctgcatccaggaaggcctggagggggatgagtcctgaggtgggcatttcacgggaagggttggtatgctggctttagacggggagaaacatctggaaggatgctcgagagaacaaatggaggtggtgaaaatcaagctttggattgtgcattcctaggcacaaaattacctcattcttcctaacaagcaatctgggacctgattttccaccttttttctcttttcttcccttcctttgttttcataagcctttggtatctttcctgcccttttcctttgtgtactctatactggagttcccttcttcctcttgctgtaggctcaatcccataccgacatctacaactaatctttcccatcaactctgtgtgaaggcaggttgcaactagaaattcagaggggcttggaatagagaaacctaaagaagcatcatcccctccatccccaacttcctcaaagcccaaagccaagggaaggataaatcaaggctcaaggcttccccagcaaagattagggaaagagacttgaccccaggactgtactacgactcttaagagaacactgcacagcactcaaagtcccccactggactgcttcctccttagccccactggtataaatacatctctctccaatttggcttcaatatggtctgtcattgttgggcaagaaggggaggtacaagggttgtggggacatctgggtagtcaggtgagacaaggaaaaggtagagaaagaggttcccaggagacctcttgcatgtgctacataggaaggacacagagtatggcttttaagaatcagggcaaa

SEQ ID NO: 278894 - DNA, 2372 bp, Homo sapiens
tctgtttaaatataataataaatttaaaacctgtcacccaggatataacatagagcaaacacaagcccagaggttgacactgatcccagcagtacatgcagaccgcctttattcccattcccacccccaggttgtgacgtgcccgctgttttgtccgtctatctgttgtcagattgtggcccaggctcctatttccaagcctgagtcccttctcttgtcccggcaggtgaggcaggagggagaatacagtggggaggcagtgggcagaggtttaggttggatggccattatcttcttctctctcagactgctgagggttcaattccatcttcttttccaccttctccagaaatccaagcccatcttgtgtccagccctctcttccctggttatctacttgaagtctgtctcattccgcagcttcacacattcaaaggagcactaccacttctacgagatatcatctttctctgaaaccaaggccaagcgcctcatcaaggaggctggtcaggaccaaaatggagggatggggagggaagtgggatggataggttcaggcctgatggactggcaggtaagtcccaagaaaaaagacaaggtagctaaggagagatgaaggagttcagaaactccttagagcagacaagggcagaggagttatgaatagtggctcaagggtctaggggcaggaaagctggtctggatggacagagtagagaggcacagtgaaactttctggagccagcttcagatgctggagagaagggtgaagagtaggcagggtccttgggactagggaagtgggagattccaccccacttccatctccctctctatacccttttacaggcaatgagtttgtgcagcacaatacttggcagttaagccgtgtgtatcccagcggcctgaggacagactcttccaactacaacccccaggaactctggaatgcaggctgccagatgggtgaggaggcagcagggactgggaagagggagtggaggagcagcaggtgggaaataagttctctagtgatggtagggttggggaatgctcaagaaaattgctaggctgagaaatgctatcagtggatattaccagcaggtaccgtgcacccagtacctatcttcttaactccctgaaagaggggctggaaggcctccatggtgaatcttgctcttcttttctcctggggccctcagtggccatgaatatgcagactgcagggcttgaaatggacatctgtgatgggcatttccgccagaatggcggctgtggctatgtgctgaagccagacttcctgcgtgatatccagagttctttccaccctgagaagcccatcagccctttcaaagcccagactctcttaatccaggtgatcagcggtcagcaactccccaaagtggacaagaccaaagaggggtccattgtggatccactggtgaaagtgcagatctttggcgttcgtctagacacagcacggcaggagaccaactatgtggagaacaatggttttaatccatactgggggcagacactatgtttccgggtgctggtgcctgaacttgccatgctgcgttttgtggtaatggattatgactggaaatcccgaaatgactttattggtcagtacaccctgccttggacctgcatgcaacaaggttaccgccacattcacctgctgtccaaagatggcatcagcctccgcccagcttccatctttgtgtatatctgcatccaggaaggcctggagggggatgagtcctgaggtgggcatttcacgggaagggttggtatgctggctttagacggggagaaacatctggaaggatgctcgagagaacaaatggaggtggtgaaaatcaagctttggattgtgcattcctaggcacaaaattacctcattcttcctaacaagcaatctgggacctgattttccaccttttttctcttttcttcccttcctttgttttcataagcctttggtatctttcctgcccttttcctttgtgtactctatactggagttcccttcttcctcttgctgtaggctcaatcccataccgacatctacaactaatctttcccatcaactctgtgtgaaggcaggttgcaactagaaattcagaggggcttggaatagagaaacctaaagaagcatcatcccctccatccccaacttcctcaaagcccaaagccaagggaaggataaatcaaggctcaaggcttccccagcaaagattagggaaagagacttgaccccaggactgtactacgactcttaagagaacactgcacagcactcaaagtcccccactggactgcttcctccttagccccactggtataaatacatctctctccaatttggc

SEQ ID NO: 278895 - DNA, 3165 bp, Homo sapiens
ggcacgagggccagctgctgtagaagaggggaggaaacaagccagtgcaaggggagcaaaagagaaaaggagccaggctgggcttcctgatcccacagcatcgcagagctcgggaggcacagctcacagacacaggaaacacaggactgctattctgctctcctgcccacggtgatctggtgccagctggtggaacagtgggtgatggcgtccctgctgcaagaccagctgaccactgatcaggacttgctgctgatgcaggaaggcatgccgatgcgcaaggtgaggtccaaaagctggaagaagctaagatacttcagacttcagaatgacggcatgacagtctggcatgcacggcaggccaggggcagtgccaagcccagcttctcaatctctgatgtggagacaatacgtaatggccatgattccgagttgctgcgtagcctggcagaggagctccccctggagcagggcttcaccattgtcttccatggccgccgctccaacctggacctgatggccaacagtgttgaggaggcccagatatggatgcgagggctccagctgttggtggatcttgtcaccagcatggaccatcaggagcgcctggaccaatggctgagcgattggtttcaacgtggagacaaaaatcaggatggtaagatgagtttccaagaagttcagcggttattgcacctaatgaatgtggaaatggaccaagaatatgccttcagtctttttcaggcagcagacacgtcccagtctggaaccctggaaggagaagaattcgtacagttctataaggcattgactaaacgtgctgaggtgcaggaactgtttgaaagtttttcagctgatgggcagaagctgactctgctggaatttttggatttcctccaagaggagcagaaggagagagactgcacctctgagcttgctctggaactcattgaccgctatgaaccttcagacagtggcaaactgcggcatgtgctgagtatggatggcttcctcagctacctctgctctaaggatggagacatcttcaacccagcctgcctccccatctatcaggatatgactcaacccctgaaccactacttcatctgctcttctcataacacctacctagtgggggaccagctttgcggccagagcagcgtcgagggatatatacgggccctgaagcgggggtgccgctgcgtggaggtggatgtatgggatggacctagcggggaacctgtcgtttaccacggacacaccctgacctcccgcatcctgttcaaagatgtcgtggccacagtagcacagtatgccttccagacatcagactacccagtcatcttgtccctggagacccactgcagctgggagcagcagcagaccatggcccgtcatctgactgagatcctgggggagcagctgctgagcaccaccttggatggggtgctgcccactcagctgccctcgcctgaggagcttcggaggaagatcctggtgaaggggaagaagttaacacttgaggaagacctggaatatgaggaagaggaagcagaacctgagttggaagagtcagaattggcgctggagtcccagtttgagactgagcctgagccccaggagcagaaccttcagaataaggacaaaaagaagaaatccaagcccatcttgtgtccagccctctcttccctggttatctacttgaagtctgtctcattccgcagcttcacacattcaaaggagcactaccacttctacgagatatcatctttctctgaaaccaaggccaagcgcctcatcaaggaggctggtcaggaccaaaatggagggatggggagggaagtgggatggataggttcaggcctgatggactggcaggcaatgagtttgtgcagcacaatacttggcagttaagccgtgtgtatcccagcggcctgaggacagactcttccaactacaacccccaggaactctggaatgcaggctgccagatggtggccatgaatatgcagactgcagggcttgaaatggacatctgtgatgggcatttccgccagaatggcggctgtggctatgtgctgaagccagacttcctgcgtgatatccagagttctttccaccctgagaagcccatcagccctttcaaagcccagactctcttaatccaggtgatcagcggtcagcaactccccaaagtggacaagaccaaagaggggtccattgtggatccactggtgaaagtgcagatctttggcgttcgtctagacacagcacggcaggagaccaactatgtggagaacaatggttttaatccatactgggggcagacactatgtttccgggtgctggtgcctgaacttgccatgctgcgttttgtggtaatggattatgactggaaatcccgaaatgactttattggtcagtacaccctgccttggacctgcatgcaacaaggttaccgccacattcacctgctgtccaaagatggcatcagcctccgcccagcttccatctttgtgtatatctgcatccaggaaggcctggagggggatgagtcctgaggtgggcatttcacgggaagggttggtatgctggctttagacggggagaaacatctggaaggatgctcgagagaacaaatggaggtggtgaaaatcaagctttggattgtgcattcctaggcacaaaattacctcattcttcctaacaagcaatctgggacctgattttccaccttttttctcttttcttcccttcctttgttttcataagcctttggtatctttcctgcccttttcctttgtgtactctatactggagttcccttcttcctcttgctgtaggctcaatcccataccgacatctacaactaatctttcccatcaactctgtgtgaaggcaggttgcaactagaaattcagaggggcttggaatagagaaacctaaagaagcatcatcccctccatccccaacttcctcaaagcccaaagccaagggaaggataaatcaaggctcaaggcttccccagcaaagattagggaaagagacttgaccccaggactgtactacgactcttaagagaacactgcacagcactcaaagtcccccactggactgcttcctccttagccccactggtataaatacatctctctccaatttggc

SEQ ID NO: 278896 - DNA, 3505 bp, Homo sapiens
ggcacgagggccagctgctgtagaagaggggaggaaacaagccagtgcaaggggagcaaaagagaaaaggagccaggctgggcttcctgatcccacagcatcgcagagctcgggaggcacagctcacagacacaggaaacacaggactgctattctgctctcctgcccacggtgatctggtgccagctggtggaacagtgggtgatggcgtccctgctgcaagaccagctgaccactgatcaggacttgctgctgatgcaggaaggcatgccgatgcgcaaggtgaggtccaaaagctggaagaagctaagatacttcagacttcagaatgacggcatgacagtctggcatgcacggcaggccaggggcagtgccaagcccagcttctcaatctctgatgtggagacaatacgtaatggccatgattccgagttgctgcgtagcctggcagaggagctccccctggagcagggcttcaccattgtcttccatggccgccgctccaacctggacctgatggccaacagtgttgaggaggcccagatatggatgcgagggctccagctgttggtggatcttgtcaccagcatggaccatcaggagcgcctggaccaatggctgagcgattggtttcaacgtggagacaaaaatcaggatggtaagatgagtttccaagaagttcagcggttattgcacctaatgaatgtggaaatggaccaagaatatgccttcagtctttttcaggcagcagacacgtcccagtctggaaccctggaaggagaagaattcgtacagttctataaggcattgactaaacgtgctgaggtgcaggaactgtttgaaagtttttcagctgatgggcagaagctgactctgctggaatttttggatttcctccaagaggagcagaaggagagagactgcacctctgagcttgctctggaactcattgaccgctatgaaccttcagacagtggcaaactgcggcatgtgctgagtatggatggcttcctcagctacctctgctctaaggatggagacatcttcaacccagcctgcctccccatctatcaggatatgactcaacccctgaaccactacttcatctgctcttctcataacacctacctagtgggggaccagctttgcggccagagcagcgtcgagggatatatacgggccctgaagcgggggtgccgctgcgtggaggtggatgtatgggatggacctagcggggaacctgtcgtttaccacggacacaccctgacctcccgcatcctgttcaaagatgtcgtggccacagtagcacagtatgccttccagacatcagactacccagtcatcttgtccctggagacccactgcagctgggagcagcagcagaccatggcccgtcatctgactgagatcctgggggagcagctgctgagcaccaccttggatggggtgctgcccactcagctgccctcgcctgaggagcttcggaggaagatcctggtgaaggggaagaagttaacacttgaggaagacctggaatatgaggaagaggaagcagaacctgagttggaagagtcagaattggcgctggagtcccagtttgagactgagcctgagccccaggagcagaaccttcagaataaggacaaaaagaagaaatccaagcccatcttgtgtccagccctctcttccctggttatctacttgaagtctgtctcattccgcagcttcacacattcaaaggagcactaccacttctacgagatatcatctttctctgaaaccaaggccaagcgcctcatcaaggaggctggtcaggaccaaaatggagggatggggagggaagtgggatggataggttcaggcctgatggactggcaggtaagtcccaagaaaaaagacaaggtagctaaggagagatgaaggagttcagaaactccttagagcagacaagggcagaggagttatgaatagtggctcaagggtctaggggcaggaaagctggtctggatggacagagtagagaggcacagtgaaactttctggagccagcttcagatgctggagagaagggtgaagagtaggcagggtccttgggactagggaagtgggagattccaccccacttccatctccctctctatacccttttacaggcaatgagtttgtgcagcacaatacttggcagttaagccgtgtgtatcccagcggcctgaggacagactcttccaactacaacccccaggaactctggaatgcaggctgccagatgggtgaggaggcagcagggactgggaagagggagtggaggagcagcaggtgggaaataagttctctagtgatggtagggttggggaatgctcaagaaaattgctaggctgagaaatgctatcagtggatattaccagcaggtaccgtgcacccagtacctatcttcttaactccctgaaagaggggctggaaggcctccatggtgaatcttgctcttcttttctcctggggccctcagtggccatgaatatgcagactgcagggcttgaaatggacatctgtgatgggcatttccgccagaatggcggctgtggctatgtgctgaagccagacttcctgcgtgatatccagagttctttccaccctgagaagcccatcagccctttcaaagcccagactctcttaatccaggtgatcagcggtcagcaactccccaaagtggacaagaccaaagaggggtccattgtggatccactggtgaaagtgcagatctttggcgttcgtctagacacagcacggcaggagaccaactatgtggagaacaatggttttaatccatactgggggcagacactatgtttccgggtgctggtgcctgaacttgccatgctgcgttttgtggtaatggattatgactggaaatcccgaaatgactttattggtcagtacaccctgccttggacctgcatgcaacaaggttaccgccacattcacctgctgtccaaagatggcatcagcctccgcccagcttccatctttgtgtatatctgcatccaggaaggcctggagggggatgagtcctgaggttgcaactagaaattcagaggggcttggaatagagaaacctaaagaagcatcatcccctccatccccaacttcctcaaagcccaaagccaagggaaggataaatcaaggctcaaggcttccccagcaaagattagggaaagagacttgaccccaggactgtactacgactcttaagagaacactgcacagcactcaaagtcccccactggactgcttcctccttagccccactggtataaatacatctctctccaatttggcttcaatatggtctgtcattgttgggcaagaaggggaggtacaagggttgtggggacatctgggtagtcaggtgagacaaggaaaaggtagagaaagaggttcccaggagacctcttgcatgtgctacataggaaggacacagagtatggcttttaagaatcagggcaaa

SEQ ID NO: 278897 - DNA, 1171 bp, Homo sapiens
caaaccaaaaagcttcttctcccctggggttgggagtagggtcgggtggggctgggctgagcaggaacttgtgagattccagagccctgactacaggtgatcagcggtcagcaactccccaaagtggacaagaccaaagaggggtccattgtggatccactggtgaaagtgcagatctttggcgttcgtctagacacagcacggcaggagaccaactatgtggagaacaatggttttaatccatactgggggcagacactatgtttccgggtgctggtgcctgaacttgccatgctgcgttttgtggtaatggattatgactggaaatcccgaaatgactttattggtcagtacaccctgccttggacctgcatgcaacaaggtgagccagcccctttgacccctggccaataccccagctctggctgccttcctaatgctgtcctcctgccccttccaggttaccgccacattcacctgctgtccaaagatggcatcagcctccgcccagcttccatctttgtgtatatctgcatccaggaaggcctggagggggatgagtcctgaggtgggcatttcacgggaagggttggtatgctggctttagacggggagaaacatctggaaggatgctcgagagaacaaatggaggtggtgaaaatcaagctttggattgtgcattcctaggcacaaaattacctcattcttcctaacaagcaatctgggacctgattttccaccttttttctcttttcttcccttcctttgttttcataagcctttggtatctttcctgcccttttcctttgtgtactctatactggagttcccttcttcctcttgctgtaggctcaatcccataccgacatctacaactaatctttcccatcaactctgtgtgaaggcaggttgcaactagaaattcagaggggcttggaatagagaaacctaaagaagcatcatcccctccatccccaacttcctcaaagcccaaagccaagggaaggataaatcaaggctcaaggcttccccagcaaagattagggaaagagacttgaccccaggactgtactacgactcttaagagaacactgcacagcactcaaagtcccccactggactgcttcctccttagccccactggtataaatacatctctctccaatttggc

SEQ ID NO: 278898 - DNA, 1093 bp, Homo sapiens
caaaccaaaaagcttcttctcccctggggttgggagtagggtcgggtggggctgggctgagcaggaacttgtgagattccagagccctgactacaggtgatcagcggtcagcaactccccaaagtggacaagaccaaagaggggtccattgtggatccactggtgaaagtgcagatctttggcgttcgtctagacacagcacggcaggagaccaactatgtggagaacaatggttttaatccatactgggggcagacactatgtttccgggtgctggtgcctgaacttgccatgctgcgttttgtggtaatggattatgactggaaatcccgaaatgactttattggtcagtacaccctgccttggacctgcatgcaacaaggttaccgccacattcacctgctgtccaaagatggcatcagcctccgcccagcttccatctttgtgtatatctgcatccaggaaggcctggagggggatgagtcctgaggtgggcatttcacgggaagggttggtatgctggctttagacggggagaaacatctggaaggatgctcgagagaacaaatggaggtggtgaaaatcaagctttggattgtgcattcctaggcacaaaattacctcattcttcctaacaagcaatctgggacctgattttccaccttttttctcttttcttcccttcctttgttttcataagcctttggtatctttcctgcccttttcctttgtgtactctatactggagttcccttcttcctcttgctgtaggctcaatcccataccgacatctacaactaatctttcccatcaactctgtgtgaaggcaggttgcaactagaaattcagaggggcttggaatagagaaacctaaagaagcatcatcccctccatccccaacttcctcaaagcccaaagccaagggaaggataaatcaaggctcaaggcttccccagcaaagattagggaaagagacttgaccccaggactgtactacgactcttaagagaacactgcacagcactcaaagtcccccactggactgcttcctccttagccccactggtataaatacatctctctccaatttggc

SEQ ID NO: 278899 - DNA, 2637 bp, Homo sapiens
  misc_feature (2632)..(2634): n is a, c, g, or t
ggcacgagggccagctgctgtagaagaggggaggaaacaagccagtgcaaggggagcaaaagagaaaaggagccaggctgggcttcctgatcccacagcatcgcagagctcgggaggcacagctcacagacacaggaaacacaggactgctattctgctctcctgcccacggtgatctggtgccagctggtggaacagtgggtgatggcgtccctgctgcaagaccagctgaccactgatcaggacttgctgctgatgcaggaaggcatgccgatgcgcaaggtgaggtccaaaagctggaagaagctaagatacttcagacttcagaatgacggcatgacagtctggcatgcacggcaggccaggggcagtgccaagcccagcttctcaatctctgatgtggagacaatacgtaatggccatgattccgagttgctgcgtagcctggcagaggagctccccctggagcagggcttcaccattgtcttccatggccgccgctccaacctggacctgatggccaacagtgttgaggaggcccagatatggatgcgagggctccagctgttggtggatcttgtcaccagcatggaccatcaggagcgcctggaccaatggctgagcgattggtttcaacgtggagacaaaaatcaggatggtaagatgagtttccaagaagttcagcggttattgcacctaatgaatgtggaaatggaccaagaatatgccttcagtctttttcaggcagcagacacgtcccagtctggaaccctggaaggagaagaattcgtacagttctataaggcattgactaaacgtgctgaggtgcaggaactgtttgaaagtttttcagctgatgggcagaagctgactctgctggaatttttggatttcctccaagaggagcagaaggagagagactgcacctctgagcttgctctggaactcattgaccgctatgaaccttcagacagtggcaaactgcggcatgtgctgagtatggatggcttcctcagctacctctgctctaaggatggagacatcttcaacccagcctgcctccccatctatcaggatatgactcaacccctgaaccactacttcatctgctcttctcataacacctacctagtgggggaccagctttgcggccagagcagcgtcgagggatatatacgggccctgaagcgggggtgccgctgcgtggaggtggatgtatgggatggacctagcggggaacctgtcgtttaccacggacacaccctgacctcccgcatcctgttcaaagatgtcgtggccacagtagcacagtatgccttccagacatcagactacccagtcatcttgtccctggagacccactgcagctgggagcagcagcagaccatggcccgtcatctgactgagatcctgggggagcagctgctgagcaccaccttggatggggtgctgcccactcagctgccctcgcctgaggagcttcggaggaagatcctggtgaaggggaagaagttaacacttgaggaagacctggaatatgaggaagaggaagcagaacctgagttggaagagtcagaattggcgctggagtcccagtttgagactgagcctgagccccaggagcagaaccttcagaataaggacaaaaagaagaaatccaagcccatcttgtgtccagccctctcttccctggttatctacttgaagtctgtctcattccgcagcttcacacattcaaaggagcactaccacttctacgagatatcatctttctctgaaaccaaggccaagcgcctcatcaaggaggctggtcaggaccaaaatggagggatggggagggaagtgggatggataggttcaggcctgatggactggcaggtaagtcccaagaaaaaagacaaggtagctaaggagagatgaaggagttcagaaactccttagagcagacaagggcagaggagttatgaatagtggctcaagggtctaggggcaggaaagctggtctggatggacagagtagagaggcacagtgaaactttctggagccagcttcagatgctggagagaagggtgaagagtaggcagggtccttgggactagggaagtgggagattccaccccacttccatctccctctctatacccttttacaggcaatgagtttgtgcagcacaatacttggcagttaagccgtgtgtatcccagcggcctgaggacagactcttccaactacaacccccaggaactctggaatgcaggctgccagatggtggccatgaatatgcagactgcagggcttgaaatggacatctgtgatgggcatttccgccagaatggcggctgtggctatgtgctgaagccagacttcctgcgtgatatccagagttctttccaccctgagaagcccatcagccctttcaaagcccagactctcttaatccaggtgatcagcggtcagcaactccccaaagtggacaagaccaaagaggggtccattgtggatccactggtgaaagtgcagatctttggcgttcgtctagacacagcacggcaggagaccaactatgtggagaacaatggttttaatccatactgggggcagacgtctatgggccctgtggttgagggcaannnaaa

SEQ ID NO: 278900 - DNA, 412 bp, Homo sapiens
gtgctggggaggtgggggtaggagcatgattagttttccttctagtctgtcttccattaagtatagcatctgttattgcatgtccccacatgggaggcagtgtggaacagtacaaagaatcctggctcttcacttaaaagctccagtgacctgggcaaattacttgcttactctgagcctttttccttacctgtaaaatgctgattgccatctagattaaatgagaacacaagaaaagcaacccagtcaagaaaactgtcataatgtcttcttatttctttctgtccaccaactcaggttttaatccatactgggggcagacactatgtttccgggtgctggtgcctgaacttgccatgctgcgttttgtggtaatggattatgactggaaatcccgaaatgactttattgg

SEQ ID NO: 278901 - DNA, 584 bp, Homo sapiens
aaaatttaaaaaaaaatttttttaattaaaaagataacatttcccattaaaagtttcattcactctcccctaaacctctcttgcaggcagcagacacgtcccagtctggaaccctggaaggagaagaattcgtacagttctataaggcattgactaaacgtgctgaggtgcaggaactgtttgaaagtttttcagctgatgggcagaagctgactctgctggaatttttggatttcctccaagaggagcagaaggagagagactgcacctctgagcttgctctggaactcattgaccgctatgaaccttcagacagtggtaagagaaatcaggtggagaggcaccagacataggggttggagagagggacatgattacaaggtccagagacaagcagccatctgcctgagagaaggttgagtctatccctatcctgacccctgcccaatcatctcatttaaccactcctcccaaaggagggcaggcatttcctgttcagacaagacaggggtttcctctgaggtgctagacctctcaggaggaagaagattccatggctcctcattcctccattatgctcatgt

SEQ ID NO: 278902 - DNA, 3057 bp, Homo sapiens
ggcacgagggccagctgctgtagaagaggggaggaaacaagccagtgcaaggggagcaaaagagaaaaggagccaggctgggcttcctgatcccacagcatcgcagagctcgggaggcacagctcacagacacaggaaacacaggactgctattctgctctcctgcccacggtgatctggtgccagctggtggaacagtgggtgatggcgtccctgctgcaagaccagctgaccactgatcaggacttgctgctgatgcaggaaggcatgccgatgcgcaaggtgaggtccaaaagctggaagaagctaagatacttcagacttcagaatgacggcatgacagtctggcatgcacggcaggccaggggcagtgccaagcccagcttctcaatctctgatgtggagacaatacgtaatggccatgattccgagttgctgcgtagcctggcagaggagctccccctggagcagggcttcaccattgtcttccatggccgccgctccaacctggacctgatggccaacagtgttgaggaggcccagatatggatgcgagggctccagctgttggtggatcttgtcaccagcatggaccatcaggagcgcctggaccaatggctgagcgattggtttcaacgtggagacaaaaatcaggatggtaagatgagtttccaagaagttcagcggttattgcacctaatgaatgtggaaatggaccaagaatatgccttcagtctttttcaggcagcagacacgtcccagtctggaaccctggaaggagaagaattcgtacagttctataaggcattgactaaacgtgctgaggtgcaggaactgtttgaaagtttttcagctgatgggcagaagctgactctgctggaatttttggatttcctccaagaggagcagaaggagagagactgcacctctgagcttgctctggaactcattgaccgctatgaaccttcagacagtggcaaactgcggcatgtgctgagtatggatggcttcctcagctacctctgctctaaggatggagacatcttcaacccagcctgcctccccatctatcaggatatgactcaacccctgaaccactacttcatctgctcttctcataacacctacctagtgggggaccagctttgcggccagagcagcgtcgagggatatatacgggccctgaagcgggggtgccgctgcgtggaggtggatgtatgggatggacctagcggggaacctgtcgtttaccacggacacaccctgacctcccgcatcctgttcaaagatgtcgtggccacagtagcacagtatgccttccagacatcagactacccagtcatcttgtccctggagacccactgcagctgggagcagcagcagaccatggcccgtcatctgactgagatcctgggggagcagctgctgagcaccaccttggatggggtgctgcccactcagctgccctcgcctgaggagcttcggaggaagatcctggtgaaggggaagaagttaacacttgaggaagacctggaatatgaggaagaggaagcagaacctgagttggaagagtcagaattggcgctggagtcccagtttgagactgagcctgagccccaggagcagaaccttcagaataaggacaaaaagaagaaatccaagcccatcttgtgtccagccctctcttccctggttatctacttgaagtctgtctcattccgcagcttcacacattcaaaggagcactaccacttctacgagatatcatctttctctgaaaccaaggccaagcgcctcatcaaggaggctggtcaggaccaaaatggagggatggggagggaagtgggatggataggttcaggcctgatggactggcaggtaagtcccaagaaaaaagacaaggtagctaaggagagatgaaggagttcagaaactccttagagcagacaagggcagaggagttatgaatagtggctcaagggtctaggggcaggaaagctggtctggatggacagagtagagaggcacagtgaaactttctggagccagcttcagatgctggagagaagggtgaagagtaggcagggtccttgggactagggaagtgggagattccaccccacttccatctccctctctatacccttttacaggcaatgagtttgtgcagcacaatacttggcagttaagccgtgtgtatcccagcggcctgaggacagactcttccaactacaacccccaggaactctggaatgcaggctgccagatgggtgaggaggcagcagggactgggaagagggagtggaggagcagcaggtgggaaataagttctctagtgatggtagggttggggaatgctcaagaaaattgctaggctgagaaatgctatcagtggatattaccagcaggtaccgtgcacccagtacctatcttcttaactccctgaaagaggggctggaaggcctccatggtgaatcttgctcttcttttctcctggggccctcagtggccatgaatatgcagactgcagggcttgaaatggacatctgtgatgggcatttccgccagaatggcggctgtggctatgtgctgaagccagacttcctgcgtgatatccagagttctttccaccctgagaagcccatcagccctttcaaagcccagactctcttaatccaggtacagtggaaataaactgttgggaagaaactgagataactgggatagaagtgagggaagaggtggctaggcctgaccggaatgtagaggccggatagcctattaacagtgtctagttttagcttttggagccagctgcctagcttcaaaccacaacttcctaattgggtaatgttgggcaagttccttaacctctccatacctcagtctgctcacctgcaaaataggggtaacactaccacctgcctcacagggttataaggagtataacagttaatataaagttcttacaattcctggcacacaggaagtgctataaaagaggctggctgggagcgatagcttacacctgtaatcccagcgctttggaggccaagg

SEQ ID NO: 278903 - DNA, 2048 bp, Homo sapiens
ggcacgagggccagctgctgtagaagaggggaggaaacaagccagtgcaaggggagcaaaagagaaaaggagccaggctgggcttcctgatcccacagcatcgcagagctcgggaggcacagctcacagacacaggaaacacaggactgctattctgctctcctgcccacggtgatctggtgccagctggtggaacagtgggtgatggcgtccctgctgcaagaccagctgaccactgatcaggacttgctgctgatgcaggaaggcatgccgatgcgcaaggtgaggtccaaaagctggaagaagctaagatacttcagacttcagaatgacggcatgacagtctggcatgcacggcaggccaggggcagtgccaagcccagcttctcaatctctgatgtggagacaatacgtaatggccatgattccgagttgctgcgtagcctggcagaggagctccccctggagcagggcttcaccattgtcttccatggccgccgctccaacctggacctgatggccaacagtgttgaggaggcccagatatggatgcgagggctccagctgttggtggatcttgtcaccagcatggaccatcaggagcgcctggaccaatggctgagcgattggtttcaacgtggagacaaaaatcaggatggtaagatgagtttccaagaagttcagcggttattgcacctaatgaatgtggaaatggaccaagaatatgccttcagtctttttcaggcagcagacacgtcccagtctggaaccctggaaggagaagaattcgtacagttctataaggcattgactaaacgtgctgaggtgcaggaactgtttgaaagtttttcagctgatgggcagaagctgactctgctggaatttttggatttcctccaagaggagcagaaggagagagactgcacctctgagcttgctctggaactcattgaccgctatgaaccttcagacagtggcaaactgcggcatgtgctgagtatggatggcttcctcagctacctctgctctaaggatggagacatcttcaacccagcctgcctccccatctatcaggatatgactcaacccctgaaccactacttcatctgctcttctcataacacctacctagtgggggaccagctttgcggccagagcagcgtcgagggatatatacgggccctgaagcgggggtgccgctgcgtggaggtggatgtatgggatggacctagcggggaacctgtcgtttaccacggacacaccctgacctcccgcatcctgttcaaagatgtcgtggccacagtagcacagtatgccttccagacatcagactacccagtcatcttgtccctggagacccactgcagctgggagcagcagcagaccatggcccgtcatctgactgagatcctgggggagcagctgctgagcaccaccttggatggggtgctgcccactcagctgccctcgcctgaggagcttcggaggaagatcctggtgaaggggaagaagttaacacttgaggaagacctggaatatgaggaagaggaagcagaacctgagttggaagagtcagaattggcgctggagtcccagtttgagactgagcctgagccccaggagcagaaccttcagaataaggacaaaaagaaggtaagccaggagtggtctttctgctgtggtatttagtcaacttatgcaagctgaaggcctgttcatgaagactagagccgtgcaagatgcagggccaaggagcaatgacccttcctcccaatgaaggagatttaagaccgcatacatggcatcaatatatattatatactgccatatgtaggtatgttgcagtggctttccaacttctttgggccacatctttttttttaaaatgaaatcttacgcaaaatagataaacgcagaaccatcctagttgaagcacccatttggctctctcctgggtgccctagtgactcctgagacatttttgtacttcttggtcttcttaaaggccagcttgaaaaccagtgatgagcgggtgtgtgtttgtatgt

SEQ ID NO: 278904 - DNA, 817 bp, Homo sapiens
gcacgccctcctcccctccagctcaccgagcgatctcccttccttccttccagtacttcctcctggttgttctcctgaggaggaaaagaaggggtgactctccacatccttgcagcctcacctcatcatccctgcctgctgcctggccacacctggtcactcaaggcctccttcagtgccctggtctcagctgcctcagtaggctagtggagcacagccaggggaggacaggaggagggtattctctggagacaggtgtgcccccctactgacagaccctgctcagcagaacagaagcccttcagcgaatgagacctaccctctgcggaaggctggttaggaagcatccatgtctacttcagcgtctcacctccctgtcacaaacagatcaccacagttttcctccagcctcatgctgtcgtccccctagaggaatgtgggtacatggaatgttctccacctccatgcatgtccagtgacgttttggatcagcgtgtcagggacgctgtcaggcgtgcctgcttgcactcatccagccctggctggacgtgattctacgagcagagcaagaccagcatgttctgtcctccagttatcacagcagttactctggcaacctgcaggccctccctgaggtgtctgacggctgaagtcagggtccagtgggatggaatgaaggatgggcaccctggaagacagcccatggaggggcctttgggtcccctgctgccctgggcacctgcgaagagagaagctgagccaccctgcctgaggcagtaggcagtaagagctgaagggagcaggaggttagggccca

SEQ ID NO: 278905 - DNA, 181 bp, Homo sapiens
ctactactactactactactactaaattcgcggccgcgtcgacgctgcgagaagacgacagaaggggttctgggcctagttgtcctccctctggagccccgtcctgtggtctgcctcagtttcccctcctaatacatatggctgttttccacctcgataatataacacgagtttgggcccg

SEQ ID NO: 278906 - DNA, 190 bp, Homo sapiens
tcaagcttctaacgatgtacggggacatgctgtgagacctcctggaacactggcatctctgagcctccagaaggggttctgggcctagttgtcctccctctggagccccgtcctgtggtctgcctcagtttcccctcctaatacatatggctgttttccacctcgataatataacacgagtttgggcccg

SEQ ID NO: 278907 - DNA, 150 bp, Homo sapiens
tactactatacgggggcgattagacgacagaaggggttctgggcctagttgtcctccctctggagccccgtcctgtggtctgcctcagtttcccctcctaatacatatggctgttttccacctcgataatataacacgagtttgggcccg

SEQ ID NO: 278908 - DNA, 188 bp, Homo sapiens
tactactatacgggggcgattagacgacagaaggggttctgggcctagttgtcctccctctggagccccgtcctgtggtctgcctcagtttcccctcctaatacatatggctgttttccacctcgataatataacacgagtttgggcccgaaaaaaaatacaaacccggaaattcaaagtcgtatcga

SEQ ID NO: 278909 - DNA, 1557 bp, Homo sapiens
ggcggagctcggggccgggactctcagcctatcaagtgtctgtaattaattaaccaactgagatccagttcaggggtgaaagttcttcaggtacgaggagggcattgttgtcagtctggaccgagcccgcagagcccctcctcggcgtcctggtcccggccgtgcccgcggtgtcccgggaggaaggggcgggccgggggtcgggaggagtcacgtgccccctcccgccccaggtcgtcctctcagcatgggggtcccgcggcctcagccctgggcgctggggctcctgctctttctccttcctgggagcctgggcgcagaaagccacctctccctcctgtaccaccttaccgcggtgtcctcgcctgccccggggactcctgccttctgggtgtccggctggctgggcccgcagcagtacctgagctacaatagcctgcggggcgaggcggagccctgtggagcttgggtctgggaaaaccaggtgtcctggtattgggagaaagagaccacagatctgaggatcaaggagaagctctttctggaagctttcaaagctttggggggaaaaggtccctacactctgcagggcctgctgggctgtgaactgggccctgacaacacctcggtgcccaccgccaagttcgccctgaacggcgaggagttcatgaatttcgacctcaagcagggcacctggggtggggactggcccgaggccctggctatcagtcagcggtggcagcagcaggacaaggcggccaacaaggagctcaccttcctgctattctcctgcccgcaccgcctgcgggagcacctggagaggggccgcggaaacctggagtggaaggagcccccctccatgcgcctgaaggcccgacccagcagccctggcttttccgtgcttacctgcagcgccttctccttctaccctccggagctgcaacttcggttcctgcggaatgggctggccgctggcaccggccagggtgacttcggccccaacagtgacggatccttccacgcctcgtcgtcactaacagtcaaaagtggcgatgagcaccactactgctgcattgtgcagcacgcggggctggcgcagcccctcagggtggagctggaatctccagccaagtcctccgtgctcgtggtgggaatcgtcatcggtgtcttgctactcacggcagcggctgtaggaggagctctgttgtggagaaggatgaggagtgggctgccagccccttggatctcccttcgtggagacgacaccggggtcctcctgcccaccccaggggaggcccaggatgctgatttgaaggatgtaaatgtgattccagccaccgcctgaccatccgccattccgactgctaaaagcgaatgtagtcaggcccctttcatgctgtgagacctcctggaacactggcatctctgagcctccagaaggggttctgggcctagttgtcctccctctggagccccgtcctgtggtctgcctcagtttcccctcctaatacatatggctgttttccacctcgataatataacacgagtttgggcccg

SEQ ID NO: 278910 - DNA, 1504 bp, Homo sapiens
tatgcggctgtacggtcggaattttgggattcttcaggtacgaggagggcattgttgtcagtctggaccgagcccgcagagcccctcctcggcgtcctggtcccggccgtgcccgcggtgtcccgggaggaaggggcgggccgggggtcgggaggagtcacgtgccccctcccgccccaggtcgtcctctcagcatgggggtcccgcggcctcagccctgggcgctggggctcctgctctttctccttcctgggagcctgggcgcagaaagccacctctccctcctgtaccaccttaccgcggtgtcctcgcctgccccggggactcctgccttctgggtgtccggctggctgggcccgcagcagtacctgagctacaatagcctgcggggcgaggcggagccctgtggagcttgggtctgggaaaaccaggtgtcctggtattgggagaaagagaccacagatctgaggatcaaggagaagctctttctggaagctttcaaagctttggggggaaaaggtccctacactctgcagggcctgctgggctgtgaactgggccctgacaacacctcggtgcccaccgccaagttcgccctgaacggcgaggagttcatgaatttcgacctcaagcagggcacctggggtggggactggcccgaggccctggctatcagtcagcggtggcagcagcaggacaaggcggccaacaaggagctcaccttcctgctattctcctgcccgcaccgcctgcgggagcacctggagaggggccgcggaaacctggagtggaaggagcccccctccatgcgcctgaaggcccgacccagcagccctggcttttccgtgcttacctgcagcgccttctccttctaccctccggagctgcaacttcggttcctgcggaatgggctggccgctggcaccggccagggtgacttcggccccaacagtgacggatccttccacgcctcgtcgtcactaacagtcaaaagtggcgatgagcaccactactgctgcattgtgcagcacgcggggctggcgcagcccctcagggtggagctggaatctccagccaagtcctccgtgctcgtggtgggaatcgtcatcggtgtcttgctactcacggcagcggctgtaggaggagctctgttgtggagaaggatgaggagtgggctgccagccccttggatctcccttcgtggagacgacaccggggtcctcctgcccaccccaggggaggcccaggatgctgatttgaaggatgtaaatgtgattccagccaccgcctgaccatccgccattccgactgctaaaagcgaatgtagtcaggcccctttcatgctgtgagacctcctggaacactggcatctctgagcctccagaaggggttctgggcctagttgtcctccctctggagccccgtcctgtggtctgcctcagtttcccctcctaatacatatggctgttttccacctcgataatataacacgagtttgggcccg

SEQ ID NO: 278911 - DNA, 1921 bp, Homo sapiens
ggcggagctcggggccgggactctcagcctatcaagtgtctgtaattaattaaccaactgagatccagttcaggggtgaaagttcttcaggtacgaggagggcattgttgtcagtctggaccgagcccgcagagcccctcctcggcgtcctggtcccggccgtgcccgcggtgtcccgggaggaaggggcgggccgggggtcgggaggagtcacgtgccccctcccgccccaggtcgtcctctcagcatgggggtcccgcggcctcagccctgggcgctggggctcctgctctttctccttcctgggagcctgggcgcagaaagccacctctccctcctgtaccaccttaccgcggtgtcctcgcctgccccggggactcctgccttctgggtgtccggctggctgggcccgcagcagtacctgagctacaatagcctgcggggcgaggcggagccctgtggagcttgggtctgggaaaaccaggtgtcctggtattgggagaaagagaccacagatctgaggatcaaggagaagctctttctggaagctttcaaagctttggggggaaaaggtccctacactctgcagggcctgctgggctgtgaactgggccctgacaacacctcggtgcccaccgccaagttcgccctgaacggcgaggagttcatgaatttcgacctcaagcagggcacctggggtggggactggcccgaggccctggctatcagtcagcggtggcagcagcaggacaaggcggccaacaaggagctcaccttcctgctattctcctgcccgcaccgcctgcgggagcacctggagaggggccgcggaaacctggagtggaaggagcccccctccatgcgcctgaaggcccgacccagcagccctggcttttccgtgcttacctgcagcgccttctccttctaccctccggagctgcaacttcggttcctgcggaatgggctggccgctggcaccggccagggtgacttcggccccaacagtgacggatccttccacgcctcgtcgtcactaacagtcaaaagtggcgatgagcaccactactgctgcattgtgcagcacgcggggctggcgcagcccctcagggtggagctggaatctccagccaagtcctccgtgctcgtggtgggaatcgtcatcggtgtcttgctactcacggcagcggctgtaggaggagctctgttgtggagaaggatgaggagtgggctgccagccccttggatctcccttcgtggagacgacaccggggtcctcctgcccaccccaggggaggcccaggatgctgatttgaaggatgtaaatgtgattccagccaccgcctgaccatccgccattccgactgctaaaagcgaatgtagtcaggcccctttcatgctgtgagacctcctggaacactggcatctctgagcctccagaaggggttctgggcctagttgtcctccctctggagccccgtcctgtggtctgcctcagtttcccctcctaatacatatggctgttttccacctcgataatataacacgagtttgggcccgaaaaaaaaaagtgttctcatcatttttcaggcaggggaggtaagggaataagtcgggggactgaatggcggctgggcctcggatctctcctacaggtaacatgctgccacaggggaacctgccagttttatacatcaggtcatgtattttctttttctttttcttttttcttttttttagacggagtcttgctctgttgctcagtccggagtcctgtggcgcgatctcggctcactgtaaccggctccgcctccctgggttcacgccattctcctgcctcaggctcccgagtagctgggactacaggcgcctgccaccatgcctggctaattttttgtatttttagtacagacggggtttcacc

SEQ ID NO: 278912 - DNA, 2237 bp, Homo sapiens
ggcggagctcggggccgggactctcagcctatcaagtgtctgtaattaattaaccaactgagatccagttcaggggtgaaagttcttcaggtacgaggagggcattgttgtcagtctggaccgagcccgcagagcccctcctcggcgtcctggtcccggccgtgcccgcggtgtcccgggaggaaggggcgggccgggggtcgggaggagtcacgtgccccctcccgccccaggtcgtcctctcagcatgggggtcccgcggcctcagccctgggcgctggggctcctgctctttctccttcctgggagcctgggcgcagaaagccacctctccctcctgtaccaccttaccgcggtgtcctcgcctgccccggggactcctgccttctgggtgtccggctggctgggcccgcagcagtacctgagctacaatagcctgcggggcgaggcggagccctgtggagcttgggtctgggaaaaccaggtgtcctggtattgggagaaagagaccacagatctgaggatcaaggagaagctctttctggaagctttcaaagctttggggggaaaaggtccctacactctgcagggcctgctgggctgtgaactgggccctgacaacacctcggtgcccaccgccaagttcgccctgaacggcgaggagttcatgaatttcgacctcaagcagggcacctggggtggggactggcccgaggccctggctatcagtcagcggtggcagcagcaggacaaggcggccaacaaggagctcaccttcctgctattctcctgcccgcaccgcctgcgggagcacctggagaggggccgcggaaacctggagtggaaggagcccccctccatgcgcctgaaggcccgacccagcagccctggcttttccgtgcttacctgcagcgccttctccttctaccctccggagctgcaacttcggttcctgcggaatgggctggccgctggcaccggccagggtgacttcggccccaacagtgacggatccttccacgcctcgtcgtcactaacagtcaaaagtggcgatgagcaccactactgctgcattgtgcagcacgcggggctggcgcagcccctcagggtggagctgggtgaggtcccgccaggtggtgatgctcctggtttcccgttgccttgtctcactgctgcgccggtccttcctgagtctgaccttcctccccactgctgccacctccttgaatctgactgccttgaacctcacgcctgtcagtgcccccaaaacctgatggcttgtccttcccaaggccaactgccttccgtctcctgctgcttctggcctcactgagtctgaagagctgttaactaccatggccagtcctccctgagtctgaccatcttccatcctgctgctgctgctgctgctgctgcgggtcttcctggaatctgaccattcgttgtctgctatgcccgtcctcaccaagactgactgcctgctgctttgctactgcccgggcccatgagactgacttcccactgctctgcctgcctctccccactgcactggcacagccccgccttgccgctgctgatccattgccggtgtgaccgcggccgctcgtgctgtagctggttcttacgtccaacctgggggcagtctgcccagatcgcctgcctggcctcgcctctgcccatcagacacttggtgctggaatctccgaggctgggagggactgggagcgccccagttctgtgtcctgactgggtggggtggaggggctgctccacatctcacagcgttctctggctgcagaatctccagccaagtcctccgtgctcgtggtgggaatcgtcatcggtgtcttgctactcacggcagcggctgtaggaggagctctgttgtggagaaggatgaggagtgggctgccagccccttggatctcccttcgtggagacgacaccggggtcctcctgcccaccccaggggaggcccaggatgctgatttgaaggatgtaaatgtgattccagccaccgcctgaccatccgccattccgactgctaaaagcgaatgtagtcaggcccctttcatgctgtgagacctcctggaacactggcatctctgagcctccagaaggggttctgggcctagttgtcctccctctggagccccgtcctgtggtctgcctcagtttcccctcctaatacatatggctgttttccacctcgataatataacacgagtttgggcccg

SEQ ID NO: 278913 - DNA, 1265 bp, Homo sapiens
tcggaagtgaaacgcagctgaagggaacaaagccacctctccctcctgtaccaccttaccgcggtgtcctcgcctgccccggggactcctgccttctgggtgtccggctggctgggcccgcagcagtacctgagctacaatagcctgcggggcgaggcggagccctgtggagcttgggtctgggaaaaccaggtgtcctggtattgggagaaagagaccacagatctgaggatcaaggagaagctctttctggaagctttcaaagctttggggggaaaaggtccctacactctgcagggcctgctgggctgtgaactgggccctgacaacacctcggtgcccaccgccaagttcgccctgaacggcgaggagttcatgaatttcgacctcaagcagggcacctggggtggggactggcccgaggccctggctatcagtcagcggtggcagcagcaggacaaggcggccaacaaggagctcaccttcctgctattctcctgcccgcaccgcctgcgggagcacctggagaggggccgcggaaacctggagtggaaggagcccccctccatgcgcctgaaggcccgacccagcagccctggcttttccgtgcttacctgcagcgccttctccttctaccctccggagctgcaacttcggttcctgcggaatgggctggccgctggcaccggccagggtgacttcggccccaacagtgacggatccttccacgcctcgtcgtcactaacagtcaaaagtggcgatgagcaccactactgctgcattgtgcagcacgcggggctggcgcagcccctcagggtggagctggaatctccagccaagtcctccgtgctcgtggtgggaatcgtcatcggtgtcttgctactcacggcagcggctgtaggaggagctctgttgtggagaaggatgaggagtgggctgccagccccttggatctcccttcgtggagacgacaccggggtcctcctgcccaccccaggggaggcccaggatgctgatttgaaggatgtaaatgtgattccagccaccgcctgaccatccgccattccgactgctaaaagcgaatgtagtcaggcccctttcatgctgtgagacctcctggaacactggcatctctgagcctccagaaggggttctgggcctagttgtcctccctctggagccccgtcctgtggtctgcctcagtttcccctcctaatacatatggctgttttccacctcgataatataacacgagtttgggcccg

SEQ ID NO: 278914 - DNA, 1644 bp, Homo sapiens
tttaacgacgcagtgattctcgagcatgttggcctaccggtatcaagtgtctgtaattaattaaccaactgagatccagttcaggggtgaaagttcttcaggtacgaggagggcattgttgtcagtctggaccgagcccgcagagcccctcctcggcgtcctggtcccggccgtgcccgcggtgtcccgggaggaaggggcgggccgggggtcgggaggagtcacgtgccccctcccgccccaggtcgtcctctcagcatgggggtcccgcggcctcagccctgggcgctggggctcctgctctttctccttcctgggagcctgggcgcagaaagccacctctccctcctgtaccaccttaccgcggtgtcctcgcctgccccggggactcctgccttctgggtgtccggctggctgggcccgcagcagtacctgagctacaatagcctgcggggcgaggcggagccctgtggagcttgggtctgggaaaaccaggtgtcctggtattgggagaaagagaccacagatctgaggatcaaggagaagctctttctggaagctttcaaagctttggggggaaaagtgagattccggtctggaggggcaaggggccgggtccatgctccggggccccgcttacctgtgtttgggcgccccaggtccctacactctgcagggcctgctgggctgtgaactgggccctgacaacacctcggtgcccaccgccaagttcgccctgaacggcgaggagttcatgaatttcgacctcaagcagggcacctggggtggggactggcccgaggccctggctatcagtcagcggtggcagcagcaggacaaggcggccaacaaggagctcaccttcctgctattctcctgcccgcaccgcctgcgggagcacctggagaggggccgcggaaacctggagtggaaggagcccccctccatgcgcctgaaggcccgacccagcagccctggcttttccgtgcttacctgcagcgccttctccttctaccctccggagctgcaacttcggttcctgcggaatgggctggccgctggcaccggccagggtgacttcggccccaacagtgacggatccttccacgcctcgtcgtcactaacagtcaaaagtggcgatgagcaccactactgctgcattgtgcagcacgcggggctggcgcagcccctcagggtggagctggaatctccagccaagtcctccgtgctcgtggtgggaatcgtcatcggtgtcttgctactcacggcagcggctgtaggaggagctctgttgtggagaaggatgaggagtgggctgccagccccttggatctcccttcgtggagacgacaccggggtcctcctgcccaccccaggggaggcccaggatgctgatttgaaggatgtaaatgtgattccagccaccgcctgaccatccgccattccgactgctaaaagcgaatgtagtcaggcccctttcatgctgtgagacctcctggaacactggcatctctgagcctccagaaggggttctgggcctagttgtcctccctctggagccccgtcctgtggtctgcctcagtttcccctcctaatacatatggctgttttccacctcgataatataacacgagtttgggcccg

SEQ ID NO: 278915 - DNA, 1090 bp, Homo sapiens
tcggtaccttttcccccaaagctttgaaagcttccacaaagagcttctcttgatctctagatctgtggtctctttctcccaataccaggacacctggttttcccagtccctacactctgcagggcctgctgggctgtgaactgggccctgacaacacctcggtgcccaccgccaagttcgccctgaacggcgaggagttcatgaatttcgacctcaagcagggcacctggggtggggactggcccgaggccctggctatcagtcagcggtggcagcagcaggacaaggcggccaacaaggagctcaccttcctgctattctcctgcccgcaccgcctgcgggagcacctggagaggggccgcggaaacctggagtggaaggagcccccctccatgcgcctgaaggcccgacccagcagccctggcttttccgtgcttacctgcagcgccttctccttctaccctccggagctgcaacttcggttcctgcggaatgggctggccgctggcaccggccagggtgacttcggccccaacagtgacggatccttccacgcctcgtcgtcactaacagtcaaaagtggcgatgagcaccactactgctgcattgtgcagcacgcggggctggcgcagcccctcagggtggagctggaatctccagccaagtcctccgtgctcgtggtgggaatcgtcatcggtgtcttgctactcacggcagcggctgtaggaggagctctgttgtggagaaggatgaggagtgggctgccagccccttggatctcccttcgtggagacgacaccggggtcctcctgcccaccccaggggaggcccaggatgctgatttgaaggatgtaaatgtgattccagccaccgcctgaccatccgccattccgactgctaaaagcgaatgtagtcaggcccctttcatgctgtgagacctcctggaacactggcatctctgagcctccagaaggggttctgggcctagttgtcctccctctggagccccgtcctgtggtctgcctcagtttcccctcctaatacatatggctgttttccacctcgataatataacacgagtttgggcccg

SEQ ID NO: 278916 - DNA, 1033 bp, Homo sapiens
acagtatcctggctgtaagctttcacatgctcgtgtagagggaataaggtccctacactctgcagggcctgctgggctgtgaactgggccctgacaacacctcggtgcccaccgccaagttcgccctgaacggcgaggagttcatgaatttcgacctcaagcagggcacctggggtggggactggcccgaggccctggctatcagtcagcggtggcagcagcaggacaaggcggccaacaaggagctcaccttcctgctattctcctgcccgcaccgcctgcgggagcacctggagaggggccgcggaaacctggagtggaaggagcccccctccatgcgcctgaaggcccgacccagcagccctggcttttccgtgcttacctgcagcgccttctccttctaccctccggagctgcaacttcggttcctgcggaatgggctggccgctggcaccggccagggtgacttcggccccaacagtgacggatccttccacgcctcgtcgtcactaacagtcaaaagtggcgatgagcaccactactgctgcattgtgcagcacgcggggctggcgcagcccctcagggtggagctggaatctccagccaagtcctccgtgctcgtggtgggaatcgtcatcggtgtcttgctactcacggcagcggctgtaggaggagctctgttgtggagaaggatgaggagtgggctgccagccccttggatctcccttcgtggagacgacaccggggtcctcctgcccaccccaggggaggcccaggatgctgatttgaaggatgtaaatgtgattccagccaccgcctgaccatccgccattccgactgctaaaagcgaatgtagtcaggcccctttcatgctgtgagacctcctggaacactggcatctctgagcctccagaaggggttctgggcctagttgtcctccctctggagccccgtcctgtggtctgcctcagtttcccctcctaatacatatggctgttttccacctcgataatataacacgagtttgggcccg

SEQ ID NO: 278917 - DNA, 2689 bp, Homo sapiens
gaaggatattaaagagcacctgcaggaattttttaaggggatgccgggggaagggcttgaaggaggaactaaggaggcttccagaagattttgattaacagcgagcgctagggaaggccacggggatacagaggggtaggaggaggatccagagacctccaagttgtggactccggaggcatcgagttcctttcccagttttgtcaagaattccctgagcggcagacaccctcaaagtaaaaaacgggaaccacagagaaggaaaaagaagaaccacaagcgttttgagaaacaaacaggctgggcctagggcctggggtgtgccctgcaactggggggtggggctggatgttcttggagtcagggagcagcagcctcccacaggatgtgagagaggaactggggtctccagtcacgggagccaggagccggccagggccgcaggcaggaagggagcgaggctgaagggaacgtcgtcctctcagcatgggggtcccgcggcctcagccctgggcgctggggctcctgctctttctccttcctgggagcctgggcgcagaaagccacctctccctcctgtaccaccttaccgcggtgtcctcgcctgccccggggactcctgccttctgggtgtccggctggctgggcccgcagcagtacctgagctacaatagcctgcggggcgaggcggagccctgtggagcttgggtctgggaaaaccaggtgtcctggtattgggagaaagagaccacagatctgaggatcaaggagaagctctttctggaagctttcaaagctttggggggaaaaggtccctacactctgcagggcctgctgggctgtgaactgggccctgacaacacctcggtgcccaccgccaagttcgccctgaacggcgaggagttcatgaatttcgacctcaagcagggcacctggggtggggactggcccgaggccctggctatcagtcagcggtggcagcagcaggacaaggcggccaacaaggagctcaccttcctgctattctcctgcccgcaccgcctgcgggagcacctggagaggggccgcggaaacctggagtggaaggacacggtgtctcactatgttgcccaggctggtcttgaactcctaggctccagcgattctcctgctttggtctcctgagtagctgagattacaggcacttgcactgttgcctagactggagtgcagtagcgggattagagttcactgcagcctcaacctcccaagctcaagcgatcctcccaccttacccttcctgaatggatggggccacaggagcccccctccatgcgcctgaaggcccgacccagcagccctggcttttccgtgcttacctgcagcgccttctccttctaccctccggagctgcaacttcggttcctgcggaatgggctggccgctggcaccggccagggtgacttcggccccaacagtgacggatccttccacgcctcgtcgtcactaacagtcaaaagtggcgatgagcaccactactgctgcattgtgcagcacgcggggctggcgcagcccctcagggtggagctgggtgaggtcccgccaggtggtgatgctcctggtttcccgttgccttgtctcactgctgcgccggtccttcctgagtctgaccttcctccccactgctgccacctccttgaatctgactgccttgaacctcacgcctgtcagtgcccccaaaacctgatggcttgtccttcccaaggccaactgccttccgtctcctgctgcttctggcctcactgagtctgaagagctgttaactaccatggccagtcctccctgagtctgaccatcttccatcctgctgctgctgctgctgctgctgcgggtcttcctggaatctgaccattcgttgtctgctatgcccgtcctcaccaagactgactgcctgctgctttgctactgcccgggcccatgagactgacttcccactgctctgcctgcctctccccactgcactggcacagccccgccttgccgctgctgatccattgccggtgtgaccgcggccgctcgtgctgtagctggttcttacgtccaacctgggggcagtctgcccagatcgcctgcctggcctcgcctctgcccatcagacacttggtgctggaatctccgaggctgggagggactgggagcgccccagttctgtgtcctgactgggtggggtggaggggctgctccacatctcacagcgttctctggctgcagaatctccagccaagtcctccgtgctcgtggtgggaatcgtcatcggtgtcttgctactcacggcagcggctgtaggaggagctctgttgtggagaaggatgaggagtgggctgccagccccttggatctcccttcgtggagacgacaccggggtcctcctgcccaccccaggggaggcccaggatgctgatttgaaggatgtaaatgtgattccagccaccgcctgaccatccgccattccgactgctaaaagcgaatgtagtcaggcccctttcatgctgtgagacctcctggaacactggcatctctgagcctccagaaggggttctgggcctagttgtcctccctctggagccccgtcctgtggtctgcctcagtttcccctcctaatacatatggctgttttccacctcgataatataacacgagtttgggcccg

SEQ ID NO: 278918 - DNA, 1517 bp, Homo sapiens
tttaacgacgcagtgattctcgagcatgttggcctaccggtatcaagtgtctgtaattaattaaccaactgagatccagttcaggggtgaaagttcttcaggtacgaggagggcattgttgtcagtctggaccgagcccgcagagcccctcctcggcgtcctggtcccggccgtgcccgcggtgtcccgggaggaaggggcgggccgggggtcgggaggagtcacgtgccccctcccgccccaggtcgtcctctcagcatgggggtcccgcggcctcagccctgggcgctggggctcctgctctttctccttcctgggagcctgggcgcagaaagccacctctccctcctgtaccaccttaccgcggtgtcctcgcctgccccggggactcctgccttctgggtgtccggctggctgggcccgcagcagtacctgagctacaatagcctgcggggcgaggcggagccctgtggagcttgggtctgggaaaaccaggtgtcctggtattgggagaaagagaccacagatctgaggatcaaggagaagctctttctggaagctttcaaagctttggggggaaaagcctcggtgcccaccgccaagttcgccctgaacggcgaggagttcatgaatttcgacctcaagcagggcacctggggtggggactggcccgaggccctggctatcagtcagcggtggcagcagcaggacaaggcggccaacaaggagctcaccttcctgctattctcctgcccgcaccgcctgcgggagcacctggagaggggccgcggaaacctggagtggaaggagcccccctccatgcgcctgaaggcccgacccagcagccctggcttttccgtgcttacctgcagcgccttctccttctaccctccggagctgcaacttcggttcctgcggaatgggctggccgctggcaccggccagggtgacttcggccccaacagtgacggatccttccacgcctcgtcgtcactaacagtcaaaagtggcgatgagcaccactactgctgcattgtgcagcacgcggggctggcgcagcccctcagggtggagctggaatctccagccaagtcctccgtgctcgtggtgggaatcgtcatcggtgtcttgctactcacggcagcggctgtaggaggagctctgttgtggagaaggatgaggagtgggctgccagccccttggatctcccttcgtggagacgacaccggggtcctcctgcccaccccaggggaggcccaggatgctgatttgaaggatgtaaatgtgattccagccaccgcctgaccatccgccattccgactgctaaaagcgaatgtagtcaggcccctttcatgctgtgagacctcctggaacactggcatctctgagcctccagaaggggttctgggcctagttgtcctccctctggagccccgtcctgtggtctgcctcagtttcccctcctaatacatatggctgttttccacctcgataatataacacgagtttgggcccg

SEQ ID NO: 278919 - DNA, 1341 bp, Homo sapiens
tttaacgacgcagtgattctcgagcatgttggcctaccggtatcaagtgtctgtaattaattaaccaactgagatccagttcaggggtgaaagttcttcaggtacgaggagggcattgttgtcagtctggaccgagcccgcagagcccctcctcggcgtcctggtcccggccgtgcccgcggtgtcccgggaggaaggggcgggccgggggtcgggaggagtcacgtgccccctcccgccccaggtcgtcctctcagcatgggggtcccgcggcctcagccctgggcgctggggctcctgctctttctccttcctgggagcctgggcgcagaaagccacctctccctcctgtaccaccttaccgcggtgtcctcgcctgccccggggactcctgccttctgggtgtccggctggctgggcccgcagcagtacctgagctacaatagcctgcggggcgaggcggagccctgtggagcttgggtctgggaaaaccaggtgtcctggtattgggagaaagagaccacagatctgaggatcaaggagaagctctttctggaagctttcaaagctttggggggaaaagcgcctgcgggagcacctggagaggggccgcggaaacctggagtggaaggagcccccctccatgcgcctgaaggcccgacccagcagccctggcttttccgtgcttacctgcagcgccttctccttctaccctccggagctgcaacttcggttcctgcggaatgggctggccgctggcaccggccagggtgacttcggccccaacagtgacggatccttccacgcctcgtcgtcactaacagtcaaaagtggcgatgagcaccactactgctgcattgtgcagcacgcggggctggcgcagcccctcagggtggagctggaatctccagccaagtcctccgtgctcgtggtgggaatcgtcatcggtgtcttgctactcacggcagcggctgtaggaggagctctgttgtggagaaggatgaggagtgggctgccagccccttggatctcccttcgtggagacgacaccggggtcctcctgcccaccccaggggaggcccaggatgctgatttgaaggatgtaaatgtgattccagccaccgcctgaccatccgccattccgactgctaaaagcgaatgtagtcaggcccctttcatgctgtgagacctcctggaacactggcatctctgagcctccagaaggggttctgggcctagttgtcctccctctggagccccgtcctgtggtctgcctcagtttcccctcctaatacatatggctgttttccacctcgataatataacacgagtttgggcccg

SEQ ID NO: 278920 - DNA, 1597 bp, Homo sapiens
ggcggagctcggggccgggactctcagcctatcaagtgtctgtaattaattaaccaactgagatccagttcaggggtgaaagttcttcaggtacgaggagggcattgttgtcagtctggaccgagcccgcagagcccctcctcggcgtcctggtcccggccgtgcccgcggtgtcccgggaggaaggggcgggccgggggtcgggaggagtcacgtgccccctcccgccccaggtcgtcctctcagcatgggggtcccgcggcctcagccctgggcgctggggctcctgctctttctccttcctgggagcctgggcgcagaaagccacctctccctcctgtaccaccttaccgcggtgtcctcgcctgccccggggactcctgccttctgggtgtccggctggctgggcccgcagcagtacctgagctacaatagcctgcggggcgaggcggagccctgtggagcttgggtctgggaaaaccaggtgtcctggtattgggagaaagagaccacagatctgaggatcaaggagaagctctttctggaagctttcaaagctttggggggaaaaggtccctacactctgcagggcctgctgggctgtgaactgggccctgacaacacctcggtgcccaccgccaagttcgccctgaacggcgaggagttcatgaatttcgacctcaagcagggcacctggggtggggactggcccgaggccctggctatcagtcagcggtggcagcagcaggacaaggcggccaacaaggagctcaccttcctgctattctcctgcccgcaccgcctgcgggagcacctggagaggggccgcggaaacctggagtggaaggagcccccctccatgcgcctgaaggcccgacccagcagccctggcttttccgtgcttacctgcagcgccttctccttctaccctccggagctgcaacttcggttcctgcggaatgggctggccgctggcaccggccagggtgacttcggccccaacagtgacggatccttccacgcctcgtcgtcactaacagtcaaaagtggcgatgagcaccactactgctgcattgtgcagcacgcggggctggcgcagcccctcagggtggagctggaatctccagccaagtcctccgtgctcgtggtgggaatcgtcatcggtgtcttgctactcacggcagcggctgtaggaggagctctgttgtggagaaggatgaggagtgggctgccagccccttggatctcccttcgtggagacgacaccggggtcctcctgcccaccccaggggaggcccaggatgctgatttgaaggatgtaaatgtgattccagccaccgcctgaccatccgccattccgactgctaaaagcgaatgtagtcaggcccctttcatgctgtgagacctcctggaacactggcatctctgagcctccagaaggggttctgggcctagttgtcctccctctggagccccgtcctgtggtctgcctcagtttcccctcctaatacatatggctgttttccacctcgataatataacacgagtttgggcccgaaaaaaaaagtgtcgtctaaaaaaaaagtcgtatcgatgt

SEQ ID NO: 278921 - DNA, 1533 bp, Homo sapiens
ggcggagctcggggccgggactctcagcctatcaagtgtctgtaattaattaaccaactgagatccagttcaggggtgaaagttcttcaggtacgaggagggcattgttgtcagtctggaccgagcccgcagagcccctcctcggcgtcctggtcccggccgtgcccgcggtgtcccgggaggaaggggcgggccgggggtcgggaggagtcacgtgccccctcccgccccaggtcgtcctctcagcatgggggtcccgcggcctcagccctgggcgctggggctcctgctctttctccttcctgggagcctgggcgcagaaagccacctctccctcctgtaccaccttaccgcggtgtcctcgcctgccccggggactcctgccttctgggtgtccggctggctgggcccgcagcagtacctgagctacaatagcctgcggggcgaggcggagccctgtggagcttgggtctgggaaaaccaggtgtcctggtattgggagaaagagaccacagatctgaggatcaaggagaagctctttctggaagctttcaaagctttggggggaaaaggtccctacactctgcagggcctgctgggctgtgaactgggccctgacaacacctcggtgcccaccgccaagttcgccctgaacggcgaggagttcatgaatttcgacctcaagcagggcacctggggtggggactggcccgaggccctggctatcagtcagcggtggcagcagcaggacaaggcggccaacaaggagctcaccttcctgctattctcctgcccgcaccgcctgcgggagcacctggagaggggccgcggaaacctggagtggaaggagcccccctccatgcgcctgaaggcccgacccagcagccctggcttttccgtgcttacctgcagcgccttctccttctaccctccggagctgcaacttcggttcctgcggaatgggctggccgctggcaccggccagggtgacttcggccccaacagtgacggatccttccacgcctcgtcgtcactaacagtcaaaagtggcgatgagcaccactactgctgcattgtgcagcacgcggggctggcgcagcccctcagggtggagctggaatctccagccaagtcctccgtgctcgtggtgggaatcgtcatcggtgtcttgctactcacggcagcggctgtaggaggagctctgttgtggagaaggatgaggagtgggctgccagccccttggatctcccttcgtggagacgacaccggggtcctcctgcccaccccaggggaggcccaggatgctgatttgaaggatgtaaatgtgattccagccaccgcctgaccatccgccattccgactgctaaaagcgaatgtagtcaggcccctttcatgctgtgagacctcctggaacactggcatctctgagcctccagaaggggttctgggcctagttgtcctccctctggagccccgtcctgtggtctgcctcagtttcccctcgaccgtgctgtgccacatcctctgatgtt

SEQ ID NO: 278922 - DNA, 1806 bp, Homo sapiens
ggcggagctcggggccgggactctcagcctatcaagtgtctgtaattaattaaccaactgagatccagttcaggggtgaaagttcttcaggtacgaggagggcattgttgtcagtctggaccgagcccgcagagcccctcctcggcgtcctggtcccggccgtgcccgcggtgtcccgggaggaaggggcgggccgggggtcgggaggagtcacgtgccccctcccgccccaggtcgtcctctcagcatgggggtcccgcggcctcagccctgggcgctggggctcctgctctttctccttcctgggagcctgggcgcagaaagccacctctccctcctgtaccaccttaccgcggtgtcctcgcctgccccggggactcctgccttctgggtgtccggctggctgggcccgcagcagtacctgagctacaatagcctgcggggcgaggcggagccctgtggagcttgggtctgggaaaaccaggtgtcctggtattgggagaaagagaccacagatctgaggatcaaggagaagctctttctggaagctttcaaagctttggggggaaaaggtccctacactctgcagggcctgctgggctgtgaactgggccctgacaacacctcggtgcccaccgccaagttcgccctgaacggcgaggagttcatgaatttcgacctcaagcagggcacctggggtggggactggcccgaggccctggctatcagtcagcggtggcagcagcaggacaaggcggccaacaaggagctcaccttcctgctattctcctgcccgcaccgcctgcgggagcacctggagaggggccgcggaaacctggagtggaaggacacggtgtctcactatgttgcccaggctggtcttgaactcctaggctccagcgattctcctgctttggtctcctgagtagctgagattacaggcacttgcactgttgcctagactggagtgcagtagcgggattagagttcactgcagcctcaacctcccaagctcaagcgatcctcccaccttacccttcctgaatggatggggccacaggagcccccctccatgcgcctgaaggcccgacccagcagccctggcttttccgtgcttacctgcagcgccttctccttctaccctccggagctgcaacttcggttcctgcggaatgggctggccgctggcaccggccagggtgacttcggccccaacagtgacggatccttccacgcctcgtcgtcactaacagtcaaaagtggcgatgagcaccactactgctgcattgtgcagcacgcggggctggcgcagcccctcagggtggagctggaatctccagccaagtcctccgtgctcgtggtgggaatcgtcatcggtgtcttgctactcacggcagcggctgtaggaggagctctgttgtggagaaggatgaggagtgggctgccagctctgttgtggagaaggatgaggagtgggctgccagccccttggatctcccttcgtggagacgacaccggggtcctcctgcccaccccaggggaggcccaggatgctgatttgaaggatgtaaatgtgattccagccaccgcctgaccatccgccattccgactgctaaaagcgaatgtagtcaggcccctttcatgctgtgagacctcctggaacactggcatctctgagcctccagaaggggttctgggcctagttgtcctccctctggagccccgtcctgtggtctgcctcagtttcccctcctaatacatatggctgttttccacctcgataatataacacgagtttgggcccg

SEQ ID NO: 278923 - DNA, 770 bp, Homo sapiens
tttaacgacgcagtgattctcgagcatgttggcctaccggtatcaagtgtctgtaattaattaaccaactgagatccagttcaggggtgaaagttcttcaggtacgaggagggcattgttgtcagtctggaccgagcccgcagagcccctcctcggcgtcctggtcccggccgtgcccgcggtgtcccgggaggaaggggcgggccgggggtcgggaggagtcacgtgccccctcccgccccaggtcgtcctctcagcatgggggtcccgcggcctcagccctgggcgctggggctcctgctctttctccttcctgggagcctgggcgcagaatctccagccaagtcctccgtgctcgtggtgggaatcgtcatcggtgtcttgctactcacggcagcggctgtaggaggagctctgttgtggagaaggatgaggagtgggctgccagccccttggatctcccttcgtggagacgacaccggggtcctcctgcccaccccaggggaggcccaggatgctgatttgaaggatgtaaatgtgattccagccaccgcctgaccatccgccattccgactgctaaaagcgaatgtagtcaggcccctttcatgctgtgagacctcctggaacactggcatctctgagcctccagaaggggttctgggcctagttgtcctccctctggagccccgtcctgtggtctgcctcagtttcccctcctaatacatatggctgttttccacctcgataatataacacgagtttgggcccg

SEQ ID NO: 278924 - DNA, 653 bp, Homo sapiens
tttaacgacgcagtgattctcgagcatgttggcctaccggtatcaagtgtctgtaattaattaaccaactgagatccagttcaggggtgaaagttcttcaggtacgaggagggcattgttgtcagtctggaccgagcccgcagagcccctcctcggcgtcctggtcccggccgtgcccgcggtgtcccgggaggaaggggcgggccgggggtcgggaggagtcacgtgccccctcccgccccaggtcgtcctctcagcatgggggtcccgcggcctcagccctgggcgctggggctcctgctctttctccttcctgggagcctgggcgcagccccttggatctcccttcgtggagacgacaccggggtcctcctgcccaccccaggggaggcccaggatgctgatttgaaggatgtaaatgtgattccagccaccgcctgaccatccgccattccgactgctaaaagcgaatgtagtcaggcccctttcatgctgtgagacctcctggaacactggcatctctgagcctccagaaggggttctgggcctagttgtcctccctctggagccccgtcctgtggtctgcctcagtttcccctcctaatacatatggctgttttccacctcgataatataacacgagtttgggcccg

SEQ ID NO: 278925 - DNA, 314 bp, Homo sapiens
ctactactactactactactactaaattcgcggccgcgtcgcccaggggaggcccaggatgctgatttgaaggatgtaaatgtgattccagccaccgcctgaccatccgccattccgactgctaaaagcgaatgtagtcaggcccctttcatgctgtgagacctcctggaacactggcatctctgagcctccagaaggggttctgggcctagttgtcctccctctggagccccgtcctgtggtctgcctcagtttcccctcctaatacatatggctgttttccacctcgataatataacacgagtttgggcccg

SEQ ID NO: 278926 - DNA, 1341 bp, Homo sapiens
  misc_feature (1236)..(1236): n is a, c, g, or t
  misc_feature (1241)..(1241): n is a, c, g, or t
  misc_feature (1251)..(1251): n is a, c, g, or t
  misc_feature (1257)..(1257): n is a, c, g, or t
  misc_feature (1259)..(1259): n is a, c, g, or t
  misc_feature (1262)..(1263): n is a, c, g, or t
  misc_feature (1279)..(1279): n is a, c, g, or t
  misc_feature (1305)..(1305): n is a, c, g, or t
ggcggagctcggggccgggactctcagcctatcaagtgtctgtaattaattaaccaactgagatccagttcaggggtgaaagttcttcaggtacgaggagggcattgttgtcagtctggaccgagcccgcagagcccctcctcggcgtcctggtcccggccgtgcccgcggtgtcccgggaggaaggggcgggccgggggtcgggaggagtcacgtgccccctcccgccccaggtcgtcctctcagcatgggggtcccgcggcctcagccctgggcgctggggctcctgctctttctccttcctgggagcctgggcgcagaaagccacctctccctcctgtaccaccttaccgcggtgtcctcgcctgccccggggactcctgccttctgggtgtccggctggctgggcccgcagcagtacctgagctacaatagcctgcggggcgaggcggagccctgtggagcttgggtctgggaaaaccaggtgtcctggtattgggagaaagagaccacagatctgaggatcaaggagaagctctttctggaagctttcaaagctttggggggaaaaggtccctacactctgcagggcctgctgggctgtgaactgggccctgacaacacctcggtgcccaccgccaagttcgccctgaacggcgaggagttcatgaatttcgacctcaagcagggcacctggggtggggactggcccgaggccctggctatcagtcagcggtggcagcagcaggacaaggcggccaacaaggagctcaccttcctgctattctcctgcccgcaccgcctgcgggagcacctggagaggggccgcggaaacctggagtggaaggagcccccctccatgcgcctgaaggcccgacccagcagccctggcttttccgtgcttacctgcagcgccttctccttctaccctccggagctgcaacttcggttcctgcggaatgggctggccgctggcaccggccagggtgacttcggccccaacagtgacggatccttccacgcctcgtcgtcactaacagtcaaaagtggcgatgagcaccactactgctgcattgtgcagcacgcggggctggcgcagcccctcagggtggagctggaatctccagccaagtcctccgtgctcgtggtgggaatcgtcatcggtgtcttgctactcacggcagcggctgtaggaggagctctgttgtggagaaggatgaggagtgggctgccagntgcancccttggatntccttntnganngaaacggggtctctgnccacccagggaggccagatgtgattnaagatgtaattgatcaccacgctgacatcgcattcg

SEQ ID NO: 278927 - DNA, 1420 bp, Homo sapiens
ggcggagctcggggccgggactctcagcctatcaagtgtctgtaattaattaaccaactgagatccagttcaggggtgaaagttcttcaggtacgaggagggcattgttgtcagtctggaccgagcccgcagagcccctcctcggcgtcctggtcccggccgtgcccgcggtgtcccgggaggaaggggcgggccgggggtcgggaggagtcacgtgccccctcccgccccaggtcgtcctctcagcatgggggtcccgcggcctcagccctgggcgctggggctcctgctctttctccttcctgggagcctgggcgcagaaagccacctctccctcctgtaccaccttaccgcggtgtcctcgcctgccccggggactcctgccttctgggtgtccggctggctgggcccgcagcagtacctgagctacaatagcctgcggggcgaggcggagccctgtggagcttgggtctgggaaaaccaggtgtcctggtattgggagaaagagaccacagatctgaggatcaaggagaagctctttctggaagctttcaaagctttggggggaaaaggtccctacactctgcagggcctgctgggctgtgaactgggccctgacaacacctcggtgcccaccgccaagttcgccctgaacggcgaggagttcatgaatttcgacctcaagcagggcacctggggtggggactggcccgaggccctggctatcagtcagcggtggcagcagcaggacaaggcggccaacaaggagctcaccttcctgctattctcctgcccgcaccgcctgcgggagcacctggagaggggccgcggaaacctggagtggaaggagcccccctccatgcgcctgaaggcccgacccagcagccctggcttttccgtgcttacctgcagcgccttctccttctaccctccggagctgcaacttcggttcctgcggaatgggctggccgctggcaccggccagggtgacttcggccccaacagtgacggatccttccacgcctcgtcgtcactaacagtcaaaagtggcgatgagcaccactactgctgcattgtgcagcacgcggggctggcgcagcccctcagggtggagctgggtgaggtcccgccaggtggtgatgctcctggtttcccgttgccttgtctcactgctgcgccggtccttcctgagtctgaccttcctccccactgctgccacctccttgaatctgactgccttgaacctcacgcctgtcagtgcccccaaaacctgatggcttgtccttcccaaggccaactgccttccgtctcctgctgcttctggcctcactgagtctgaagagctgttaactaccatggccagtcctccctgagtctgaccatctccaatcaactactgccaaaacgccgtcccaaagca

SEQ ID NO: 278928 - DNA, 678 bp, Homo sapiens
tttaacgacgcagtgattctcgagcatgttggcctaccggtatcaagtgtctgtaattaattaaccaactgagatccagttcaggggtgaaagttcttcaggtacgaggagggcattgttgtcagtctggaccgagcccgcagagcccctcctcggcgtcctggtcccggccgtgcccgcggtgtcccgggaggaaggggcgggccgggggtcgggaggagtcacgtgccccctcccgccccaggtcgtcctctcagcatgggggtcccgcggcctcagccctgggcgctggggctcctgctctttctccttcctgggagcctgggcgcaggtgagggccgctccgggtcagggccctgctgcaggcgggcggcgggaggcggccccaggcaggcaggggcgaagccagcgggacccgagttccccgcgagcccctggcgctgccttctccgctcaattaactttctcaacgtctcctgctgggcctgaggctgggaaccacctgtcgcctcttgtgtctgtttccctctctctctctgggtctctgtccccctctctttctgggtctcttgtctctctctctctctctctctctgggtctctgtccccacaagtgcaaaggttgagccgcccaaggaaaaattcaaacagccacaagtagaacattgtgacccacgc

SEQ ID NO: 278929 - DNA, 452 bp, Homo sapiens
  misc_feature (262)..(262): n is a, c, g, or t
  misc_feature (274)..(274): n is a, c, g, or t
ctactactactactactactactaaattcgcggccgcgtcgacgctgcgagaagacgacagaaggggttctgggcctagttgtcctccctctggagccccgtcctgtggtctgcctcagtttcccctcctaatacatatggctgttttccacctcgataatataacacgagtttgggcccgaaaaaaaaagaagaaaaaaaaaaaaagtcgtatcggatgtcagccgacatgatgatggaatgtcgcccggggaattcgganccggtcctggangggcgaccagcttcctttgggaggagtcgattaaacgctggggcgaacaatgggcaaaactgtttcctcgtggggaaaaaatttggtattcgctcaccaatccacaccacataccaccccggaattaaaagggggaaacccgggggggctaaagggggggagctactcaccttttttg

SEQ ID NO: 278930 - DNA, 422 bp, Homo sapiens
ctactactactactactactactaaattcgcggccgcgtcgacgctgcgagaagacgacaggcagcccctcagggtggagctggaatctccagccaagtcctccgtgctcgtggtgggaatcgtcatcggtgtcttgctactcacggcagcggctgtaggaggagctctgttgtggagaaggatgaggagtgggctgccagccccttggatctcccttcgtggagacgacaccggggtcctcctgcccaccccaggggaggcccaggatgctgatttgaaggatgtaaatgtgattccagccaccgcctgaccatccgccattccgactgctaaaagcgaatgtagtcaggcccctttcatgctgtgagacctcctggaggctcagagatgccagtgttccagggtcgacgcggccgcgaat

SEQ ID NO: 278931 - DNA, 1568 bp, Homo sapiens
tttaacgacgcagtgattctcgagcatgttggcctaccggtatcaagtgtctgtaattaattaaccaactgagatccagttcaggggtgaaagttcttcaggtacgaggagggcattgttgtcagtctggaccgagcccgcagagcccctcctcggcgtcctggtcccggccgtgcccgcggtgtcccgggaggaaggggcgggccgggggtcgggaggagtcacgtgccccctcccgccccaggtcgtcctctcagcatgggggtcccgcggcctcagccctgggcgctggggctcctgctctttctccttcctgggagcctgggcgcagaaagccacctctccctcctgtaccaccttaccgcggtgtcctcgcctgccccggggactcctgccttctgggtgtccggctggctgggcccgcagcagtacctgagctacaatagcctgcggggcgaggcggagccctgtggagcttgggtctgggaaaaccaggtgtcctggtattgggagaaagagaccacagatctgaggatcaaggagaagctctttctggaagctttcaaagctttggggggaaaaggtccctacactctgcagggcctgctgggctgtgaactgggccctgacaacacctcggtgcccaccgccaagttcgccctgaacggcgaggagttcatgaatttcgacctcaagcagggcacctggggtggggactggcccgaggccctggctatcagtcagcggtggcagcagcaggacaaggcggccaacaaggagctcaccttcctgctattctcctgcccgcaccgcctgcgggagcacctggagaggggccgcggaaacctggagtggaaggagcccccctccatgcgcctgaaggcccgacccagcagccctggcttttccgtgcttacctgcagcgccttctccttctaccctccggagctgcaacttcggttcctgcggaatgggctggccgctggcaccggccagggtgacttcggccccaacagtgacggatccttccacgcctcgtcgtcactaacagtcaaaagtggcgatgagcaccactactgctgcattgtgcagcacgcggggctggcgcagcccctcagggtggagctggaatctccagccaagtcctccgtgctcgtggtgggaatcgtcatcggtgtcttgctactcacggcagcggctgtaggaggagctctgttgtggagaaggatgaggagtgggctgccagccccttggatctcccttcgtggagacgacaccggggtcctcctgcccaccccaggggaggcccaggatgctgatttgaaggatgtaaatgtgattccagccaccgcctgaccatccgccattccgactgctaaaagcgaatgtagtcaggcccctttcatgctgtgagacctcctggaacactggcatctctgagcctccagaaggggttctgggcctagttgtcctccctctggagccccgtcctgtggtctgcctcagtttcccctcctaatacatatggctgttttccacctcgataatataacacgagtttgggcccg

SEQ ID NO: 278932 - DNA, 1796 bp, Homo sapiens
gaaggatattaaagagcacctgcaggaattttttaaggggatgccgggggaagggcttgaaggaggaactaaggaggcttccagaagattttgattaacagcgagcgctagggaaggccacggggatacagaggggtaggaggaggatccagagacctccaagttgtggactccggaggcatcgagttcctttcccagttttgtcaagaattccctgagcggcagacaccctcaaagtaaaaaacgggaaccacagagaaggaaaaagaagaaccacaagcgttttgagaaacaaacaggctgggcctagggcctggggtgtgccctgcaactggggggtggggctggatgttcttggagtcagggagcagcagcctcccacaggatgtgagagaggaactggggtctccagtcacgggagccaggagccggccagggccgcaggcaggaagggagcgaggctgaagggaacgtcgtcctctcagcatgggggtcccgcggcctcagccctgggcgctggggctcctgctctttctccttcctgggagcctgggcgcagaaagccacctctccctcctgtaccaccttaccgcggtgtcctcgcctgccccggggactcctgccttctgggtgtccggctggctgggcccgcagcagtacctgagctacaatagcctgcggggcgaggcggagccctgtggagcttgggtctgggaaaaccaggtgtcctggtattgggagaaagagaccacagatctgaggatcaaggagaagctctttctggaagctttcaaagctttggggggaaaaggtccctacactctgcagggcctgctgggctgtgaactgggccctgacaacacctcggtgcccaccgccaagttcgccctgaacggcgaggagttcatgaatttcgacctcaagcagggcacctggggtggggactggcccgaggccctggctatcagtcagcggtggcagcagcaggacaaggcggccaacaaggagctcaccttcctgctattctcctgcccgcaccgcctgcgggagcacctggagaggggccgcggaaacctggagtggaaggagcccccctccatgcgcctgaaggcccgacccagcagccctggcttttccgtgcttacctgcagcgccttctccttctaccctccggagctgcaacttcggttcctgcggaatgggctggccgctggcaccggccagggtgacttcggccccaacagtgacggatccttccacgcctcgtcgtcactaacagtcaaaagtggcgatgagcaccactactgctgcattgtgcagcacgcggggctggcgcagcccctcagggtggagctggaatctccagccaagtcctccgtgctcgtggtgggaatcgtcatcggtgtcttgctactcacggcagcggctgtaggaggagctctgttgtggagaaggatgaggagtgggctgccagccccttggatctcccttcgtggagacgacaccggggtcctcctgcccaccccaggggaggcccaggatgctgatttgaaggatgtaaatgtgattccagccaccgcctgaccatccgccattccgactgctaaaagcgaatgtagtcaggcccctttcatgctgtgagacctcctggaacactggcatctctgagcctccagaaggggttctgggcctagttgtcctccctctggagccccgtcctgtggtctgcctcagtttcccctcctaatacatatggctgttttccacctcgataatataacacgagtttgggcccg

SEQ ID NO: 278933 - DNA, 1709 bp, Homo sapiens
gaaggatattaaagagcacctgcaggaattttttaaggggatgccgggggaagggcttgaaggaggaactaaggaggcttccagaagattttgattaacagcgagcgctagggaaggccacggggatacagaggggtaggaggaggatccagagacctccaagttgtggactccggaggcatcgagttcctttcccagttttgtcaagaattccctgagcggcagacaccctcaaagtaaaaaacgggaaccacagagaaggaaaaagaagaaccacaagcgttttgagaaacaaacaggctgggcctagggcctggggtgtgccctgcaactggggggtggggctggatgttcttggagtcagggagcagcagcctcccacaggatgtgagagaggaactggggtctccagtcacgggagccaggagccggccagggccgcaggcaggaagggagcgaggctgaagggaacaaagccacctctccctcctgtaccaccttaccgcggtgtcctcgcctgccccggggactcctgccttctgggtgtccggctggctgggcccgcagcagtacctgagctacaatagcctgcggggcgaggcggagccctgtggagcttgggtctgggaaaaccaggtgtcctggtattgggagaaagagaccacagatctgaggatcaaggagaagctctttctggaagctttcaaagctttggggggaaaaggtccctacactctgcagggcctgctgggctgtgaactgggccctgacaacacctcggtgcccaccgccaagttcgccctgaacggcgaggagttcatgaatttcgacctcaagcagggcacctggggtggggactggcccgaggccctggctatcagtcagcggtggcagcagcaggacaaggcggccaacaaggagctcaccttcctgctattctcctgcccgcaccgcctgcgggagcacctggagaggggccgcggaaacctggagtggaaggagcccccctccatgcgcctgaaggcccgacccagcagccctggcttttccgtgcttacctgcagcgccttctccttctaccctccggagctgcaacttcggttcctgcggaatgggctggccgctggcaccggccagggtgacttcggccccaacagtgacggatccttccacgcctcgtcgtcactaacagtcaaaagtggcgatgagcaccactactgctgcattgtgcagcacgcggggctggcgcagcccctcagggtggagctggaatctccagccaagtcctccgtgctcgtggtgggaatcgtcatcggtgtcttgctactcacggcagcggctgtaggaggagctctgttgtggagaaggatgaggagtgggctgccagccccttggatctcccttcgtggagacgacaccggggtcctcctgcccaccccaggggaggcccaggatgctgatttgaaggatgtaaatgtgattccagccaccgcctgaccatccgccattccgactgctaaaagcgaatgtagtcaggcccctttcatgctgtgagacctcctggaacactggcatctctgagcctccagaaggggttctgggcctagttgtcctccctctggagccccgtcctgtggtctgcctcagtttcccctcctaatacatatggctgttttccacctcgataatataacacgagtttgggcccg

SEQ ID NO: 278934 - DNA, 1369 bp, Homo sapiens
ctgccctggctgatctagaggaccccgcccaatggcaagcctgaaaagattcttctccctccctgggtatctgtcccactgcagtctagttccccgcccgtgtgctcccttcagctctgtttctgtctgcagaaagccacctctccctcctgtaccaccttaccgcggtgtcctcgcctgccccggggactcctgccttctgggtgtccggctggctgggcccgcagcagtacctgagctacaatagcctgcggggcgaggcggagccctgtggagcttgggtctgggaaaaccaggtgtcctggtattgggagaaagagaccacagatctgaggatcaaggagaagctctttctggaagctttcaaagctttggggggaaaaggtccctacactctgcagggcctgctgggctgtgaactgggccctgacaacacctcggtgcccaccgccaagttcgccctgaacggcgaggagttcatgaatttcgacctcaagcagggcacctggggtggggactggcccgaggccctggctatcagtcagcggtggcagcagcaggacaaggcggccaacaaggagctcaccttcctgctattctcctgcccgcaccgcctgcgggagcacctggagaggggccgcggaaacctggagtggaaggagcccccctccatgcgcctgaaggcccgacccagcagccctggcttttccgtgcttacctgcagcgccttctccttctaccctccggagctgcaacttcggttcctgcggaatgggctggccgctggcaccggccagggtgacttcggccccaacagtgacggatccttccacgcctcgtcgtcactaacagtcaaaagtggcgatgagcaccactactgctgcattgtgcagcacgcggggctggcgcagcccctcagggtggagctggaatctccagccaagtcctccgtgctcgtggtgggaatcgtcatcggtgtcttgctactcacggcagcggctgtaggaggagctctgttgtggagaaggatgaggagtgggctgccagccccttggatctcccttcgtggagacgacaccggggtcctcctgcccaccccaggggaggcccaggatgctgatttgaaggatgtaaatgtgattccagccaccgcctgaccatccgccattccgactgctaaaagcgaatgtagtcaggcccctttcatgctgtgagacctcctggaacactggcatctctgagcctccagaaggggttctgggcctagttgtcctccctctggagccccgtcctgtggtctgcctcagtttcccctcctaatacatatggctgttttccacctcgataatataacacgagtttgggcccg

SEQ ID NO: 278935 - DNA, 2770 bp, Homo sapiens
ggcggagctcggggccgggactctcagcctatcaagtgtctgtaattaattaaccaactgagatccagttcaggggtgaaagttcttcaggtacgaggagggcattgttgtcagtctggaccgagcccgcagagcccctcctcggcgtcctggtcccggccgtgcccgcggtgtcccgggaggaaggggcgggccgggggtcgggaggagtcacgtgccccctcccgccccaggtcgtcctctcagcatgggggtcccgcggcctcagccctgggcgctggggctcctgctctttctccttcctgggagcctgggcgcagaaagccacctctccctcctgtaccaccttaccgcggtgtcctcgcctgccccggggactcctgccttctgggtgtccggctggctgggcccgcagcagtacctgagctacaatagcctgcggggcgaggcggagccctgtggagcttgggtctgggaaaaccaggtgtcctggtattgggagaaagagaccacagatctgaggatcaaggagaagctctttctggaagctttcaaagctttggggggaaaaggtccctacactctgcagggcctgctgggctgtgaactgggccctgacaacacctcggtgcccaccgccaagttcgccctgaacggcgaggagttcatgaatttcgacctcaagcagggcacctggggtggggactggcccgaggccctggctatcagtcagcggtggcagcagcaggacaaggcggccaacaaggagctcaccttcctgctattctcctgcccgcaccgcctgcgggagcacctggagaggggccgcggaaacctggagtggaaggaaccaaaggccagacagattttctgtgcttggatttagtctatattggaagtaccttgaggctgaaggcacgtggctgtgagcacgacacaggaagatacagatttgctgaaaagaatagtgaacataaagcagaagccagaactgctgatggccgtcagcccggtccctccattccacctgacggtgcagcaaattctgccgacttgccagagaggcagctccaggagggagaagctgctgtgctttcctgaagcagcaaatgtgttttctgctgagcaaccaaaaccaagatcccagccaagacccacgattgcccagatccaccctccctgaaaggaacttgggcagtaatgcccagtcctaggcagttgctgaaatctttgccttttattttcttttttgagctgggatcttgctctgtcgcccagactggagtggagtgcagtggcacagtcatagcgccatgtagccttggactcccaagctcaagagatcctcccgcctcagccttacaagtagctgggactatagagcccccctccatgcgcctgaaggcccgacccagcagccctggcttttccgtgcttacctgcagcgccttctccttctaccctccggagctgcaacttcggttcctgcggaatgggctggccgctggcaccggccagggtgacttcggccccaacagtgacggatccttccacgcctcgtcgtcactaacagtcaaaagtggcgatgagcaccactactgctgcattgtgcagcacgcggggctggcgcagcccctcagggtggagctgggtgaggtcccgccaggtggtgatgctcctggtttcccgttgccttgtctcactgctgcgccggtccttcctgagtctgaccttcctccccactgctgccacctccttgaatctgactgccttgaacctcacgcctgtcagtgcccccaaaacctgatggcttgtccttcccaaggccaactgccttccgtctcctgctgcttctggcctcactgagtctgaagagctgttaactaccatggccagtcctccctgagtctgaccatcttccatcctgctgctgctgctgctgctgctgcgggtcttcctggaatctgaccattcgttgtctgctatgcccgtcctcaccaagactgactgcctgctgctttgctactgcccgggcccatgagactgacttcccactgctctgcctgcctctccccactgcactggcacagccccgccttgccgctgctgatccattgccggtgtgaccgcggccgctcgtgctgtagctggttcttacgtccaacctgggggcagtctgcccagatcgcctgcctggcctcgcctctgcccatcagacacttggtgctggaatctccgaggctgggagggactgggagcgccccagttctgtgtcctgactgggtggggtggaggggctgctccacatctcacagcgttctctggctgcagaatctccagccaagtcctccgtgctcgtggtgggaatcgtcatcggtgtcttgctactcacggcagcggctgtaggaggagctctgttgtggagaaggatgaggagtgggctgccagccccttggatctcccttcgtggagacgacaccggggtcctcctgcccaccccaggggaggcccaggatgctgatttgaaggatgtaaatgtgattccagccaccgcctgaccatccgccattccgactgctaaaagcgaatgtagtcaggcccctttcatgctgtgagacctcctggaacactggcatctctgagcctccagaaggggttctgggcctagttgtcctccctctggagccccgtcctgtggtctgcctcagtttcccctcctaatacatatggctgttttccacctcgataatataacacgagtttgggcccg

SEQ ID NO: 278936 - DNA, 2364 bp, Homo sapiens
ggcggagctcggggccgggactctcagcctatcaagtgtctgtaattaattaaccaactgagatccagttcaggggtgaaagttcttcaggtacgaggagggcattgttgtcagtctggaccgagcccgcagagcccctcctcggcgtcctggtcccggccgtgcccgcggtgtcccgggaggaaggggcgggccgggggtcgggaggagtcacgtgccccctcccgccccaggtcgtcctctcagcatgggggtcccgcggcctcagccctgggcgctggggctcctgctctttctccttcctgggagcctgggcgcagaaagccacctctccctcctgtaccaccttaccgcggtgtcctcgcctgccccggggactcctgccttctgggtgtccggctggctgggcccgcagcagtacctgagctacaatagcctgcggggcgaggcggagccctgtggagcttgggtctgggaaaaccaggtgtcctggtattgggagaaagagaccacagatctgaggatcaaggagaagctctttctggaagctttcaaagctttggggggaaaaggtccctacactctgcagggcctgctgggctgtgaactgggccctgacaacacctcggtgcccaccgccaagttcgccctgaacggcgaggagttcatgaatttcgacctcaagcagggcacctggggtggggactggcccgaggccctggctatcagtcagcggtggcagcagcaggacaaggcggccaacaaggagctcaccttcctgctattctcctgcccgcaccgcctgcgggagcacctggagaggggccgcggaaacctggagtggaaggctgggatcttgctctgtcgcccagactggagtggagtgcagtggcacagtcatagcgccatgtagccttggactcccaagctcaagagatcctcccgcctcagccttacaagtagctgggactatagagcccccctccatgcgcctgaaggcccgacccagcagccctggcttttccgtgcttacctgcagcgccttctccttctaccctccggagctgcaacttcggttcctgcggaatgggctggccgctggcaccggccagggtgacttcggccccaacagtgacggatccttccacgcctcgtcgtcactaacagtcaaaagtggcgatgagcaccactactgctgcattgtgcagcacgcggggctggcgcagcccctcagggtggagctgggtgaggtcccgccaggtggtgatgctcctggtttcccgttgccttgtctcactgctgcgccggtccttcctgagtctgaccttcctccccactgctgccacctccttgaatctgactgccttgaacctcacgcctgtcagtgcccccaaaacctgatggcttgtccttcccaaggccaactgccttccgtctcctgctgcttctggcctcactgagtctgaagagctgttaactaccatggccagtcctccctgagtctgaccatcttccatcctgctgctgctgctgctgctgctgcgggtcttcctggaatctgaccattcgttgtctgctatgcccgtcctcaccaagactgactgcctgctgctttgctactgcccgggcccatgagactgacttcccactgctctgcctgcctctccccactgcactggcacagccccgccttgccgctgctgatccattgccggtgtgaccgcggccgctcgtgctgtagctggttcttacgtccaacctgggggcagtctgcccagatcgcctgcctggcctcgcctctgcccatcagacacttggtgctggaatctccgaggctgggagggactgggagcgccccagttctgtgtcctgactgggtggggtggaggggctgctccacatctcacagcgttctctggctgcagaatctccagccaagtcctccgtgctcgtggtgggaatcgtcatcggtgtcttgctactcacggcagcggctgtaggaggagctctgttgtggagaaggatgaggagtgggctgccagccccttggatctcccttcgtggagacgacaccggggtcctcctgcccaccccaggggaggcccaggatgctgatttgaaggatgtaaatgtgattccagccaccgcctgaccatccgccattccgactgctaaaagcgaatgtagtcaggcccctttcatgctgtgagacctcctggaacactggcatctctgagcctccagaaggggttctgggcctagttgtcctccctctggagccccgtcctgtggtctgcctcagtttcccctcctaatacatatggctgttttccacctcgataatataacacgagtttgggcccg

SEQ ID NO: 278937 - DNA, 2021 bp, Homo sapiens
tttaacgacgcagtgattctcgagcatgttggcctaccggtatcaagtgtctgtaattaattaaccaactgagatccagttcaggggtgaaagttcttcaggtacgaggagggcattgttgtcagtctggaccgagcccgcagagcccctcctcggcgtcctggtcccggccgtgcccgcggtgtcccgggaggaaggggcgggccgggggtcgggaggagtcacgtgccccctcccgccccaggtcgtcctctcagcatgggggtcccgcggcctcagccctgggcgctggggctcctgctctttctccttcctgggagcctgggcgcagaaagccacctctccctcctgtaccaccttaccgcggtgtcctcgcctgccccggggactcctgccttctgggtgtccggctggctgggcccgcagcagtacctgagctacaatagcctgcggggcgaggcggagccctgtggagcttgggtctgggaaaaccaggtgtcctggtattgggagaaagagaccacagatctgaggatcaaggagaagctctttctggaagctttcaaagctttggggggaaaagcgcctgcgggagcacctggagaggggccgcggaaacctggagtggaaggagcccccctccatgcgcctgaaggcccgacccagcagccctggcttttccgtgcttacctgcagcgccttctccttctaccctccggagctgcaacttcggttcctgcggaatgggctggccgctggcaccggccagggtgacttcggccccaacagtgacggatccttccacgcctcgtcgtcactaacagtcaaaagtggcgatgagcaccactactgctgcattgtgcagcacgcggggctggcgcagcccctcagggtggagctgggtgaggtcccgccaggtggtgatgctcctggtttcccgttgccttgtctcactgctgcgccggtccttcctgagtctgaccttcctccccactgctgccacctccttgaatctgactgccttgaacctcacgcctgtcagtgcccccaaaacctgatggcttgtccttcccaaggccaactgccttccgtctcctgctgcttctggcctcactgagtctgaagagctgttaactaccatggccagtcctccctgagtctgaccatcttccatcctgctgctgctgctgctgctgctgcgggtcttcctggaatctgaccattcgttgtctgctatgcccgtcctcaccaagactgactgcctgctgctttgctactgcccgggcccatgagactgacttcccactgctctgcctgcctctccccactgcactggcacagccccgccttgccgctgctgatccattgccggtgtgaccgcggccgctcgtgctgtagctggttcttacgtccaacctgggggcagtctgcccagatcgcctgcctggcctcgcctctgcccatcagacacttggtgctggaatctccgaggctgggagggactgggagcgccccagttctgtgtcctgactgggtggggtggaggggctgctccacatctcacagcgttctctggctgcagaatctccagccaagtcctccgtgctcgtggtgggaatcgtcatcggtgtcttgctactcacggcagcggctgtaggaggagctctgttgtggagaaggatgaggagtgggctgccagccccttggatctcccttcgtggagacgacaccggggtcctcctgcccaccccaggggaggcccaggatgctgatttgaaggatgtaaatgtgattccagccaccgcctgaccatccgccattccgactgctaaaagcgaatgtagtcaggcccctttcatgctgtgagacctcctggaacactggcatctctgagcctccagaaggggttctgggcctagttgtcctccctctggagccccgtcctgtggtctgcctcagtttcccctcctaatacatatggctgttttccacctcgataatataacacgagtttgggcccg

SEQ ID NO: 278938 - DNA, 2178 bp, Homo sapiens
tttaacgacgcagtgattctcgagcatgttggcctaccggtatcaagtgtctgtaattaattaaccaactgagatccagttcaggggtgaaagttcttcaggtacgaggagggcattgttgtcagtctggaccgagcccgcagagcccctcctcggcgtcctggtcccggccgtgcccgcggtgtcccgggaggaaggggcgggccgggggtcgggaggagtcacgtgccccctcccgccccaggtcgtcctctcagcatgggggtcccgcggcctcagccctgggcgctggggctcctgctctttctccttcctgggagcctgggcgcagaaagccacctctccctcctgtaccaccttaccgcggtgtcctcgcctgccccggggactcctgccttctgggtgtccggctggctgggcccgcagcagtacctgagctacaatagcctgcggggcgaggcggagccctgtggagcttgggtctgggaaaaccaggtgtcctggtattgggagaaagagaccacagatctgaggatcaaggagaagctctttctggaagctttcaaagctttggggggaaaaggtccctacactctgcagggcctgctgggctgtgaactgggccctgacaacactggggtggggactggcccgaggccctggctatcagtcagcggtggcagcagcaggacaaggcggccaacaaggagctcaccttcctgctattctcctgcccgcaccgcctgcgggagcacctggagaggggccgcggaaacctggagtggaaggagcccccctccatgcgcctgaaggcccgacccagcagccctggcttttccgtgcttacctgcagcgccttctccttctaccctccggagctgcaacttcggttcctgcggaatgggctggccgctggcaccggccagggtgacttcggccccaacagtgacggatccttccacgcctcgtcgtcactaacagtcaaaagtggcgatgagcaccactactgctgcattgtgcagcacgcggggctggcgcagcccctcagggtggagctgggtgaggtcccgccaggtggtgatgctcctggtttcccgttgccttgtctcactgctgcgccggtccttcctgagtctgaccttcctccccactgctgccacctccttgaatctgactgccttgaacctcacgcctgtcagtgcccccaaaacctgatggcttgtccttcccaaggccaactgccttccgtctcctgctgcttctggcctcactgagtctgaagagctgttaactaccatggccagtcctccctgagtctgaccatcttccatcctgctgctgctgctgctgctgctgcgggtcttcctggaatctgaccattcgttgtctgctatgcccgtcctcaccaagactgactgcctgctgctttgctactgcccgggcccatgagactgacttcccactgctctgcctgcctctccccactgcactggcacagccccgccttgccgctgctgatccattgccggtgtgaccgcggccgctcgtgctgtagctggttcttacgtccaacctgggggcagtctgcccagatcgcctgcctggcctcgcctctgcccatcagacacttggtgctggaatctccgaggctgggagggactgggagcgccccagttctgtgtcctgactgggtggggtggaggggctgctccacatctcacagcgttctctggctgcagaatctccagccaagtcctccgtgctcgtggtgggaatcgtcatcggtgtcttgctactcacggcagcggctgtaggaggagctctgttgtggagaaggatgaggagtgggctgccagccccttggatctcccttcgtggagacgacaccggggtcctcctgcccaccccaggggaggcccaggatgctgatttgaaggatgtaaatgtgattccagccaccgcctgaccatccgccattccgactgctaaaagcgaatgtagtcaggcccctttcatgctgtgagacctcctggaacactggcatctctgagcctccagaaggggttctgggcctagttgtcctccctctggagccccgtcctgtggtctgcctcagtttcccctcctaatacatatggctgttttccacctcgataatataacacgagtttgggcccg

SEQ ID NO: 278939 - DNA, 1907 bp, Homo sapiens
  misc_feature (1717)..(1717): n is a, c, g, or t
  misc_feature (1729)..(1729): n is a, c, g, or t
ggcggagctcggggccgggactctcagcctatcaagtgtctgtaattaattaaccaactgagatccagttcaggggtgaaagttcttcaggtacgaggagggcattgttgtcagtctggaccgagcccgcagagcccctcctcggcgtcctggtcccggccgtgcccgcggtgtcccgggaggaaggggcgggccgggggtcgggaggagtcacgtgccccctcccgccccaggtcgtcctctcagcatgggggtcccgcggcctcagccctgggcgctggggctcctgctctttctccttcctgggagcctgggcgcagaaagccacctctccctcctgtaccaccttaccgcggtgtcctcgcctgccccggggactcctgccttctgggtgtccggctggctgggcccgcagcagtacctgagctacaatagcctgcggggcgaggcggagccctgtggagcttgggtctgggaaaaccaggtgtcctggtattgggagaaagagaccacagatctgaggatcaaggagaagctctttctggaagctttcaaagctttggggggaaaaggtccctacactctgcagggcctgctgggctgtgaactgggccctgacaacacctcggtgcccaccgccaagttcgccctgaacggcgaggagttcatgaatttcgacctcaagcagggcacctggggtggggactggcccgaggccctggctatcagtcagcggtggcagcagcaggacaaggcggccaacaaggagctcaccttcctgctattctcctgcccgcaccgcctgcgggagcacctggagaggggccgcggaaacctggagtggaaggagcccccctccatgcgcctgaaggcccgacccagcagccctggcttttccgtgcttacctgcagcgccttctccttctaccctccggagctgcaacttcggttcctgcggaatgggctggccgctggcaccggccagggtgacttcggccccaacagtgacggatccttccacgcctcgtcgtcactaacagtcaaaagtggcgatgagcaccactactgctgcattgtgcagcacgcggggctggcgcagcccctcagggtggagctggaatctccagccaagtcctccgtgctcgtggtgggaatcgtcatcggtgtcttgctactcacggcagcggctgtaggaggagctctgttgtggagaaggatgaggagtgggctgccagccccttggatctcccttcgtggagacgacaccggggtcctcctgcccaccccaggggaggcccaggatgctgatttgaaggatgtaaatgtgattccagccaccgcctgaccatccgccattccgactgctaaaagcgaatgtagtcaggcccctttcatgctgtgagacctcctggaacactggcatctctgagcctccagaaggggttctgggcctagttgtcctccctctggagccccgtcctgtggtctgcctcagtttcccctcctaatacatatggctgttttccacctcgataatataacacgagtttgggcccgaaaaaaaaaaaaaaaaaaaccaaaaaaaaaaaaaaaaaaaaaaaaaaaaaaaaaaaaaaaaaaaaaaaaaaaaaaaaaaaaaaaaaaagaagaaaaaaaaaaaaagtcgtatcggatgtcagccgacatgatgatggaatgtcgcccggggaattcgganccggtcctggangggcgaccagcttcctttgggaggagtcgattaaacgctggggcgaacaatgggcaaaactgtttcctcgtggggaaaaaatttggtattcgctcaccaatccacaccacataccaccccggaattaaaagggggaaacccgggggggctaaagggggggagctactcaccttttttg

SEQ ID NO: 278940 - DNA, 889 bp, Homo sapiens
  misc_feature (46)..(46): n is a, c, g, or t
  misc_feature (62)..(62): n is a, c, g, or t
  misc_feature (77)..(77): n is a, c, g, or t
  misc_feature (82)..(84): n is a, c, g, or t
  misc_feature (104)..(104): n is a, c, g, or t
  misc_feature (108)..(108): n is a, c, g, or t
  misc_feature (124)..(124): n is a, c, g, or t
  misc_feature (151)..(151): n is a, c, g, or t
  misc_feature (204)..(204): n is a, c, g, or t
  misc_feature (212)..(212): n is a, c, g, or t
tgcagtcaggcggtggcacgcaggcaggagcaagggcgggccaagnaagggggctcagcctngcctgctattgctgnctgcnnncgcagcccggctggcgggangcancctggaagagggggcncgcggaaaaccctggatgtgggaaggncgccccccgctgccattggcgcgctggaagggcgccgagccgcaggcaggccnctgggctntttgccgtggctatagcctggcacgcgcgcttgctgcgcttgctagcgcctccggagctgcaacttcggttcctgcggaatgggctggccgctggcaccggccagggtgacttcggccccaacagtgacggatccttccacgcctcgtcgtcactaacagtcaaaagtggcgatgagcaccactactgctgcattgtgcagcacgcggggctggcgcagcccctcagggtggagctggaatctccagccaagtcctccgtgctcgtggtgggaatcgtcatcggtgtcttgctactcacggcagcggctgtaggaggagctctgttgtggagaaggatgaggagtgggctgccagccccttggatctcccttcgtggagacgacaccggggtcctcctgcccaccccaggggaggcccaggatgctgatttgaaggatgtaaatgtgattccagccaccgcctgaccatccgccattccgactgctaaaagcgaatgtagtcaggcccctttcatgctgtgagacctcctggaacactggcatctctgagcctccagaaggggttctgggcctagttgtcctccctctggagccccgtcctgtggtctgcctcagtttcccctcctaatacatatggctgttttccacctcgataatataacacgagtttgggcccg

SEQ ID NO: 278941 - DNA, 2743 bp, Homo sapiens
ggcggagctcggggccgggactctcagcctatcaagtgtctgtaattaattaaccaactgagatccagttcaggggtgaaagttcttcaggtacgaggagggcattgttgtcagtctggaccgagcccgcagagcccctcctcggcgtcctggtcccggccgtgcccgcggtgtcccgggaggaaggggcgggccgggggtcgggaggagtcacgtgccccctcccgccccaggtcgtcctctcagcatgggggtcccgcggcctcagccctgggcgctggggctcctgctctttctccttcctgggagcctgggcgcagaaagccacctctccctcctgtaccaccttaccgcggtgtcctcgcctgccccggggactcctgccttctgggtgtccggctggctgggcccgcagcagtacctgagctacaatagcctgcggggcgaggcggagccctgtggagcttgggtctgggaaaaccaggtgtcctggtattgggagaaagagaccacagatctgaggatcaaggagaagctctttctggaagctttcaaagctttggggggaaaaggtccctacactctgcagggcctgctgggctgtgaactgggccctgacaacacctcggtgcccaccgccaagttcgccctgaacggcgaggagttcatgaatttcgacctcaagcagggcacctggggtggggactggcccgaggccctggctatcagtcagcggtggcagcagcaggacaaggcggccaacaaggagctcaccttcctgctattctcctgcccgcaccgcctgcgggagcacctggagaggggccgcggaaacctggagtggaaggagcccccctccatgcgcctgaaggcccgacccagcagccctggcttttccgtgcttacctgcagcgccttctccttctaccctccggagctgcaacttcggttcctgcggaatgggctggccgctggcaccggccagggtgacttcggccccaacagtgacggatccttccacgcctcgtcgtcactaacagtcaaaagtggcgatgagcaccactactgctgcattgtgcagcacgcggggctggcgcagcccctcagggtggagctgggtgaggtcccgccaggtggtgatgctcctggtttcccgttgccttgtctcactgctgcgccggtccttcctgagtctgaccttcctccccactgctgccacctccttgaatctgactgccttgaacctcacgcctgtcagtgcccccaaaacctgatggcttgtccttcccaaggccaactgccttccgtctcctgctgcttctggcctcactgagtctgaagagctgttaactaccatggccagtcctccctgagtctgaccatcttccatcctgctgctgctgctgctgctgctgcgggtcttcctggaatctgaccattcgttgtctgctatgcccgtcctcaccaagactgactgcctgctgctttgctactgcccgggcccatgagactgacttcccactgctctgcctgcctctccccactgcactggcacagccccgccttgccgctgctgatccattgccggtgtgaccgcggccgctcgtgctgtagctggttcttacgtccaacctgggggcagtctgcccagatcgcctgcctggcctcgcctctgcccatcagacacttggtgctggaatctccgaggctgggagggactgggagcgccccagttctgtgtcctgactgggtggggtggaggggctgctccacatctcacagcgttctctggctgcagaatctccagccaagtcctccgtgctcgtggtgggaatcgtcatcggtgtcttgctactcacggcagcggctgtaggaggagctctgttgtggagaaggatgaggagtgggctgccagccccttggatctcccttcgtggagacgacaccggggtcctcctgcccaccccaggggaggcccaggatgctgatttgaaggatgtaaatgtgattccagccaccgcctgaccatccgccattccgactgctaaaagcgaatgtagtcaggcccctttcatgctgtgagacctcctggaacactggcatctctgagcctccagaaggggttctgggcctagttgtcctccctctggagccccgtcctgtggtctgcctcagtttcccctcctaatacatatggctgttttccacctcgataatataacacgagtttgggcccgaaaaaaaaaaaaaaaaaaaccaaaaaaaaaaaaaaaaaaaaaaaaaaaaaaaaaaaaaaaaaaaaaaaaaaaaaaaaaaaaaaaaaaagaagaaaaaaaaaaaaagagggggggggggcgaaaaaaattcaccccgaggagggaggcagcacatgttggacgcccccacgatttgttggttgagcagggaggcgccacaataatgggggggcgcttaataaagacagcagcggcagcacgccggcagagtaaaaaacacgccgcgggcgggagaggaaaaccactgactcacgggaggaatcttcgggggagagagcccacccccctgcgggcggggggcggaaacaagaggggccacacaccccccctgaaaaagtaattaacgcctgcggcgggcgaatataaaaacggcggagcgctgatagtggttgaacacccaaccaccgactaatactgccgcgatcgaaaaagggcgccgcacgacgatgattatgacaaaatttcac

SEQ ID NO: 278942 - DNA, 1651 bp, Homo sapiens
ggcggagctcggggccgggactctcagcctatcaagtgtctgtaattaattaaccaactgagatccagttcaggggtgaaagttcttcaggtacgaggagggcattgttgtcagtctggaccgagcccgcagagcccctcctcggcgtcctggtcccggccgtgcccgcggtgtcccgggaggaaggggcgggccgggggtcgggaggagtcacgtgccccctcccgccccaggtcgtcctctcagcatgggggtcccgcggcctcagccctgggcgctggggctcctgctctttctccttcctgggagcctgggcgcagaaagccacctctccctcctgtaccaccttaccgcggtgtcctcgcctgccccggggactcctgccttctgggtgtccggctggctgggcccgcagcagtacctgagctacaatagcctgcggggcgaggcggagccctgtggagcttgggtctgggaaaaccaggtgtcctggtattgggagaaagagaccacagatctgaggatcaaggagaagctctttctggaagctttcaaagctttggggggaaaaggtccctacactctgcagggcctgctgggctgtgaactgggccctgacaacacctcggtgcccaccgccaagttcgccctgaacggcgaggagttcatgaatttcgacctcaagcagggcacctggggtggggactggcccgaggccctggctatcagtcagcggtggcagcagcaggacaaggcggccaacaaggagctcaccttcctgctattctcctgcccgcaccgcctgcgggagcacctggagaggggccgcggaaacctggagtggaaggagcccccctccatgcgcctgaaggcccgacccagcagccctggcttttccgtgcttacctgcagcgccttctccttctaccctccggagctgcaacttcggttcctgcggaatgggctggccgctggcaccggccagggtgacttcggccccaacagtgacggatccttccacgcctcgtcgtcactaacagtcaaaagtggcgatgagcaccactactgctgcattgtgcagcacgcggggctggcgcagcccctcagggtggagctgggtgaggtcccgccaggtggtgatgctcctggtttcccgttgccttgtctcactgctgcgccggtccttcctgagtctgaccttcctccccactgctgccacctccttgaatctgactgccttgaacctcacgcctgtcagtgcccccaaaacctgatggcttgtccttcccaaggccaactgccttccgtctcctgctgcttctggcctcactgagtctgaagagctgttaactaccatggccagtcctccctgagtctgaccatcttccatcctgctgctgctgctgctgctgctgcgggtcttcctggaatctgaccattcgttgtctgctatgcccgtcctcaccaagactgactgcctgctgctttgctactgcccgggcccatgagactgacttcccactgctcgcccctgagttagccgcagctcgcccctgagttagcagctcgcccctgagttgcagctcgcccctgagttacagctcgccccttagttgcagctcgcccctgagttgcagctcgcccctgagtt

SEQ ID NO: 278943 - DNA, 1002 bp, Homo sapiens
  misc_feature (970)..(970): n is a, c, g, or t
  misc_feature (980)..(980): n is a, c, g, or t
  misc_feature (982)..(982): n is a, c, g, or t
ggcggagctcggggccgggactctcagcctatcaagtgtctgtaattaattaaccaactgagatccagttcaggggtgaaagttcttcaggtacgaggagggcattgttgtcagtctggaccgagcccgcagagcccctcctcggcgtcctggtcccggccgtgcccgcggtgtcccgggaggaaggggcgggccgggggtcgggaggagtcacgtgccccctcccgccccaggtcgtcctctcagcatgggggtcccgcggcctcagccctgggcgctggggctcctgctctttctccttcctgggagcctgggcgcagaaagccacctctccctcctgtaccaccttaccgcggtgtcctcgcctgccccggggactcctgccttctgggtgtccggctggctgggcccgcagcagtacctgagctacaatagcctgcggggcgaggcggagccctgtggagcttgggtctgggaaaaccaggtgtcctggtattgggagaaagagaccacagatctgaggatcaaggagaagctctttctggaagctttcaaagctttggggggaaaaggtccctacactctgcagggcctgctgggctgtgaactgggccctgacaacacctcggtgcccaccgccaagttcgccctgaacggcgaggagttcatgaatttcgacctcaagcagggcacctggggtggggactggcccgaggccctggctatcagtcagcggtggcagcagcaggacaaggcggccaacaaggagctcaccttcctgctattctcctgcccgcaccgcctgcgggagcacctggagaggggccgcggaaacctggagtggaagggcacttgcactgttgcctagactggagtgcagtagcgggattagagttcactgcagcctcaacctcccaagctcaagcgatcctcccaccttacccttcctgaatggatggggccacaggcnccctcatgcncngaagcccgaccacgatgcgc

SEQ ID NO: 278944 - DNA, 2094 bp, Homo sapiens
agggaagtggggtggctccccatggcttctcccggggctggcactgaagctggagcacaggatgtgctgacgggggtccagaggcagagtccttaacttactcagcttaagcgtggcatggagtcccaactgggaggggccctggcagcatgaaacccccacccccactctctgcgacggcccagatggagggcaggaggaacagcggttcagccctggctggggctgcaggggctggggtgtgttactcactggcacgatggagaactgcatgaagaggcagcggagtgctgtctgtccccacccttccccgcccggcctccaactggtgggaactggattttgcggctgcagaggacttccccaaattttgccacattaacagctgactgcacacctgagccccgaggtgaagcagggcctcaggtagccagggaactggttgagcagaggaaatcggagagacctttttttttgtcatgaacaggctcagtgtgaatgggggaacttcctggttctgagggaatgtgggaaaattgccctttaggctgggtgaagaagaaagcaagtggaaccctggcacccctggacttcctcctccagaggaagcggctttggttgtgggccagcgagcctgtgcgtccccagccccagggcattcaccgcttcagagaagcaaggcgacagttctgccggatgagaggatccaggctgactggaggaaggaagggctttggctcatctgggctcaggtttgggagagatggcttctcagaggaggtgatgcctcagccagtcttaaaggcaatgcggtgtgcagagggtgcttggtggttctctcctgatggccccgcagggtctgcagcctccatctggccagcagagggcgcagaaggactgcctgggcagctcggacgtgaccgcctggaagtggtgtacagcgttcctgacaacgttcccggccaaaacgggtcccgccgcccacttgtgtgcaagataactggaaaatgtctttctgtgtgctccgaggagaatgcaaaggctggtggatgtagtgcctttcctctactgctctctcagctgggggcaagaatgacaggacgtgaacatgcacacaagggcccggaactcacgacccccgacagcggtctcccccgcccccccaaccccgcgcttgcaggatttagggcactagcacagcacagtccaccccttgggactagcaccccctccgcagttctgctctctgcagcaacatagagtacaaatattgttccttttgtttcttttttccctttggatacatttttaattacaaaaatagagcttgattgttgcacctagacagatgtttgcttgcttctgggcccattgggcctcctctcagagcctggaactcccagcccccagctcctggggtgccttcctccaggtgtgtccctggcttgggctggggggacacagccccgctcctgggacgtgcaggtttaaaatgctattgggtaccatctttgatcgaattcagagtgacagacttagagcaggtcacctctcagcttctaacgaggccaagacggaggaatccccacagcactgggtttgactctgtaattaagctggtaaagtggaaaaataaaagtaggaaacctaagtggaaaccaaaccagaaagccaggcagcccgggagttctgagccctgcttccctccagctgtgcggcctcagcggctgacgcggtctctgctgctcttctataacacaggatgatggcagctacaccctctgagtggtgtcaccaaggccaatgagtcctgatggttggagtgtgggtatccgggggcctctaggtcactacccactctagccctttgctcctagtctctggggaggtggcagcataggggcatggagcagaccagactttgcctctttctgcccccaggccagttgatatgagccctgcttgaggggttcgcagggcctggggagccttcttcagcttctctttgttttcctaagatgaaaattgtgacatctgggcttgttgcgggaaatttgtaaattgtgcacagagaagaatatgaaattgcacata

SEQ ID NO: 278945 - DNA, 1036 bp, Homo sapiens
caggctcaatctcttaaggcaatcttgagctgaggggtatccatgcagcacgtgacacatgcccatgagggagcgtatttctgtcccccacacaacccgcccccccaaccccgcgcttgcaggatttagggcactagcacagcacagtccaccccttgggactagcaccccctccgcagttctgctctctgcagcaacatagagtacaaatattgttccttttgtttcttttttccctttggatacatttttaattacaaaaatagagcttgattgttgcacctagacagatgtttgcttgcttctgggcccattgggcctcctctcagagcctggaactcccagcccccagctcctggggtgccttcctccaggtgtgtccctggcttgggctggggggacacagccccgctcctgggacgtgcaggtttaaaatgctattgggtaccatctttgatcgaattcagagtgacagacttagagcaggtcacctctcagcttctaacgaggccaagacggaggaatccccacagcactgggtttgactctgtaattaagctggtaaagtggaaaaataaaagtaggaaacctaagtggaaaccaaaccagaaagccaggcagcccgggagttctgagccctgcttccctccagctgtgcggcctcagcggctgacgcggtctctgctgctcttctataacacaggatgatggcagctacaccctctgagtggtgtcaccaaggccaatgagtcctgatggttggagtgtgggtatccgggggcctctaggtcactacccactctagccctttgctcctagtctctggggaggtggcagcataggggcatggagcagaccagactttgcctctttctgcccccaggccagttgatatgagccctgcttgaggggttcgcagggcctggggagccttcttcagcttctctttgttttcctaagatgaaaattgtgacatctgggcttgttgcgggaaatttgtaaattgtgcacagagaagaatatgaaattgcacata

SEQ ID NO: 278946 - DNA, 1699 bp, Homo sapiens
agggaagtggggtggctccccatggcttctcccggggctggcactgaagctggagcacaggatgtgctgacgggggtccagaggcagagtccttaacttactcagcttaagcgtggcatggagtcccaactgggaggggccctggcagcatgaaacccccacccccactctctgcgacggcccagatggagggcaggaggaacagcggttcagccctggctggggctgcaggggctggggtgtgttactcactggcacgatggagaactgcatgaagaggcagcggagtgctgtctgtccccacccttccccgcccggcctccaactggtgggaactggattttgcggctgcagaggacttccccaaattttgccacattaacagctgactgcacacctgagccccgaggcaatgcggtgtgcagagggtgcttggtggttctctcctgatggccccgcagggtctgcagcctccatctggccagcagagggcgcagaaggactgcctgggcagctcggacgtgaccgcctggaagtggtgtacagcgttcctgacaacgttcccggccaaaacgggtcccgccgcccacttgtgtgcaagataactggaaaatgtctttctgtgtgctccgaggagaatgcaaaggctggtggatgtagtgcctttcctctactgctctctcagctgggggcaagaatgacaggacgtgaacatgcacacaagggcccggaactcacgacccccgacagcggtctcccccgcccccccaaccccgcgcttgcaggatttagggcactagcacagcacagtccaccccttgggactagcaccccctccgcagttctgctctctgcagcaacatagagtacaaatattgttccttttgtttcttttttccctttggatacatttttaattacaaaaatagagcttgattgttgcacctagacagatgtttgcttgcttctgggcccattgggcctcctctcagagcctggaactcccagcccccagctcctggggtgccttcctccaggtgtgtccctggcttgggctggggggacacagccccgctcctgggacgtgcaggtttaaaatgctattgggtaccatctttgatcgaattcagagtgacagacttagagcaggtcacctctcagcttctaacgaggccaagacggaggaatccccacagcactgggtttgactctgtaattaagctggtaaagtggaaaaataaaagtaggaaacctaagtggaaaccaaaccagaaagccaggcagcccgggagttctgagccctgcttccctccagctgtgcggcctcagcggctgacgcggtctctgctgctcttctataacacaggatgatggcagctacaccctctgagtggtgtcaccaaggccaatgagtcctgatggttggagtgtgggtatccgggggcctctaggtcactacccactctagccctttgctcctagtctctggggaggtggcagcataggggcatggagcagaccagactttgcctctttctgcccccaggccagttgatatgagccctgcttgaggggttcgcagggcctggggagccttcttcagcttctctttgttttcctaagatgaaaattgtgacatctgggcttgttgcgggaaatttgtaaattgtgcacagagaagaatatgaaattgcacata

SEQ ID NO: 278947 - DNA, 376 bp, Homo sapiens
agtgggttaagatgcaataaaagtttattctttgtgcccaacacaggcaatgcggtgtgcagagggtgcttggtggttctctcctgatggccccgcagggtctgcagcctccatctggccagcagagggcgcagaaggactgcctgggcagctcggacgtgaccgcctggaagtggtgtacagcgttcctgacaacgttcccggccaaaacgggtcccgccgcccacttgtgtgcaagataactggaaaatgtctttctgtgtgctccgaggagaatgcaaaggctggtggatgtagtgcctttcctctactgctctctcagctgggggcaagaatgacaggacgtgaacatgcacacaagggcccggaactcacg

SEQ ID NO: 278948 - DNA, 502 bp, Homo sapiens
cctttgtgccgagcaggttgatgttaaaagcaatgaggaacttcctcgcccccgtggccgtggccccccaactggggacaaaggagctgggaccaaagtcgggcgcccagtcggcctgctggagctgtgagcaagttcgctctgggaaccgcaagcaaccacataaatataacggcagagaaaaggaaaaactcgtgaacccgcacaccagtgtgactgtgacgtgggccctgcgtcgggatttccttcggggggactggcatgaccgtgacgggggttacgtgtgccctgcatgccggcgtgaccgtgacgggggttacgtgtgccctgcacgctggcgtgactgtgacctacgtccctgcctcgggatttctttccaggagcgctgggttggtgcagcctaggggtgggtatgcactttgtccagtttgtctctgtttgtttcatatcattttcttgatttagttaatttcccaaagtgaaattattctgctctagaaaa

SEQ ID NO: 278949 - DNA, 390 bp, Homo sapiens
cctgcctcggcctcccaaagtgctgggattacaggcatgagccaccgcgcccggcccactagactgggaagactgcattgtgtgttcaccttggttgaataaggctgtttggcttatttttcccttctttgtcgtcctgtgaacagatattgctggtgaattcaaagagcagttacaggcactgataccgtatgtattaaacccatctaagttaatggaaaaggagatcaatggctcaaaggtcacctgtcggggactactggagtattttaaggtaaatatgggttttagttattaaaatgtttgatttttggtaaagctgatctcactcgtaaatcaacttgaatttaaatattttgaaacttaaaaattttctgggggagatggtga

SEQ ID NO: 278950 - DNA, 3007 bp, Homo sapiens
  misc_feature (2838)..(2838): n is a, c, g, or t
  misc_feature (2863)..(2863): n is a, c, g, or t
  misc_feature (2866)..(2866): n is a, c, g, or t
  misc_feature (2870)..(2870): n is a, c, g, or t
  misc_feature (2878)..(2878): n is a, c, g, or t
  misc_feature (2883)..(2883): n is a, c, g, or t
  misc_feature (2888)..(2888): n is a, c, g, or t
  misc_feature (2890)..(2890): n is a, c, g, or t
  misc_feature (2896)..(2896): n is a, c, g, or t
  misc_feature (2898)..(2898): n is a, c, g, or t
  misc_feature (2903)..(2904): n is a, c, g, or t
  misc_feature (2940)..(2941): n is a, c, g, or t
  misc_feature (2945)..(2945): n is a, c, g, or t
  misc_feature (2963)..(2965): n is a, c, g, or t
  misc_feature (2970)..(2970): n is a, c, g, or t
  misc_feature (2986)..(2986): n is a, c, g, or t
  misc_feature (2998)..(2998): n is a, c, g, or t
  misc_feature (3003)..(3004): n is a, c, g, or t
gtcccaggcctagttaaacaccaaagctgtctctcacactggtggttccaggataaagcctcggcctggggcctggtctgcacgttaggcgccggccgcagctcgcaggaggacccgagccagcccgccccttcccgcacagcctgctgggagttgtagttcagtcgtcggagaaccacgccaagccccgccccagatgagtgcgcagtatgaggaccgctggccgggacccagtgagcgcgggactacaattcccaaaggacggtagcactcagcgccccgccaacaggtacccggcggctcgcttcgcgcacacgcggcaggcggtggcgggattctgccgcgtgcgctttcccgccccgcctcgcctagcctcgtcctgcgctcgccacgcctcgggctgtccgttgggccacgcagaccgcgctgcgctcgctccgtcgcggctccgcgtgccccaccttctggctagttttttctagagcccaggctccgcccgtttcccgcttccagggcccggttcgttcccgcccgcacccgtccctctcctctgcacccctgctgcttctgctttgaaggcggaggctccatgttgtcccctcagcgagtggcagcagctgcctcaagaggagcagatgatgccatggagagcagcaagcctggtccagtgcaggttgttttggttcagaaagatcaacattcctttgagctagatgagaaagccttggccagcatcctcttgcaggaccacatccgagatcttgatgtggtggtggtttcagtggctggtgccttccgaaagggcaagtccttcattctggattttatgctacgatacttatattctcagaaggaaagtggccattcaaattggttgggtgacccagaagaaccgttaacaggattttcctggagagggggatctgatccagaaaccactgggattcaaatctggagtgaagttttcactgtggagaagccaggtgggaagaaggttgcagttgttctgatggatacccagggggcatttgacagccagtcaactgtgaaagactgtgctaccatctttgctctaagcactatgactagttctgttcagatttataatttatctcagaacattcaagaagatgatcttcaacagctgcagctcttcacagaatacggtcgtctggcaatggatgaaattttccaaaagcctttccagacactgatgtttttggttagagattggagtttcccttatgaatatagctatggactccaaggaggaatggcatttttggataagcgtttacaggtgaaggaacatcaacatgaagaaattcagaatgttcgaaatcacattcactcatgtttctccgatgtcacctgctttctcttaccacatccaggactccaggtggccacaagccctgactttgatgggaaattaaaagatattgctggtgaattcaaagagcagttacaggcactgataccgtatgtattaaacccatctaagttaatggaaaaggagatcaatggctcaaaggtcacctgtcggggactactggagtattttaaggcatatattaaaatttatcaaggagaagatctgcctcaccccaagtccatgcttcaggccactgctgaagccaacaacttagcagctgcagcctctgccaaggacatttattataacaacatggaagaggtttgtgggggagagaaaccttatttgtctccagacattctagaggagaagcactgtgaattcaaacaacttgctctggaccattttaagaagaccaagaagatgggtgggaaggatttcagctttcgttaccagcaggagctggaggaggaaatcaaggaattatatgagaacttctgcaagcacaatggtagcaagaacgtcttcagcaccttccgaacccctgcagtgctgttcacgggcattgtagctttgtacatagcctcaggcctcactggcttcataggtcttgaggttgtagcccagttgttcaactgtatggttggactactgttaatagcactcctcacctggggctacatcaggtattctggtcaatatcgtgagctgggcggagctattgattttggtgccgcatatgtgttggagcaggcttcttctcatatcggtaattccactcaggccactgtgagggatgcagttgttggaagaccatccatggataaaaaagctcaatagcatcttaacgtgaagatcaaacaagaacacaacaagcccctactgatttctgggtttctgccacggccacaggttcatatccagaggaatggcagatctgagacgatccaggaagagctaaaacatggccctgtaataaatgagcagacctctcctgtggtttcaaattattaaacacacttccatttctcttggaagcatttcttttccttgctgttatagatgcaagcctgtgtctattttcatattactctgctttgtgcactttatggaggaggaagctagaggaaaaatggaaatgcagcttttaagttctttatgtgccacttagtgccttttaagattgattccatggttttgcacacacgatggggaggggatggaggataacctcatgaaaggtgccgttttcgggtgaaacttgacatttcttttatactttactcttttgagaaggattctttttttttttttttttttgagttggagtctcgctctgtcaccaggcttgagtgcagtggtgtgatcttggctcactgcaacctctgcctgccgggttcaagcagttctcctgcctcagcctcccaagtagctgggactacaggtgtacgccaccatacccngtctctactaaaaatacaaaaattngcngggngtgatggngggcncctgnantcccancnactcnngaggctgaggcaggagaatcgcttgaacctggaggnngagnttgcagtgagccaagatnnngccantgtactccagcctggncaacagagcganactcnntct

SEQ ID NO: 278951 - DNA, 2368 bp, Homo sapiens
gtcccaggcctagttaaacaccaaagctgtctctcacactggtggttccaggataaagcctcggcctggggcctggtctgcacgttaggcgccggccgcagctcgcaggaggacccgagccagcccgccccttcccgcacagcctgctgggagttgtagttcagtcgtcggagaaccacgccaagccccgccccagatgagtgcgcagtatgaggaccgctggccgggacccagtgagcgcgggactacaattcccaaaggacggtagcactcagcgccccgccaacaggtacccggcggctcgcttcgcgcacacgcggcaggcggtggcgggattctgccgcgtgcgctttcccgccccgcctcgcctagcctcgtcctgcgctcgccacgcctcgggctgtccgttgggccacgcagaccgcgctgcgctcgctccgtcgcggctccgcgtgccccaccttctggctagttttttctagagcccaggctccgcccgtttcccgcttccagggcccggttcgttcccgcccgcacccgtccctctcctctgcacccctgctgcttctgctttgaaggcggaggctccatgttgtcccctcagcgagtggcagcagctgcctcaagaggagcagatgatgccatggagagcagcaagcctggtccagtgcaggttgttttggttcagaaagatcaacattcctttgagctagatgagaaagccttggccagcatcctcttgcaggaccacatccgagatcttgatgtggtggtggtttcagtggctggtgccttccgaaagggcaagtccttcattctggattttatgctacgatacttatattctcagaaggaaagtggccattcaaattggttgggtgacccagaagaaccgttaacaggattttcctggagagggggatctgatccagaaaccactgggattcaaatctggagtgaagttttcactgtggagaagccaggtgggaagaaggttgcagttgttctgatggatacccagggggcatttgacagccagtcaactgtgaaagactgtgctaccatctttgctctaagcactatgactagttctgttcagatttataatttatctcagaacattcaagaagatgatcttcaacagctgcagctcttcacagaatacggtcgtctggcaatggatgaaattttccaaaagcctttccagacactgatgtttttggttagagattggagtttcccttatgaatatagctatggactccaaggaggaatggcatttttggataagcgtttacaggtgaaggaacatcaacatgaagaaattcagaatgttcgaaatcacattcactcatgtttctccgatgtcacctgctttctcttaccacatccaggactccaggtggccacaagccctgactttgatgggaaattaaaagatattgctggtgaattcaaagagcagttacaggcactgataccgtatgtattaaacccatctaagttaatggaaaaggagatcaatggctcaaaggtcacctgtcggggactactggagtattttaaggcatatattaaaatttatcaaggagaagatctgcctcaccccaagtccatgcttcaggccactgctgaagccaacaacttagcagctgcagcctctgccaaggacatttattataacaacatggaagaggtttgtgggggagagaaaccttatttgtctccagacattctagaggagaagcactgtgaattcaaacaacttgctctggaccattttaagaagaccaagaagatgggtgggaaggatttcagctttcgttaccagcaggagctggaggaggaaatcaaggaattatatgagaacttctgcaagcacaatggtagcaagaacgtcttcagcaccttccgaacccctgcagtgctgttcacgggcattgtagctttgtacatagcctcaggcctcactggcttcataggtcttgaggttgtagcccagttgttcaactgtatggttggactactgttaatagcactcctcacctggggctacatcaggtattctggtcaatatcgtgagctgggcggagctattgattttggtgccgcatatgtgttggagcaggcttcttctcatatcggtaattccactcaggccactgtgagggatgcagttgttggaagaccatccatggataaaaaagctcaatagcatcttaacgtgaagatcaaacaagaacacaacaagcccctactgatttctgggtttctgccacggccacaggttcatatccagaggaatggcagatctgagacgatccaggaagagctaaaacatggccctgtaataaatgagcagacctct

SEQ ID NO: 278952 - DNA, 2783 bp, Homo sapiens
  misc_feature (2614)..(2614): n is a, c, g, or t
  misc_feature (2639)..(2639): n is a, c, g, or t
  misc_feature (2642)..(2642): n is a, c, g, or t
  misc_feature (2646)..(2646): n is a, c, g, or t
  misc_feature (2654)..(2654): n is a, c, g, or t
  misc_feature (2659)..(2659): n is a, c, g, or t
  misc_feature (2664)..(2664): n is a, c, g, or t
  misc_feature (2666)..(2666): n is a, c, g, or t
  misc_feature (2672)..(2672): n is a, c, g, or t
  misc_feature (2674)..(2674): n is a, c, g, or t
  misc_feature (2679)..(2680): n is a, c, g, or t
  misc_feature (2716)..(2717): n is a, c, g, or t
  misc_feature (2721)..(2721): n is a, c, g, or t
  misc_feature (2739)..(2741): n is a, c, g, or t
  misc_feature (2746)..(2746): n is a, c, g, or t
  misc_feature (2762)..(2762): n is a, c, g, or t
  misc_feature (2774)..(2774): n is a, c, g, or t
  misc_feature (2779)..(2780): n is a, c, g, or t
gtcccaggcctagttaaacaccaaagctgtctctcacactggtggttccaggataaagcctcggcctggggcctggtctgcacgttaggcgccggccgcagctcgcaggaggacccgagccagcccgccccttcccgcacagcctgctgggagttgtagttcagtcgtcggagaaccacgccaagccccgccccagatgagtgcgcagtatgaggaccgctggccgggacccagtgagcgcgggactacaattcccaaaggacggtagcactcagcgccccgccaacagggcccggttcgttcccgcccgcacccgtccctctcctctgcacccctgctgcttctgctttgaaggcggaggctccatgttgtcccctcagcgagtggcagcagctgcctcaagaggagcagatgatgccatggagagcagcaagcctggtccagtgcaggttgttttggttcagaaagatcaacattcctttgagctagatgagaaagccttggccagcatcctcttgcaggaccacatccgagatcttgatgtggtggtggtttcagtggctggtgccttccgaaagggcaagtccttcattctggattttatgctacgatacttatattctcagaaggaaagtggccattcaaattggttgggtgacccagaagaaccgttaacaggattttcctggagagggggatctgatccagaaaccactgggattcaaatctggagtgaagttttcactgtggagaagccaggtgggaagaaggttgcagttgttctgatggatacccagggggcatttgacagccagtcaactgtgaaagactgtgctaccatctttgctctaagcactatgactagttctgttcagatttataatttatctcagaacattcaagaagatgatcttcaacagctgcagctcttcacagaatacggtcgtctggcaatggatgaaattttccaaaagcctttccagacactgatgtttttggttagagattggagtttcccttatgaatatagctatggactccaaggaggaatggcatttttggataagcgtttacaggtgaaggaacatcaacatgaagaaattcagaatgttcgaaatcacattcactcatgtttctccgatgtcacctgctttctcttaccacatccaggactccaggtggccacaagccctgactttgatgggaaattaaaagatattgctggtgaattcaaagagcagttacaggcactgataccgtatgtattaaacccatctaagttaatggaaaaggagatcaatggctcaaaggtcacctgtcggggactactggagtattttaaggcatatattaaaatttatcaaggagaagatctgcctcaccccaagtccatgcttcaggccactgctgaagccaacaacttagcagctgcagcctctgccaaggacatttattataacaacatggaagaggtttgtgggggagagaaaccttatttgtctccagacattctagaggagaagcactgtgaattcaaacaacttgctctggaccattttaagaagaccaagaagatgggtgggaaggatttcagctttcgttaccagcaggagctggaggaggaaatcaaggaattatatgagaacttctgcaagcacaatggtagcaagaacgtcttcagcaccttccgaacccctgcagtgctgttcacgggcattgtagctttgtacatagcctcaggcctcactggcttcataggtcttgaggttgtagcccagttgttcaactgtatggttggactactgttaatagcactcctcacctggggctacatcaggtattctggtcaatatcgtgagctgggcggagctattgattttggtgccgcatatgtgttggagcaggcttcttctcatatcggtaattccactcaggccactgtgagggatgcagttgttggaagaccatccatggataaaaaagctcaatagcatcttaacgtgaagatcaaacaagaacacaacaagcccctactgatttctgggtttctgccacggccacaggttcatatccagaggaatggcagatctgagacgatccaggaagagctaaaacatggccctgtaataaatgagcagacctctcctgtggtttcaaattattaaacacacttccatttctcttggaagcatttcttttccttgctgttatagatgcaagcctgtgtctattttcatattactctgctttgtgcactttatggaggaggaagctagaggaaaaatggaaatgcagcttttaagttctttatgtgccacttagtgccttttaagattgattccatggttttgcacacacgatggggaggggatggaggataacctcatgaaaggtgccgttttcgggtgaaacttgacatttcttttatactttactcttttgagaaggattctttttttttttttttttttgagttggagtctcgctctgtcaccaggcttgagtgcagtggtgtgatcttggctcactgcaacctctgcctgccgggttcaagcagttctcctgcctcagcctcccaagtagctgggactacaggtgtacgccaccatacccngtctctactaaaaatacaaaaattngcngggngtgatggngggcncctgnantcccancnactcnngaggctgaggcaggagaatcgcttgaacctggaggnngagnttgcagtgagccaagatnnngccantgtactccagcctggncaacagagcganactcnntct

SEQ ID NO: 278953 - DNA, 2611 bp, Homo sapiens
  misc_feature (64)..(64): n is a, c, g, or t
  misc_feature (2442)..(2442): n is a, c, g, or t
  misc_feature (2467)..(2467): n is a, c, g, or t
  misc_feature (2470)..(2470): n is a, c, g, or t
  misc_feature (2474)..(2474): n is a, c, g, or t
  misc_feature (2482)..(2482): n is a, c, g, or t
  misc_feature (2487)..(2487): n is a, c, g, or t
  misc_feature (2492)..(2492): n is a, c, g, or t
  misc_feature (2494)..(2494): n is a, c, g, or t
  misc_feature (2500)..(2500): n is a, c, g, or t
  misc_feature (2502)..(2502): n is a, c, g, or t
  misc_feature (2507)..(2508): n is a, c, g, or t
  misc_feature (2544)..(2545): n is a, c, g, or t
  misc_feature (2549)..(2549): n is a, c, g, or t
  misc_feature (2567)..(2569): n is a, c, g, or t
  misc_feature (2574)..(2574): n is a, c, g, or t
  misc_feature (2590)..(2590): n is a, c, g, or t
  misc_feature (2602)..(2602): n is a, c, g, or t
  misc_feature (2607)..(2608): n is a, c, g, or t
ctcgggctctagaaaaaactagccagaaggtggggcacgcggaccgcgacggagcgagcgcagnggctctgcgtggcccaacggacagcccaggctccgcccgtttcccgcttccagggcccggttcgttcccgcccgcacccgtccctctcctctgcacccctgctgcttctgctttgaaggcggaggctccatgttgtcccctcagcgagtggcagcagctgcctcaagaggagcagatgatgccatggagagcagcaagcctggtccagtgcaggttgttttggttcagaaagatcaacattcctttgagctagatgagaaagccttggccagcatcctcttgcaggaccacatccgagatcttgatgtggtggtggtttcagtggctggtgccttccgaaagggcaagtccttcattctggattttatgctacgatacttatattctcagaaggaaagtggccattcaaattggttgggtgacccagaagaaccgttaacaggattttcctggagagggggatctgatccagaaaccactgggattcaaatctggagtgaagttttcactgtggagaagccaggtgggaagaaggttgcagttgttctgatggatacccagggggcatttgacagccagtcaactgtgaaagactgtgctaccatctttgctctaagcactatgactagttctgttcagatttataatttatctcagaacattcaagaagatgatcttcaacagctgcagctcttcacagaatacggtcgtctggcaatggatgaaattttccaaaagcctttccagacactgatgtttttggttagagattggagtttcccttatgaatatagctatggactccaaggaggaatggcatttttggataagcgtttacaggtgaaggaacatcaacatgaagaaattcagaatgttcgaaatcacattcactcatgtttctccgatgtcacctgctttctcttaccacatccaggactccaggtggccacaagccctgactttgatgggaaattaaaagatattgctggtgaattcaaagagcagttacaggcactgataccgtatgtattaaacccatctaagttaatggaaaaggagatcaatggctcaaaggtcacctgtcggggactactggagtattttaaggcatatattaaaatttatcaaggagaagatctgcctcaccccaagtccatgcttcaggccactgctgaagccaacaacttagcagctgcagcctctgccaaggacatttattataacaacatggaagaggtttgtgggggagagaaaccttatttgtctccagacattctagaggagaagcactgtgaattcaaacaacttgctctggaccattttaagaagaccaagaagatgggtgggaaggatttcagctttcgttaccagcaggagctggaggaggaaatcaaggaattatatgagaacttctgcaagcacaatggtagcaagaacgtcttcagcaccttccgaacccctgcagtgctgttcacgggcattgtagctttgtacatagcctcaggcctcactggcttcataggtcttgaggttgtagcccagttgttcaactgtatggttggactactgttaatagcactcctcacctggggctacatcaggtattctggtcaatatcgtgagctgggcggagctattgattttggtgccgcatatgtgttggagcaggcttcttctcatatcggtaattccactcaggccactgtgagggatgcagttgttggaagaccatccatggataaaaaagctcaatagcatcttaacgtgaagatcaaacaagaacacaacaagcccctactgatttctgggtttctgccacggccacaggttcatatccagaggaatggcagatctgagacgatccaggaagagctaaaacatggccctgtaataaatgagcagacctctcctgtggtttcaaattattaaacacacttccatttctcttggaagcatttcttttccttgctgttatagatgcaagcctgtgtctattttcatattactctgctttgtgcactttatggaggaggaagctagaggaaaaatggaaatgcagcttttaagttctttatgtgccacttagtgccttttaagattgattccatggttttgcacacacgatggggaggggatggaggataacctcatgaaaggtgccgttttcgggtgaaacttgacatttcttttatactttactcttttgagaaggattctttttttttttttttttttgagttggagtctcgctctgtcaccaggcttgagtgcagtggtgtgatcttggctcactgcaacctctgcctgccgggttcaagcagttctcctgcctcagcctcccaagtagctgggactacaggtgtacgccaccatacccngtctctactaaaaatacaaaaattngcngggngtgatggngggcncctgnantcccancnactcnngaggctgaggcaggagaatcgcttgaacctggaggnngagnttgcagtgagccaagatnnngccantgtactccagcctggncaacagagcganactcnntct

SEQ ID NO: 278954 - DNA, 2022 bp, Homo sapiens
gtcccaggcctagttaaacaccaaagctgtctctcacactggtggttccaggataaagcctcggcctggggcctggtctgcacgttaggcgccggccgcagctcgcaggaggacccgagccagcccgccccttcccgcacagcctgctgggagttgtagttcagtcgtcggagaaccacgccaagccccgccccagatgagtgcgcagtatgaggaccgctggccgggacccagtgagcgcgggactacaattcccaaaggacggtagcactcagcgccccgccaacagatgatgccatggagagcagcaagcctggtccagtgcaggttgttttggttcagaaagatcaacattcctttgagctagatgagaaagccttggccagcatcctcttgcaggaccacatccgagatcttgatgtggtggtggtttcagtggctggtgccttccgaaagggcaagtccttcattctggattttatgctacgatacttatattctcagaaggaaagtggccattcaaattggttgggtgacccagaagaaccgttaacaggattttcctggagagggggatctgatccagaaaccactgggattcaaatctggagtgaagttttcactgtggagaagccaggtgggaagaaggttgcagttgttctgatggatacccagggggcatttgacagccagtcaactgtgaaagactgtgctaccatctttgctctaagcactatgactagttctgttcagatttataatttatctcagaacattcaagaagatgatcttcaacagctgcagctcttcacagaatacggtcgtctggcaatggatgaaattttccaaaagcctttccagacactgatgtttttggttagagattggagtttcccttatgaatatagctatggactccaaggaggaatggcatttttggataagcgtttacaggtgaaggaacatcaacatgaagaaattcagaatgttcgaaatcacattcactcatgtttctccgatgtcacctgctttctcttaccacatccaggactccaggtggccacaagccctgactttgatgggaaattaaaagatattgctggtgaattcaaagagcagttacaggcactgataccgtatgtattaaacccatctaagttaatggaaaaggagatcaatggctcaaaggtcacctgtcggggactactggagtattttaaggcatatattaaaatttatcaaggagaagatctgcctcaccccaagtccatgcttcaggccactgctgaagccaacaacttagcagctgcagcctctgccaaggacatttattataacaacatggaagaggtttgtgggggagagaaaccttatttgtctccagacattctagaggagaagcactgtgaattcaaacaacttgctctggaccattttaagaagaccaagaagatgggtgggaaggatttcagctttcgttaccagcaggagctggaggaggaaatcaaggaattatatgagaacttctgcaagcacaatggtagcaagaacgtcttcagcaccttccgaacccctgcagtgctgttcacgggcattgtagctttgtacatagcctcaggcctcactggcttcataggtcttgaggttgtagcccagttgttcaactgtatggttggactactgttaatagcactcctcacctggggctacatcaggtattctggtcaatatcgtgagctgggcggagctattgattttggtgccgcatatgtgttggagcaggcttcttctcatatcggtaattccactcaggccactgtgagggatgcagttgttggaagaccatccatggataaaaaagctcaatagcatcttaacgtgaagatcaaacaagaacacaacaagcccctactgatttctgggtttctgccacggccacaggttcatatccagaggaatggcagatctgagacgatccaggaagagctaaaacatggccctgtaataaatgagcagacctct

SEQ ID NO: 278955 - DNA, 440 bp, Homo sapiens
gccacagagcagatgttcccctggctctcttgggagttagctgctgccacagcctctctgtatccctgcattttcattcaactgctttctgtaacatgccgatgatggagacaggtttttgaaagtttaaggacttactttcttgttgctgtgttgtattttattaacttatatgttgaataaatggacttttgcaggcttcttctcatatcggtaattccactcaggccactgtgagggatgcagttgttggaagaccatccatggataaaaaagctcaatagcatcttaacgtgaagatcaaacaagaacacaacaagcccctactgatttctgggtttctgccacggccacaggttcatatccagaggaatggcagatctgagacgatccaggaagagctaaaacatggccctgtaataaatgagcagacctctcct

SEQ ID NO: 278956 - DNA, 887 bp, Homo sapiens
gtcccaggcctagttaaacaccaaagctgtctctcacactggtggttccaggataaagcctcggcctggggcctggtctgcacgttaggcgccggccgcagctcgcaggaggacccgagccagcccgccccttcccgcacagcctgctgggagttgtagttcagtcgtcggagaaccacgccaagccccgccccagatgagtgcgcagtatgaggaccgctggccgggacccagtgagcgcgggactacaattcccaaaggacggtagcactcagcgccccgccaacaggtacccggcggctcgcttcgcgcacacgcggcaggcggtggcgggattctgccgcgtgcgctttcccgccccgcctcgcctagcctcgtcctgcgctcgccacgcctcgggctgtccgttgggccacgcagaccgcgctgcgctcgctccgtcgcggctccgcgtgccccaccttctggctagttttttctagagcccaggctccgcccgtttcccgcttccagggcccggttcgttcccgcccgcacccgtccctctcctctgcacccctgctgcttctgctttgaaggcggaggctccatgttgtcccctcagcgagtggcagcagctgcctcaagaggagcagtgtaatgtgtgtgctgttgaaatgaccgtttcacttgcgaaatcgaagagcaaaaaggaaaagaacagtgaagaatttttaaatgagtctcagttctcaaattcaaatacgaagcaatggaacgttttgtcagtcttagaataacggaccaaaaatgtacgatttcacatattggcttacttttggagatttaagaagcataacctacggagtactaatccctgtcaagaatttagcattgcaacataggta

SEQ ID NO: 278957 - DNA, 2411 bp, Homo sapiens
gtcccaggcctagttaaacaccaaagctgtctctcacactggtggttccaggataaagcctcggcctggggcctggtctgcacgttaggcgccggccgcagctcgcaggaggacccgagccagcccgccccttcccgcacagcctgctgggagttgtagttcagtcgtcggagaaccacgccaagccccgccccagatgagtgcgcagtatgaggaccgctggccgggacccagtgagcgcgggactacaattcccaaaggacggtagcactcagcgccccgccaacaggtacccggcggctcgcttcgcgcacacgcggcaggcggtggcgggattctgccgcgtgcgctttcccgccccgcctcgcctagcctcgtcctgcgctcgccacgcctcgggctgtccgttgggccacgcagaccgcgctgcgctcgctccgtcgcggctccgcgtgccccaccttctggctagttttttctagagcccaggctccgcccgtttcccgcttccagggcccggttcgttcccgcccgcacccgtccctctcctctgcacccctgctgcttctgctttgaaggcggaggctccatgttgtcccctcagcgagtggcagcagctgcctcaagaggagcagatgatgccatggagagcagcaagcctggtccagtgcaggttgttttggttcagaaagatcaacattcctttgagctagatgagaaagccttggccagcatcctcttgcaggaccacatccgagatcttgatgtggtggtggtttcagtggctggtgccttccgaaagggcaagtccttcattctggattttatgctacgatacttatattctcagaaggaaagtggccattcaaattggttgggtgacccagaagaaccgttaacaggattttcctggagagggggatctgatccagaaaccactgggattcaaatctggagtgaagttttcactgtggagaagccaggtgggaagaaggttgcagttgttctgatggatacccagggggcatttgacagccagtcaactgtgaaagactgtgctaccatctttgctctaagcactatgactagttctgttcagatttataatttatctcagaacattcaagaagatgatcttcaacagctgcagctcttcacagaatacggtcgtctggcaatggatgaaattttccaaaagcctttccagacactgatgtttttggttagagattggagtttcccttatgaatatagctatggactccaaggaggaatggcatttttggataagcgtttacaggtgaaggaacatcaacatgaagaaattcagaatgttcgaaatcacattcactcatgtttctccgatgtcacctgctttctcttaccacatccaggactccaggtggccacaagccctgactttgatgggaaattaaaagatattgctggtgaattcaaagagcagttacaggcactgataccgtatgtattaaacccatctaagttaatggaaaaggagatcaatggctcaaaggtcacctgtcggggactactggagtattttaaggcatatattaaaatttatcaaggagaagatctgcctcaccccaagtccatgcttcaggccactgctgaagccaacaacttagcagctgcagcctctgccaaggacatttattataacaacatggaagaggtttgtgggggagagaaaccttatttgtctccagacattctagaggagaagcactgtgaattcaaacaacttgctctggaccattttaagaagaccaagaagatgggtgggaaggatttcagctttcgttaccagcaggagctggaggaggaaatcaaggaattatatgagaacttctgcaagcacaatggtagcaagaacgtcttcagcaccttccgaacccctgcagtgctgttcacgggcattgtagctttgtacatagcctcaggcctcactggcttcataggtcttgaggttgtagcccagttgttcaactgtatggttggactactgttaatagcactcctcacctggggctacatcaggtattctggtcaatatcgtgagctgggcggagctattgattttggtgccgcatatgtgttggagcaggcttcttctcatatcggtaattccactcaggccactgtgagggatgcagttgttggaagaccatccatggataaaaaagctcaatagcatcttaacgtgaagatcaaacaagaacacaacaagcccctactgatttctgggtttctgccacggccacaggttcatatccagaggaatggcagatctgagacgatccaggaagagctaaaacatggccctgtaataaatgagcagacctctcctgtggtttcaaattattaaacacacttccatttctcttgga

SEQ ID NO: 278958 - DNA, 2184 bp, Homo sapiens
gtcccaggcctagttaaacaccaaagctgtctctcacactggtggttccaggataaagcctcggcctggggcctggtctgcacgttaggcgccggccgcagctcgcaggaggacccgagccagcccgccccttcccgcacagcctgctgggagttgtagttcagtcgtcggagaaccacgccaagccccgccccagatgagtgcgcagtatgaggaccgctggccgggacccagtgagcgcgggactacaattcccaaaggacggtagcactcagcgccccgccaacaggtacccggcggctcgcttcgcgcacacgcggcaggcggtggcgggattctgccgcgtgcgctttcccgccccgcctcgcctagcctcgtcctgcgctcgccacgcctcgggctgtccgttgggccacgcagaccgcgctgcgctcgctccgtcgcggctccgcgtgccccaccttctggctagttttttctagagcccaggctccgcccgtttcccgcttccagggcccggttcgttcccgcccgcacccgtccctctcctctgcacccctgctgcttctgctttgaaggcggaggctccatgttgtcccctcagcgagtggcagcagctgcctcaagaggagcagatgatgccatggagagcagcaagcctggtccagtgcaggttgttttggttcagaaagatcaacattcctttgagctagatgagaaagccttggccagcatcctcttgcaggaccacatccgagatcttgatgtggtggtggtttcagtggctggtgccttccgaaagggcaagtccttcattctggattttatgctacgatacttatattctcagaaggaaagtggccattcaaattggttgggtgacccagaagaaccgttaacaggattttcctggagagggggatctgatccagaaaccactgggattcaaatctggagtgaagttttcactgtggagaagccaggtgggaagaaggttgcagttgttctgatggatacccagggggcatttgacagccagtcaactgtgaaagactgtgctaccatctttgctctaagcactatgactagttctgttcagatttataatttatctcagaacattcaagaagatgatcttcaacagctgcagctcttcacagaatacggtcgtctggcaatggatgaaattttccaaaagcctttccagacactgatgtttttggttagagattggagtttcccttatgaatatagctatggactccaaggaggaatggcatttttggataagcgtttacaggtgaaggaacatcaacatgaagaaattcagaatgttcgaaatcacattcactcatgtttctccgatgtcacctgctttctcttaccacatccaggactccaggtggccacaagccctgactttgatgggaaattaaaagatattgctggtgaattcaaagagcagttacaggcactgataccgtatgtattaaacccatctaagttaatggaaaaggagatcaatggctcaaaggtcacctgtcggggactactggagtattttaaggcatatattaaaatttatcaaggagaagatctgcctcaccccaagtccatgcttcaggccactgctgaagccaacaacttagcagctgcagcctctgccaaggacatttattataacaacatggaagaggtttgtgggggagagaaaccttatttgtctccagacattctagaggagaagcactgtgaattcaaacaacttgctctggaccattttaagaagaccaagaagatgggtgggaaggatttcagctttcgttaccagcaggagctggaggaggaaatcaaggaattatatgagaacttctgcaagcacaatggtagcaagaacgtcttcagcaccttccgaacccctgcagtgctgttcacgggcattgtagctttgtacatagcctcaggcctcactggcttcataggtcttgaggttgtagcccagttgttcaactgtatggttggactactgttaatagcactcctcacctggggctacatcaggtattctggtcaatatcgtgagctgggcggagctattgattttggtgccgcatatgtgttggagcaggcttcttctccatatgcggtatttaacctcacgcgccctctggagggttggagtgt

SEQ ID NO: 278959 - DNA, 1583 bp, Homo sapiens
tgggtgcggggcactttttatttcactgcgaagcctgtgaggactggacgcgaggacggggctttgtagaatgctcgctggtggtagctgttgttcctctcttgttttttcgagacgcctttttgtcaacataactgtaaagatgcccaagaatattttcagatatttacagcaatccatcaacagtcagacgaagggggggcagccaaagtgggggggagtaagaccttttttttgctgtaatttgactcgaccttccagtggtttgtgccttttttcttttgacttgtttgtggatggaatgtttacagacatttctaattactgctttaattaaataaattggatcaaaggccgttcgaggtatttttgttttgccgtttgtcgctcagaattggcattttgagaggtgattgatactgctaacaattttctagtactctagtttgtttcaagaagagattttgggtagacgtaatcttcaccctttcaaattatataacaatacgaacattattttttatactgatcataatttccagatttggggagggggtgatcgtggcaggaaaagttgtatgtttgttagttgcatatggtgatttttgatttttcaatgctggtagggtaagtaaggaggtctctgtaccatggctcgtacaaagcagactgcccgcaaatcgaccggtggtaaagcacccaggaagcaactggctacaaaagccgctcgcaagagtgcgccctctactggaggggtgaagaaacctcatcgttacaggcctggtactgtggcgctccgtgaaattagacgttatcagaagtccactgaacttctgattcgcaaacttcccttccagcgtctggtgcgagaaattgctcaggactttaaaacagatctgcgcttccagagcgcagctatcggtgctttgcaggaggcaagtgaggcctatctggttggcctttttgaagacaccaacctgtgtgctatccatgccaaacgtgtaacaattatgccaaaagacatccagctagcacgccgcatacgtggagaacgtgcttaagaatccactatgatgggaaacatttcattctcaaaaaaaaaaaaaaaatttctcttcttcctgttattggtagttctgaacgttagatattttttttccatggggtcaaaaggtacctaagtatatgattgcgagtggaaaaataggggacagaaatcaggtattggcagtttttccattttcatttgtgtgtgaatttttaatataaatgcggagacgtaaagcattaatgcaagttaaaatgtttcagtgaacaagtttcagcggttcaactttataataattataaataaacctgttaaatttttctggacaatgccagcatttggatttttttaaaacaagtaaatttcttattgatggcaactaaatggtgtttgtagcatttttatcatacagtagattccatccattcactatacttttctaactgagttgtcctacatgcaagtacatgtttttaatgttgtctgtcttctgtgctgttcctgtaagtttgctattaaaatacattaaactata

SEQ ID NO: 278960 - DNA, 378 bp, Homo sapiens
ttctagagtatcccccttgctggcgcagagcagctagccagaagagaggggggtaagtaaggaggtctctgtaccatggctcgtacaaagcagactgcccgcaaatcgaccggtggtaaagcacccaggaagcaactggctacaaaagccgctcgcaagagtgcgccctctactggaggggtgaagaaacctcatcgttacaggcctggtactgtggcgctccgtgaaattagacgttatcagaagtccactgaacttctgattcgcaaacttcccttccagcgtctggtgcgagaaattgctcaggactttaaaacagatctgcgcttccagagcgcagctatcggtgctttgcagggtaaaatggtgggtgggaag

SEQ ID NO: 278961 - DNA, 915 bp, Homo sapiens
atagcctcggtgtcagccatctttcaattgtgttcgcagccgccgccgcgccgccgtcgctctccaacgccagcgccgcctctcgctcgccgagctccagccgaaggagaaggggggtaagtaaggaggtctctgtaccatggctcgtacaaagcagactgcccgcaaatcgaccggtggtaaagcacccaggaagcaactggctacaaaagccgctcgcaagagtgcgccctctactggaggggtgaagaaacctcatcgttacaggcctggtactgtggcgctccgtgaaattagacgttatcagaagtccactgaacttctgattcgcaaacttcccttccagcgtctggtgcgagaaattgctcaggactttaaaacagatctgcgcttccagagcgcagctatcggtgctttgcaggaggcaagtgaggcctatctggttggcctttttgaagacaccaacctgtgtgctatccatgccaaacgtgtaacaattatgccaaaagacatccagctagcacgccgcatacgtggagaacgtgcttaagaatccactatgatgggaaacatttcattctcaaaaaaaaaaaaaaaatttctcttcttcctgttattggtagttctgaacgttagatattttttttccatggggtcaaaaggtacctaagtatatgattgcgagtggaaaaataggggacagaaatcaggtattggcagtttttccattttcatttgtgtgtgaatttttaatataaatgcggagacgtaaagcattaatgcaagttaaaatgtttcagtgaacaagtttcagcggttcaactttataataattataaataaacctgttaaatttttctggacaatgccagcatttggatttttttaaaacaagtaaatttcttattgatggca

SEQ ID NO: 278962 - DNA, 865 bp, Homo sapiens
atagcctcggtgtcagccatctttcaattgtgttcgcagccgccgccgcgccgccgtcgctctccaacgccagcgccgcctctcgctcgccgagctccagccgaaggagaaggggggtaagtaaggaggtctctgtaccatggctcgtacaaagcagactgcccgcaaatcgaccggtggtaaagcacccaggaagcaactggctacaaaagccgctcgcaagagtgcgccctctactggaggggtgaagaaacctcatcgttacaggcctggtactgtggcgctccgtgaaattagacgttatcagaagtccactgaacttctgattcgcaaacttcccttccagcgtctggtgcgagaaattgctcaggactttaaaacagatctgcgcttccagagcgcagctatcggtgctttgcaggaggcaagtgaggcctatctggttggcctttttgaagacaccaacctgtgtgctatccatgccaaacgtgtaacaattatgccaaaagacatccagctagcacgccgcatacgtggagaacgtgcttaagaatccactatgatgggaaacatttcattctcaaaaaaaaaaaaaaaatttctcttcttcctgttattggtagttctgaacgttagatattttttttccatggggtcaaaaggtacctaagtatatgattgcgagtggaaaaataggggacagaaatcaggtattggcagtttttccattttcatttgtgtgtgaatttttaatataaatgcggagacgtaaagcattaatgcaagttaaaatgtttcagtgaacaagtttcagcggttcaactttataataattataaataaacctgttaaatttttctggaca

SEQ ID NO: 278963 - DNA, 766 bp, Homo sapiens
atagcctcggtgtcagccatctttcaattgtgttcgcagccgccgccgcgccgccgtcgctctccaacgccagcgccgcctctcgctcgccgagctccagccgaaggagaaggggggtaagtaaggaggtctctgtaccatggctcgtacaaagcagactgcccgcaaatcgaccggtggtaaagcacccaggaagcaactggctacaaaagccgctcgcaagagtgcgccctctactggaggggtgaagaaacctcatcgttacaggcctggtactgtggcgctccgtgaaattagacgttatcagaagtccactgaacttctgattcgcaaacttcccttccagcgtctggtgcgagaaattgctcaggactttaaaacagatctgcgcttccagagcgcagctatcggtgctttgcaggaggcaagtgaggcctatctggttggcctttttgaagacaccaacctgtgtgctatccatgccaaacgtgtaacaattatgccaaaagacatccagctagcacgccgcatacgtggagaacgtgcttaagaatccactatgatgggaaacatttcattctcaaaaaaaaaaaaaaaatttctcttcttcctgttattggtagttctgaacgttagatattttttttccatggggtcaaaaggtacctaagtatatgattgcgagtggaaaaataggggacagaaatcaggtattggcagtttttccattttcattcgtagaaagtgaccgggatcctctagatca

SEQ ID NO: 278964 - DNA, 1565 bp, Homo sapiens
gcctggacgaggacaaggaaggggagcgcaggtagccggcccggggcagcgggtgcagacctgctggggactcggtgttgaggttctcgtcgtccgagtcagcaaagacctcggccagctcctggtccgacatgtcggtgagctcagtgaggtccaggaggtcgaagtggacctcggccagctcctggtccgacatgtcggtgagctcagtgaggtccaggaggtcgaagtggacctccagagaggagacgctgctcagaggctgcctcctctccgtgacctgcaggagccccggtgctggtactgggatgcccccgacctcctcctccacaggcgtgtggccattgtcccctgtcccctgggctgggacgcccagcgcagcctgcggcacctcagcctccttaacgatctttggcggccgcgcccgctggcgtcctcttgttctcttccaggtacttgcgtgtggggcgccgactgtgtgcgggcgcccctcggggctggcgaggggcacaggaggggcctgactcgcgctgggtaatgaccccgccgtcgctctccaacgccagcgccgcctctcgctcgccgagctccagccgaaggagaaggggggtaagtaaggaggtctctgtaccatggctcgtacaaagcagactgcccgcaaatcgaccggtggtaaagcacccaggaagcaactggctacaaaagccgctcgcaagagtgcgccctctactggaggggtgaagaaacctcatcgttacaggcctggtactgtggcgctccgtgaaattagacgttatcagaagtccactgaacttctgattcgcaaacttcccttccagcgtctggtgcgagaaattgctcaggactttaaaacagatctgcgcttccagagcgcagctatcggtgctttgcaggaggcaagtgaggcctatctggttggcctttttgaagacaccaacctgtgtgctatccatgccaaacgtgtaacaattatgccaaaagacatccagctagcacgccgcatacgtggagaacgtgcttaagaatccactatgatgggaaacatttcattctcaaaaaaaaaaaaaaaatttctcttcttcctgttattggtagttctgaacgttagatattttttttccatggggtcaaaaggtacctaagtatatgattgcgagtggaaaaataggggacagaaatcaggtattggcagtttttccattttcatttgtgtgtgaatttttaatataaatgcggagacgtaaagcattaatgcaagttaaaatgtttcagtgaacaagtttcagcggttcaactttataataattataaataaacctgttaaatttttctggacaatgccagcatttggatttttttaaaacaagtaaatttcttattgatggcaactaaatggtgtttgtagcatttttatcatacagtagattccatccattcactatacttttctaactgagttgtcctacatgcaagtacatgtttttaatgttgtctgtcttctgtgctgttcctgtaagtttgctattaaaatacattaaactata

SEQ ID NO: 278965 - DNA, 1066 bp, Homo sapiens
aatcccgggtcgactactactactaaattcgcggctgctcgaccccgccgtcgctctccaacgccagcgccgcctctcgctcgccgagctccagccgaaggagaaggggggtaagtaaggaggtctctgtaccatggctcgtacaaagcagactgcccgcaaatcgaccggtggtaaagcacccaggaagcaactggctacaaaagccgctcgcaagagtgcgccctctactggaggggtgaagaaacctcatcgttacaggcctggtactgtggcgctccgtgaaattagacgttatcagaagtccactgaacttctgattcgcaaacttcccttccagcgtctggtgcgagaaattgctcaggactttaaaacagatctgcgcttccagagcgcagctatcggtgctttgcaggaggcaagtgaggcctatctggttggcctttttgaagacaccaacctgtgtgctatccatgccaaacgtgtaacaattatgccaaaagacatccagctagcacgccgcatacgtggagaacgtgcttaagaatccactatgatgggaaacatttcattctcaaaaaaaaaaaaaaaatttctcttcttcctgttattggtagttctgaacgttagatattttttttccatggggtcaaaaggtacctaagtatatgattgcgagtggaaaaataggggacagaaatcaggtattggcagtttttccattttcatttgtgtgtgaatttttaatataaatgcggagacgtaaagcattaatgcaagttaaaatgtttcagtgaacaagtttcagcggttcaactttataataattataaataaacctgttaaatttttctggacaatgccagcatttggatttttttaaaacaagtaaatttcttattgatggcaactaaatggtgtttgtagcatttttatcatacagtagattccatccattcactatacttttctaactgagttgtcctacatgcaagtacatgtttttaatgttgtctgtcttctgtgctgttcctgtaagtttgctattaaaatacattaaactata

SEQ ID NO: 278966 - DNA, 770 bp, Homo sapiens
atagcctcggtgtcagccatctttcaattgtgttcgcagccgccgccgcgccgccgtcgctctccaacgccagcgccgcctctcgctcgccgagctccagccgaaggagaaggggggtaagtaaggaggtctctgtaccatggctcgtacaaagcagactgcccgcaaatcgaccggtggtaaagcacccaggaagcaactggctacaaaagccgctcgcaagagtgcgccctctactggaggggtgaagaaacctcatcgttacaggcctggtactgtggcgctccgtgaaattagacgttatcagaagtccactgaacttctgattcgcaaacttcccttccagcgtctggtgcgagaaattgctcaggactttaaaacagatctgcgcttccagagcgcagctatcggtgctttgcaggaggcaagtgaggcctatctggttggcctttttgaagacaccaacctgtgtgctatccatgccaaacgtgtaacaattatgccaaaagacatccagctagcacgccgcatacgtggagaacgtgcttaagaatccactatgatgggaaacatttcattctcaaaaaaaaaaaaaaaggcttatctcctcagataagcaggaattatgggatgaaaccttggacctgtcaaaaagactgagtgagaacgaaattatatgtaatgctctgcaaagacagaaagagagatgggaaggagcaaatgatcttttgaagagggagacagcagattgtcagttacatggtctggat

SEQ ID NO: 278967 - DNA, 735 bp, Homo sapiens
atagcctcggtgtcagccatctttcaattgtgttcgcagccgccgccgcgccgccgtcgctctccaacgccagcgccgcctctcgctcgccgagctccagccgaaggagaaggggggtaagtaaggaggtctctgtaccatggctcgtacaaagcagactgcccgcaaatcgaccggtggtaaagcacccaggaagcaactggctacaaaagccgctcgcaagagtgcgccctctactggaggggtgaagaaacctcatcgttacaggcctggtactgtggcgctccgtgaaattagacgttatcagaagtccactgaacttctgattcgcaaacttcccttccagcgtctggtgcgagaaattgctcaggactttaaaacagatctgcgcttccagagcgcagctatcggtgctttgcaggaggcaagtgaggcctatctggttggcctttttgaagacaccaacctgtgtgctatccatgccaaacgtgtaacaattatgccaaaagacatccagctagcacgccgcatacgtggagaacgtgcttaagaatccactatgatgggaaacatttcattctcaaaaaaaaaaaaaaacaaaaaacaaaaaaaaaaaccccgcgggccctcttaatgcgggggggggaaaacgggtgttctgtgaagggcccctggggccaaaggtgttttccctggccccccgtttctttgtttcacaaggtgggaaccttccgg

SEQ ID NO: 278968 - DNA, 1025 bp, Homo sapiens
tgagaatgaaatgtttcccatcatagtggattcttaagcacgttctccacgtatgcggcgtgctagctggtaagtaaggaggtctctgtaccatggctcgtacaaagcagactgcccgcaaatcgaccggtggtaaagcacccaggaagcaactggctacaaaagccgctcgcaagagtgcgccctctactggaggggtgaagaaacctcatcgttacaggcctggtactgtggcgctccgtgaaattagacgttatcagaagtccactgaacttctgattcgcaaacttcccttccagcgtctggtgcgagaaattgctcaggactttaaaacagatctgcgcttccagagcgcagctatcggtgctttgcaggaggcaagtgaggcctatctggttggcctttttgaagacaccaacctgtgtgctatccatgccaaacgtgtaacaattatgccaaaagacatccagctagcacgccgcatacgtggagaacgtgcttaagaatccactatgatgggaaacatttcattctcaaaaaaaaaaaaaaaatttctcttcttcctgttattggtagttctgaacgttagatattttttttccatggggtcaaaaggtacctaagtatatgattgcgagtggaaaaataggggacagaaatcaggtattggcagtttttccattttcatttgtgtgtgaatttttaatataaatgcggagacgtaaagcattaatgcaagttaaaatgtttcagtgaacaagtttcagcggttcaactttataataattataaataaacctgttaaatttttctggacaatgccagcatttggatttttttaaaacaagtaaatttcttattgatggcaactaaatggtgtttgtagcatttttatcatacagtagattccatccattcactatacttttctaactgagttgtcctacatgcaagtacatgtttttaatgttgtctgtcttctgtgctgttcctgtaagtttgctattaaaatacattaaactata

SEQ ID NO: 278969 - DNA, 1041 bp, Homo sapiens
gatacgttttgcgattgtttccattttgttctggtcggggagccgagttggttcctgctcgaggcgctgggagcgaggcgggcaggtaagtaaggaggtctctgtaccatggctcgtacaaagcagactgcccgcaaatcgaccggtggtaaagcacccaggaagcaactggctacaaaagccgctcgcaagagtgcgccctctactggaggggtgaagaaacctcatcgttacaggcctggtactgtggcgctccgtgaaattagacgttatcagaagtccactgaacttctgattcgcaaacttcccttccagcgtctggtgcgagaaattgctcaggactttaaaacagatctgcgcttccagagcgcagctatcggtgctttgcaggaggcaagtgaggcctatctggttggcctttttgaagacaccaacctgtgtgctatccatgccaaacgtgtaacaattatgccaaaagacatccagctagcacgccgcatacgtggagaacgtgcttaagaatccactatgatgggaaacatttcattctcaaaaaaaaaaaaaaaatttctcttcttcctgttattggtagttctgaacgttagatattttttttccatggggtcaaaaggtacctaagtatatgattgcgagtggaaaaataggggacagaaatcaggtattggcagtttttccattttcatttgtgtgtgaatttttaatataaatgcggagacgtaaagcattaatgcaagttaaaatgtttcagtgaacaagtttcagcggttcaactttataataattataaataaacctgttaaatttttctggacaatgccagcatttggatttttttaaaacaagtaaatttcttattgatggcaactaaatggtgtttgtagcatttttatcatacagtagattccatccattcactatacttttctaactgagttgtcctacatgcaagtacatgtttttaatgttgtctgtcttctgtgctgttcctgtaagtttgctattaaaatacattaaactata

SEQ ID NO: 278970 - DNA, 935 bp, Homo sapiens
ggggtgatctagaggatccctctgcccgcaaatcgaccggtggtaaagcacccaggaagcaactggctacaaaagccgctcgcaagagtgcgccctctactggaggggtgaagaaacctcatcgttacaggcctggtactgtggcgctccgtgaaattagacgttatcagaagtccactgaacttctgattcgcaaacttcccttccagcgtctggtgcgagaaattgctcaggactttaaaacagatctgcgcttccagagcgcagctatcggtgctttgcaggaggcaagtgaggcctatctggttggcctttttgaagacaccaacctgtgtgctatccatgccaaacgtgtaacaattatgccaaaagacatccagctagcacgccgcatacgtggagaacgtgcttaagaatccactatgatgggaaacatttcattctcaaaaaaaaaaaaaaaatttctcttcttcctgttattggtagttctgaacgttagatattttttttccatggggtcaaaaggtacctaagtatatgattgcgagtggaaaaataggggacagaaatcaggtattggcagtttttccattttcatttgtgtgtgaatttttaatataaatgcggagacgtaaagcattaatgcaagttaaaatgtttcagtgaacaagtttcagcggttcaactttataataattataaataaacctgttaaatttttctggacaatgccagcatttggatttttttaaaacaagtaaatttcttattgatggcaactaaatggtgtttgtagcatttttatcatacagtagattccatccattcactatacttttctaactgagttgtcctacatgcaagtacatgtttttaatgttgtctgtcttctgtgctgttcctgtaagtttgctattaaaatacattaaactata

SEQ ID NO: 278971 - DNA, 981 bp, Homo sapiens
tcccacctcagcctcctgagtagctgagactacaagcatgtgccaccatacccagttaattaaattttttttttagagacagggtcttgctgtgttgccccggctggtctggctacaaaagccgctcgcaagagtgcgccctctactggaggggtgaagaaacctcatcgttacaggcctggtactgtggcgctccgtgaaattagacgttatcagaagtccactgaacttctgattcgcaaacttcccttccagcgtctggtgcgagaaattgctcaggactttaaaacagatctgcgcttccagagcgcagctatcggtgctttgcaggaggcaagtgaggcctatctggttggcctttttgaagacaccaacctgtgtgctatccatgccaaacgtgtaacaattatgccaaaagacatccagctagcacgccgcatacgtggagaacgtgcttaagaatccactatgatgggaaacatttcattctcaaaaaaaaaaaaaaaatttctcttcttcctgttattggtagttctgaacgttagatattttttttccatggggtcaaaaggtacctaagtatatgattgcgagtggaaaaataggggacagaaatcaggtattggcagtttttccattttcatttgtgtgtgaatttttaatataaatgcggagacgtaaagcattaatgcaagttaaaatgtttcagtgaacaagtttcagcggttcaactttataataattataaataaacctgttaaatttttctggacaatgccagcatttggatttttttaaaacaagtaaatttcttattgatggcaactaaatggtgtttgtagcatttttatcatacagtagattccatccattcactatacttttctaactgagttgtcctacatgcaagtacatgtttttaatgttgtctgtcttctgtgctgttcctgtaagtttgctattaaaatacattaaactata

SEQ ID NO: 278972 - DNA, 898 bp, Homo sapiens
tgagaatgaaatgtttcccatcatagtggctacaaaagccgctcgcaagagtgcgccctctactggaggggtgaagaaacctcatcgttacaggcctggtactgtggcgctccgtgaaattagacgttatcagaagtccactgaacttctgattcgcaaacttcccttccagcgtctggtgcgagaaattgctcaggactttaaaacagatctgcgcttccagagcgcagctatcggtgctttgcaggaggcaagtgaggcctatctggttggcctttttgaagacaccaacctgtgtgctatccatgccaaacgtgtaacaattatgccaaaagacatccagctagcacgccgcatacgtggagaacgtgcttaagaatccactatgatgggaaacatttcattctcaaaaaaaaaaaaaaaatttctcttcttcctgttattggtagttctgaacgttagatattttttttccatggggtcaaaaggtacctaagtatatgattgcgagtggaaaaataggggacagaaatcaggtattggcagtttttccattttcatttgtgtgtgaatttttaatataaatgcggagacgtaaagcattaatgcaagttaaaatgtttcagtgaacaagtttcagcggttcaactttataataattataaataaacctgttaaatttttctggacaatgccagcatttggatttttttaaaacaagtaaatttcttattgatggcaactaaatggtgtttgtagcatttttatcatacagtagattccatccattcactatacttttctaactgagttgtcctacatgcaagtacatgtttttaatgttgtctgtcttctgtgctgttcctgtaagtttgctattaaaatacattaaactata

SEQ ID NO: 278973 - DNA, 831 bp, Homo sapiens
ctattaaccaggcttatctgtttcacgcctggtactgtggcgctccgtgaaattagacgttatcagaagtccactgaacttctgattcgcaaacttcccttccagcgtctggtgcgagaaattgctcaggactttaaaacagatctgcgcttccagagcgcagctatcggtgctttgcaggaggcaagtgaggcctatctggttggcctttttgaagacaccaacctgtgtgctatccatgccaaacgtgtaacaattatgccaaaagacatccagctagcacgccgcatacgtggagaacgtgcttaagaatccactatgatgggaaacatttcattctcaaaaaaaaaaaaaaaatttctcttcttcctgttattggtagttctgaacgttagatattttttttccatggggtcaaaaggtacctaagtatatgattgcgagtggaaaaataggggacagaaatcaggtattggcagtttttccattttcatttgtgtgtgaatttttaatataaatgcggagacgtaaagcattaatgcaagttaaaatgtttcagtgaacaagtttcagcggttcaactttataataattataaataaacctgttaaatttttctggacaatgccagcatttggatttttttaaaacaagtaaatttcttattgatggcaactaaatggtgtttgtagcatttttatcatacagtagattccatccattcactatacttttctaactgagttgtcctacatgcaagtacatgtttttaatgttgtctgtcttctgtgctgttcctgtaagtttgctattaaaatacattaaactata

SEQ ID NO: 278974 - DNA, 1051 bp, Homo sapiens
atagcctcggtgtcagccatctttcaattgtgttcgcagccgccgccgcgccgccgtcgctctccaacgccagcgccgcctctcgctcgccgagctccagccgaaggagaaggggggtaagtaaggaggtctctgtaccatggctcgtacaaagcagactgcccgcaaatcgaccggtggtaaagcacccaggaagcaactggctacaaaagccgctcgcaagagtgcgccctctactggaggggtgaagaaacctcatcgttacaggcctggtactgtggcgctccgtgaaattagacgttatcagaagtccactgaacttctgattcgcaaacttcccttccagcgtctggtgcgagaaattgctcaggacttgaggcaagtgaggcctatctggttggcctttttgaagacaccaacctgtgtgctatccatgccaaacgtgtaacaattatgccaaaagacatccagctagcacgccgcatacgtggagaacgtgcttaagaatccactatgatgggaaacatttcattctcaaaaaaaaaaaaaaaatttctcttcttcctgttattggtagttctgaacgttagatattttttttccatggggtcaaaaggtacctaagtatatgattgcgagtggaaaaataggggacagaaatcaggtattggcagtttttccattttcatttgtgtgtgaatttttaatataaatgcggagacgtaaagcattaatgcaagttaaaatgtttcagtgaacaagtttcagcggttcaactttataataattataaataaacctgttaaatttttctggacaatgccagcatttggatttttttaaaacaagtaaatttcttattgatggcaactaaatggtgtttgtagcatttttatcatacagtagattccatccattcactatacttttctaactgagttgtcctacatgcaagtacatgtttttaatgttgtctgtcttctgtgctgttcctgtaagtttgctattaaaatacattaaactataaaaaaacaaaaaaaactcgaggcgg

SEQ ID NO: 278975 - DNA, 1672 bp, Homo sapiens
ccgagctactcgggaggctgaggcaggagaatgacatgaacctgggaggtggagcttgcagtgagctgagatcttgccactgcactccagcctgggcaacaaagagagactccgtctcaaaataaataaataaggaactgccgggcgcggtggctcacgcctataatcccagcactttgggaggccaaggtgggtggatcacgaggtcaggagttcgagaccagcctgaccaacatggtgaaaccccttctctactaaaaatacaaaaaagtagccaggcatggtggcgcatacctgtagtcccagctactcgggaggctgaggcaggagaatcgcttgaatccgggaggtggaggttgcagtgagccgagatcgcgctactgcactccagcctgggcgacagagtaagactccatctcagaaagaaagaaaaatacggaactaacttgtgatatgttctggaatcaaaagtactcttatgataaaacaggtatgaaagggaacatagatgagaagcatgtgataaaaaccacttgttcaccatgttatactactggacaaggcagaggttcacatactgtgtgaatgggattcagagtgaggaggagactaggctgggatggggtatttggattggacatgattgcgtttataagaatgagagtgttaaattggatttcttgctttatttgtgacatttcagtttattagaaatcatgttaccattagaaaaattgaagtttcctagtaacaaagtaatttgatttgtgtaacttgataaaagatttactgacttaagcttttgttttttttcataagctgcttttgagctttgtccccacaggttgtaaaatgtaagcatttggtaaaattgtcagcatcttgcccagtcatttttttaaagggttcaaaaacctttttgttttaattcgtatagttgggtcttaactattggaaataacatcatcagtaattttttcttcattccttttgcaggaggcaagtgaggcctatctggttggcctttttgaagacaccaacctgtgtgctatccatgccaaacgtgtaacaattatgccaaaagacatccagctagcacgccgcatacgtggagaacgtgcttaagaatccactatgatgggaaacatttcattctcaaaaaaaaaaaaaaaatttctcttcttcctgttattggtagttctgaacgttagatattttttttccatggggtcaaaaggtacctaagtatatgattgcgagtggaaaaataggggacagaaatcaggtattggcagtttttccattttcatttgtgtgtgaatttttaatataaatgcggagacgtaaagcattaatgcaagttaaaatgtttcagtgaacaagtttcagcggttcaactttataataattataaataaacctgttaaatttttctggacaatgccagcatttggatttttttaaaacaagtaaatttcttattgatggcaactaaatggtgtttgtagcatttttatcatacagtagattccatccattcactatacttttctaactgagttgtcctacatgcaagtacatgtttttaatgttgtctgtcttctgtgctgttcctgtaagtttgctattaaaatacattaaactataaaaaaacaaaaaaaactcgaggcgg

SEQ ID NO: 278976 - DNA, 1150 bp, Homo sapiens
tgggtgcggggcactttttatttcactgcgaagcctgtgaggactggacgcgaggacggggctttgtagaatgctcgctggtggtagctgttgttcctctcttgttttttcgagacgcctttttgtcaacataactgtaaagatgcccaagaatattttcagatatttacagcaatccatcaacagtcagacgaagggggggcagccaaagtgggggggagtaagaccttttttttgctgtaatttgactcgaccttccagtggtttgtgccttttttcttttgacttgtttgtggatggaatgtttacagacatttctaattactgctttaattaaataaattggatcaaaggccgttcgaggtatttttgttttgccgtttgtcgctcagaattggcattttgagaggtgattgatactgctaacaattttctagtactctagtttgtttcaagaagagattttgggtagacgtaatcttcaccctttcaaattatataacaatacgaacattattttttatactgatcataatttccagatttggggagggggtgatcgtggcaggaaaagttgtatgtttgttagttgcatatggtgatttttgatttttcaatgctggtagggtaagtaaggaggtctctgtaccatggctcgtacaaagcagactgcccgcaaatcgaccggtggtaaagcacccaggaagcaactggctacaaaagccgctcgcaagagtgcgccctctactggaggggtgaagaaacctcatcgttacaggtattaaaaaacaggaaaaaaatgggacaaagtctctcttgtatgtatccatataatttaacaaaaagatggataacaggaaaactttttgctttagagaaactttttttttcatttgaacacttaactactgcttaaataaatgtactgtatgatcatttatatataaagttaagtattaggttttattgaaaacgtttaactttgaagccataatcttacctggaggtctaaggagacctcgtatatcactgataatgttaatgggatatattgacattttagttaactattagtaattctttaaaaatagttaagtgttgctttcttgaatacacttttgaggttatctttcctagtttttggcaaaat

SEQ ID NO: 278977 - DNA, 481 bp, Homo sapiens
  misc_feature (419)..(419): n is a, c, g, or t
  misc_feature (465)..(465): n is a, c, g, or t
  misc_feature (472)..(472): n is a, c, g, or t
atagcctcggtgtcagccatctttcaattgtgttcgcagccgccgccgcgccgccgtcgctctccaacgccagcgccgcctctcgctcgccgagctccagccgaaggagaaggggggtaagtaaggaggtctctgtaccatggctcgtacaaagcagactgcccgcaaatcgaccggtggtaaagcacccaggaagcaactggctacaaaagccgctcgcaagagtgcgccctctactggaggggtgaagaaacctcatcgttacaggcctggtactgtggcgctccgtgaaattagacgttatcagaagtccactgaacttctgattcgcaaacttcccttccagcgtctggtgactccagagggattcagcactcggagcatgccttccgacgcgcggagccatggcagccctgctntgctgctgctgctgctgctgctgctgttgctgccagtcggcccaanccctctngtggtgact

SEQ ID NO: 278978 - DNA, 1072 bp, Homo sapiens
atagcctcggtgtcagccatctttcaattgtgttcgcagccgccgccgcgccgccgtcgctctccaacgccagcgccgcctctcgctcgccgagctccagccgaaggagaaggggggtaagtaaggaggtctctgtaccatggctcgtacaaagcagactgcccgcaaatcgaccggtggtaaagcacccaggaagcaactggctacaaaagccgctcgcaagagtgcgccctctactggaggggtgaagaaacctcatcgttacaggcctggtactgtggcgctccgtgaaattagacgttatcagaagtccactgaacttctgattcgcaaacttcccttccagcgtctggtgcgagaaattgctcaggactttaaaacagatctgcgcttccagagcgcagctatcggtgctttgcaggaggcaagtgaggcctatctggttggcctttttgaagacaccaacctgtgtgctatccatgccaaacgtgtaacaattatgccaaaagacatccagctagcacgccgcatacgtggagaacgtgcttaagaatccactatgatgggaaacatttcattctcaaaaaaaaaaaaaaaatttctcttcttcctgttattggtagttctgaacgttagatattttttttccatggggtcaaaaggtacctaagtatatgattgcgagtggaaaaataggggacagaaatcaggtattggcagtttttccattttcatttgtgtgtgaatttttaatataaatgcggagacgtaaagcattaatgcaagttaaaatgtttcagtgaacaagtttcagcggttcaactttataataattataaataaacctgttaaatttttctggacaatgccagcatttggatttttttaaaacaagtaaatttcttattgatggcaactaaatggtgtttgtagcatttttatcatacagtagattccatccattcactatacttttctaactgagttgtcctacatgcaagtacatgtttttaatgttgtctgtcttctgtgctgttcctgtaagtttgctattaaaatacattaaactata

SEQ ID NO: 278979 - DNA, 834 bp, Homo sapiens
gatacgttttgcgattgtttccattttgttctggtcggggagccgagttggttcctgctcgaggcgctgggagcgaggcgggcaggtaagtaaggaggtctctgtaccatggctcgtacaaagcagactgcccgcaaatcgaccggtggtaaagcacccaggaagcaactggctacaaaagccgctcgcaagagtgcgccctctactggaggggtgaagaaacctcatcgttacaggcctggtactgtggcgctccgtgaaattagacgttatcagaagtccactgaacttctgattcgcaaacttcccttccagcgtctggtgcgagaaattgctcaggactttaaaacagatctgcgcttccagagcgcagctatcggtgctttgcaggaggcaagtgaggcctatctggttggcctttttgaagacaccaacctgtgtgctatccatgccaaacgtgtaacaattatgccaaaagacatccagctagcacgccgcatacgtggagaacgtgcttaagaatccactatgatgggaaacatttcattctcaaaaaaaaaaaaaaaatttctcttcttcctgttattggtagttctgaacgttagatattttttttccatggggtcaaaaggtacctaagtatatgattgcgagtggaaaaataggggacagaaatcaggtattggcagtttttccattttcatttgtgtgtgaatttttaatataaatgcggagacgtaaagcattaatgcaagttaaaatgtttcagtgaacaagtttcagcggttcaactttataataattataaataaacctgttaaatttttctggaca

SEQ ID NO: 278980 - DNA, 657 bp, Homo sapiens
  misc_feature (23)..(23): n is a, c, g, or t
  misc_feature (35)..(35): n is a, c, g, or t
gagggggaaccatcggctaggtncagcctgggtgntgggtaagtaaggaggtctctgtaccatggctcgtacaaagcagactgcccgcaaatcgaccggtggtaaagcacccaggaagcaactggctacaaaagccgctcgcaagagtgcgccctctactggaggggtgaagaaacctcatcgttacaggcctggtactgtggcgctccgtgaaattagacgttatcagaagtccactgaacttctgattcgcaaacttcccttccagcgtctggtgcgagaaattgctcaggactttaaaacagatctgcgcttccagagcgcagctatcggtgctttgcaggaggcaagtgaggcctatctggttggcctttttgaagacaccaacctgtgtgctatccatgccaaacgtgtaacaattatgccaaaagacatccagctagcacgccgcatacgtggagaacgtgcttaagaatccactatgatgggaaacatttcattctcaaaaaaaaaaaaaaacaaaaaacaaaaaaaaaaaccccgcgggccctcttaatgcgggggggggaaaacgggtgttctgtgaagggcccctggggccaaaggtgttttccctggccccccgtttctttgtttcacaaggtgggaaccttccgg

SEQ ID NO: 278981 - DNA, 665 bp, Homo sapiens
  misc_feature (26)..(26): n is a, c, g, or t
  misc_feature (34)..(34): n is a, c, g, or t
  misc_feature (42)..(42): n is a, c, g, or t
gggggcttatgaagaataacccaggncccccccnggaggtanggatatcgtcgaccacggcgctcgcgcctggtactgtggcgctccgtgaaattagacgttatcagaagtccactgaacttctgattcgcaaacttcccttccagcgtctggtgcgagaaattgctcaggactttaaaacagatctgcgcttccagagcgcagctatcggtgctttgcaggaggcaagtgaggcctatctggttggcctttttgaagacaccaacctgtgtgctatccatgccaaacgtgtaacaattatgccaaaagacatccagctagcacgccgcatacgtggagaacgtgcttaagaatccactatgatgggaaacatttcattctcaaaaaaaaaaaaaaaatttctcttcttcctgttattggtagttctgaacgttagatattttttttccatggggtcaaaaggtacctaagtatatgattgcgagtggaaaaataggggacagaaatcaggtattggcagtttttccattttcatttgtgtgtgaatttttaatataaatgcggagacgtaaagcattaatgcaagttaaaatgtttcagtgaacaagtttcagcggttcaactttataataattataaataaacctgttaaatttttctggaca

SEQ ID NO: 278982 - DNA, 1097 bp, Homo sapiens
atagcctcggtgtcagccatctttcaattgtgttcgcagccgccgccgcgccgccgtcgctctccaacgccagcgccgcctctcgctcgccgagctccagccgaaggagaaggggggtaagtaaggaggtctctgtaccatggctcgtacaaagcagactgcccgcaaatcgaccggtggtaaagcacccaggaagcaactggctacaaaagccgctcgcaagagtgcgccctctactggaggggtgaagaaacctcatcgttacaggcctggtactgtggcgctccgtgaaattagacgttatcagaagtccactgaacttctgattcgcaaacttcccttccagcgtctggtgcgagaaattgctcaggactttaaaacagatctgcgcttccagagcgcagctatcggtgctttgcaggaggcaagtgaggcctatctggttggcctttttgaagacaccaacctgtgtgctatccatgccaaacgtgtaacaattatgccaaaagacatccagctagcacgccgcatacgtggagaacgtgcttaagaatccactatgatgggaaacatttcattctcaaaaaaaaaaaaaaaatttctcttcttcctgttattggtagttctgaacgttagatattttttttccatggggtcaaaaggtacctaagtatatgattgcgagtggaaaaataggggacagaaatcaggtattggcagtttttccattttcatttgtgtgtgaatttttaatataaatgcggagacgtaaagcattaatgcaagttaaaatgtttcagtgaacaagtttcagcggttcaactttataataattataaataaacctgttaaatttttctggacaatgccagcatttggatttttttaaaacaagtaaatttcttattgatggcaactaaatggtgtttgtagcatttttatcatacagtagattccatccattcactatacttttctaactgagttgtcctacatgcaagtacatgtttttaatgttgtctgtcttctgtgctgttcctgtaagtttgctattaaaatacattaaactataaaaaaacaaaaaaaactcgaggcgg

SEQ ID NO: 278983 - DNA, 1372 bp, Homo sapiens
atagcctcggtgtcagccatctttcaattgtgttcgcagccgccgccgcgccgccgtcgctctccaacgccagcgccgcctctcgctcgccgagctccagccgaaggagaaggggggtaagtaaggaggtctctgtaccatggctcgtacaaagcagactgcccgcaaatcgaccggtggtaaagcacccaggaagcaactggctacaaaagccgctcgcaagagtgcgccctctactggaggggtgaagaaacctcatcgttacaggcctggtactgtggcgctccgtgaaattagacgttatcagaagtccactgaacttctgattcgcaaacttcccttccagcgtctggtgcgagaaattgctcaggactttaaaacagatctgcgcttccagagcgcagctatcggtgctttgcaggaggcaagtgaggcctatctggttggcctttttgaagacaccaacctgtgtgctatccatgccaaacgtgtaacaattatgccaaaagacatccagctagcacgccgcatacgtggagaacgtgcttaagaatccactatgatgggaaacatttcattctcaaaaaaaaaaaaaaaatttctcttcttcctgttattggtagttctgaacgttagatattttttttccatggggtcaaaaggtacctaagtatatgattgcgagtggaaaaataggggacagaaatcaggtattggcagtttttccattttcatttgtgtgtgaatttttaatataaatgcggagacgtaaagcattaatgcaagttaaaatgtttcagtgaacaagtttcagcggttcaactttataataattataaataaacctgttaaatttttctggacaatgccagcatttggatttttttaaaacaagtaaatttcttattgatggcaactaaatggtgtttgtagcatttttatcatacagtagattccatccattcactatacttttctaactgagttgtcctacatgcaagtacatgtttttaatgttgtctgtcttctgtgctgttcctgtaagtttgctattaaaatacattaaactatactttacttataacaacaaaaagggggcggcaaaaatcctcggggccagcttaacggtaccaggttcttgaaaagggggccaaagggagcggtataataggtaagaacggcgcggttaacacgtctagtgggaactgtcttggacttggacggaccttttgtgggtgccatttgcatcccaaggataacgcaggaattactacggatgttaacgctttggtgaattgtggtattacaccgtgatataaactaaaagagtataacaagccttatcaaaaacacgaaaaaatagaaaattata

SEQ ID NO: 278984 - DNA, 1076 bp, Homo sapiens
tcatcgctgttccagcagcgatgactcgagcgggggttcgcagccgccgccgcgccgccgtcgctctccaacgccagcgccgcctctcgctcgccgagctccagccgaaggagaaggggggtaagtaaggaggtctctgtaccatggctcgtacaaagcagactgcccgcaaatcgaccggtggtaaagcacccaggaagcaactggctacaaaagccgctcgcaagagtgcgccctctactggaggggtgaagaaacctcatcgttacaggcctggtactgtggcgctccgtgaaattagacgttatcagaagtccactgaacttctgattcgcaaacttcccttccagcgtctggtgcgagaaattgctcaggactttaaaacagatctgcgcttccagagcgcagctatcggtgctttgcaggaggcaagtgaggcctatctggttggcctttttgaagacaccaacctgtgtgctatccatgccaaacgtgtaacaattatgccaaaagacatccagctagcacgccgcatacgtggagaacgtgcttaagaatccactatgatgggaaacatttcattctcaaaaaaaaaaaaaaaatttctcttcttcctgttattggtagttctgaacgttagatattttttttccatggggtcaaaaggtacctaagtatatgattgcgagtggaaaaataggggacagaaatcaggtattggcagtttttccattttcatttgtgtgtgaatttttaatataaatgcggagacgtaaagcattaatgcaagttaaaatgtttcagtgaacaagtttcagcggttcaactttataataattataaataaacctgttaaatttttctggacaatgccagcatttggatttttttaaaacaagtaaatttcttattgatggcaactaaatggtgtttgtagcatttttatcatacagtagattccatccattcactatacttttctaactgagttgtcctacatgcaagtacatgtttttaatgttgtctgtcttctgtgctgttcctgtaagtttgctattaaaatacattaaactata

SEQ ID NO: 278985 - DNA, 1043 bp, Homo sapiens
atagcctcggtgtcagccatctttcaattgtgttcgcagccgccgccgcgccgccgtcgctctccaacgccagcgccgcctctcgctcgccgagctccagccgaaggagaaggggggtaagtaaggaggtctctgtaccatggctcgtacaaagcagactgcccgcaaatcgaccggtggtaaagcacccaggaagcaactggctacaaaagccgctcgcaagagtgcgccctctactggaggggtgaagaaacctcatcgttacaggcctggtactgtggcgctccgtgaaattagacgttatcagaagtccactgaacttctgattcgcaaacttcccttccagcgtctggtgcgagaaattgctcaggactttaaaacagatctgcgcttccagagcgcagctatcggtgctttgcaggaggcaagtgaggcctatctggttggcctttttgaagacaccaacctgtgtgctatccatgccaaacgtgtaacaattatgccaaaagacatccagctagcacgccgcatacgtggagaacgtgcttaagaatccactatgatgggaaacatttcattctcaaaaaaaaaaaaaaaatttctcttcttcctgttattggtagttctgaacgttagatattttttttccatggggtcaaaaggtacctaagtatatgattgcgagtggaaaaataggggacagaaatcaggtattggcagtttttccattttcatttgtgtgtgaatttttaatataaatgcggagacgtaaagcattaatgcaagttaaaatgtttcagtgaacaagtttcagcggttcaactttataataattataaataaacctgttaaatttttctggacaatgccagcatttggattttttttcatacagtagattccatccattcactatacttttctaactgagttgtcctacatgcaagtacatgtttttaatgttgtctgtcttctgtgctgttcctgtaagtttgctattaaaatacattaaactataaaaaaacaaaaaaaactcgaggcgg

SEQ ID NO: 278986 - DNA, 1085 bp, Homo sapiens
gcggccgcccccggggagcccggcgggcgccggcgcgcccccccccacccccaccccacgtctccgccgtcgctctccaacgccagcgccgcctctcgctcgccgagctccagccgaaggagaaggggggtaagtaaggaggtctctgtaccatggctcgtacaaagcagactgcccgcaaatcgaccggtggtaaagcacccaggaagcaactggctacaaaagccgctcgcaagagtgcgccctctactggaggggtgaagaaacctcatcgttacaggcctggtactgtggcgctccgtgaaattagacgttatcagaagtccactgaacttctgattcgcaaacttcccttccagcgtctggtgcgagaaattgctcaggactttaaaacagatctgcgcttccagagcgcagctatcggtgctttgcaggaggcaagtgaggcctatctggttggcctttttgaagacaccaacctgtgtgctatccatgccaaacgtgtaacaattatgccaaaagacatccagctagcacgccgcatacgtggagaacgtgcttaagaatccactatgatgggaaacatttcattctcaaaaaaaaaaaaaaaatttctcttcttcctgttattggtagttctgaacgttagatattttttttccatggggtcaaaaggtacctaagtatatgattgcgagtggaaaaataggggacagaaatcaggtattggcagtttttccattttcatttgtgtgtgaatttttaatataaatgcggagacgtaaagcattaatgcaagttaaaatgtttcagtgaacaagtttcagcggttcaactttataataattataaataaacctgttaaatttttctggacaatgccagcatttggatttttttaaaacaagtaaatttcttattgatggcaactaaatggtgtttgtagcatttttatcatacagtagattccatccattcactatacttttctaactgagttgtcctacatgcaagtacatgtttttaatgttgtctgtcttctgtgctgttcctgtaagtttgctattaaaatacattaaactata

SEQ ID NO: 278987 - DNA, 635 bp, Homo sapiens
atagcctcggtgtcagccatctttcaattgtgttcgcagccgccgccgcgccgccgtcgctctccaacgccagcgccgcctctcgctcgccgagctccagccgaaggagaaggggggtaagtaaggaggtctctgtaccatggctcgtacaaagcagactgcccgcaaatcgaccggtggtaaagcacccaggaagcaactggctacaaaagccgctcgcaagagtgcgccctctactggaggggtgaagaaacctcatcgttacaggcctggtactgtggcgctccgtgaaattagacgttatcagaagtccactgaacttctgattcgcaaacttcccttccagcgtctggtgcgagaaattgctcaggactttaaaacagatctgcgcttccagagcgcagctatcggtgctttgcaggaggcaagtgaggcctatctggttggcctttttgaagacaccaacctgtgtgctatccatgccaaacgtgtaacaattatgccaaaagacatccagctagcacgccgcatacgtggagaacgtgcttaagaatccactatgatgggaaacatttcattctcaaaaaaaaaaaaaaagagaaataactcgagactagttctctctctctctctcc

SEQ ID NO: 278988 - DNA, 988 bp, Homo sapiens
tatgagggctgctagaagacgacagaaggggggtaagtaaggaggtctctgtaccatggctcgtacaaagcagactgcccgcaaatcgaccggtggtaaagcacccaggaagcaactggctacaaaagccgctcgcaagagtgcgccctctactggaggggtgaagaaacctcatcgttacaggcctggtactgtggcgctccgtgaaattagacgttatcagaagtccactgaacttctgattcgcaaacttcccttccagcgtctggtgcgagaaattgctcaggactttaaaacagatctgcgcttccagagcgcagctatcggtgctttgcaggaggcaagtgaggcctatctggttggcctttttgaagacaccaacctgtgtgctatccatgccaaacgtgtaacaattatgccaaaagacatccagctagcacgccgcatacgtggagaacgtgcttaagaatccactatgatgggaaacatttcattctcaaaaaaaaaaaaaaaatttctcttcttcctgttattggtagttctgaacgttagatattttttttccatggggtcaaaaggtacctaagtatatgattgcgagtggaaaaataggggacagaaatcaggtattggcagtttttccattttcatttgtgtgtgaatttttaatataaatgcggagacgtaaagcattaatgcaagttaaaatgtttcagtgaacaagtttcagcggttcaactttataataattataaataaacctgttaaatttttctggacaatgccagcatttggatttttttaaaacaagtaaatttcttattgatggcaactaaatggtgtttgtagcatttttatcatacagtagattccatccattcactatacttttctaactgagttgtcctacatgcaagtacatgtttttaatgttgtctgtcttctgtgctgttcctgtaagtttgctattaaaatacattaaactata

SEQ ID NO: 278989 - DNA, 1008 bp, Homo sapiens
ttctagagtatcccccttgctggcgcagagcagctagccagaagagaggggggtaagtaaggaggtctctgtaccatggctcgtacaaagcagactgcccgcaaatcgaccggtggtaaagcacccaggaagcaactggctacaaaagccgctcgcaagagtgcgccctctactggaggggtgaagaaacctcatcgttacaggcctggtactgtggcgctccgtgaaattagacgttatcagaagtccactgaacttctgattcgcaaacttcccttccagcgtctggtgcgagaaattgctcaggactttaaaacagatctgcgcttccagagcgcagctatcggtgctttgcaggaggcaagtgaggcctatctggttggcctttttgaagacaccaacctgtgtgctatccatgccaaacgtgtaacaattatgccaaaagacatccagctagcacgccgcatacgtggagaacgtgcttaagaatccactatgatgggaaacatttcattctcaaaaaaaaaaaaaaaatttctcttcttcctgttattggtagttctgaacgttagatattttttttccatggggtcaaaaggtacctaagtatatgattgcgagtggaaaaataggggacagaaatcaggtattggcagtttttccattttcatttgtgtgtgaatttttaatataaatgcggagacgtaaagcattaatgcaagttaaaatgtttcagtgaacaagtttcagcggttcaactttataataattataaataaacctgttaaatttttctggacaatgccagcatttggatttttttaaaacaagtaaatttcttattgatggcaactaaatggtgtttgtagcatttttatcatacagtagattccatccattcactatacttttctaactgagttgtcctacatgcaagtacatgtttttaatgttgtctgtcttctgtgctgttcctgtaagtttgctattaaaatacattaaactata

SEQ ID NO: 278990 - DNA, 1073 bp, Homo sapiens
tgagaatgaaatgtttcccatcatagtggattcttaagcacgttctccacgtatgcggcgtgctagctggatgtcttttggcataattgttacacgtttggcatggatagcacacaggttggtgtcttcaaaaggccaaccagataggcctcacttgccctgcccgcaaatcgaccggtggtaaagcacccaggaagcaactggctacaaaagccgctcgcaagagtgcgccctctactggaggggtgaagaaacctcatcgttacaggcctggtactgtggcgctccgtgaaattagacgttatcagaagtccactgaacttctgattcgcaaacttcccttccagcgtctggtgcgagaaattgctcaggactttaaaacagatctgcgcttccagagcgcagctatcggtgctttgcaggaggcaagtgaggcctatctggttggcctttttgaagacaccaacctgtgtgctatccatgccaaacgtgtaacaattatgccaaaagacatccagctagcacgccgcatacgtggagaacgtgcttaagaatccactatgatgggaaacatttcattctcaaaaaaaaaaaaaaaatttctcttcttcctgttattggtagttctgaacgttagatattttttttccatggggtcaaaaggtacctaagtatatgattgcgagtggaaaaataggggacagaaatcaggtattggcagtttttccattttcatttgtgtgtgaatttttaatataaatgcggagacgtaaagcattaatgcaagttaaaatgtttcagtgaacaagtttcagcggttcaactttataataattataaataaacctgttaaatttttctggacaatgccagcatttggatttttttaaaacaagtaaatttcttattgatggcaactaaatggtgtttgtagcatttttatcatacagtagattccatccattcactatacttttctaactgagttgtcctacatgcaagtacatgtttttaatgttgtctgtcttctgtgctgttcctgtaagtttgctattaaaatacattaaactata

SEQ ID NO: 278991 - DNA, 917 bp, Homo sapiens
atttgtaatgtacaggatgggcttttttaaacgggtccggccacctcaagaagaacaagaaagggagcagcttcaacctcatgaaaatggtgaagaaacctcatcgttacaggcctggtactgtggcgctccgtgaaattagacgttatcagaagtccactgaacttctgattcgcaaacttcccttccagcgtctggtgcgagaaattgctcaggactttaaaacagatctgcgcttccagagcgcagctatcggtgctttgcaggaggcaagtgaggcctatctggttggcctttttgaagacaccaacctgtgtgctatccatgccaaacgtgtaacaattatgccaaaagacatccagctagcacgccgcatacgtggagaacgtgcttaagaatccactatgatgggaaacatttcattctcaaaaaaaaaaaaaaaatttctcttcttcctgttattggtagttctgaacgttagatattttttttccatggggtcaaaaggtacctaagtatatgattgcgagtggaaaaataggggacagaaatcaggtattggcagtttttccattttcatttgtgtgtgaatttttaatataaatgcggagacgtaaagcattaatgcaagttaaaatgtttcagtgaacaagtttcagcggttcaactttataataattataaataaacctgttaaatttttctggacaatgccagcatttggatttttttaaaacaagtaaatttcttattgatggcaactaaatggtgtttgtagcatttttatcatacagtagattccatccattcactatacttttctaactgagttgtcctacatgcaagtacatgtttttaatgttgtctgtcttctgtgctgttcctgtaagtttgctattaaaatacattaaactata

SEQ ID NO: 278992 - DNA, 1060 bp, Homo sapiens
atagcctcggtgtcagccatctttcaattgtgttcgcagccgccgccgcgccgccgtcgctctccaacgccagcgccgcctctcgctcgccgagctccagccgaaggagaaggggggtaagtaaggaggtctctgtaccatggctcgtacaaagcagactgcccgcaaatcgaccggtggtaaagcacccaggaagcaactggctacaaaagccgctcgcaagagtgcgccctctactggaggggtgaagaaacctcatcgttacaggcctggtactgtggcgctccgtgaaattagacgttatcagaagtccactgaacttctgattcgcaaacttcccttccagcgtctggtgcgagaaattgctcaggactttaaaacagatctgcgcttccagagcgcagctatcggtgctttgcagacaccaacctgtgtgctatccatgccaaacgtgtaacaattatgccaaaagacatccagctagcacgccgcatacgtggagaacgtgcttaagaatccactatgatgggaaacatttcattctcaaaaaaaaaaaaaaaatttctcttcttcctgttattggtagttctgaacgttagatattttttttccatggggtcaaaaggtacctaagtatatgattgcgagtggaaaaataggggacagaaatcaggtattggcagtttttccattttcatttgtgtgtgaatttttaatataaatgcggagacgtaaagcattaatgcaagttaaaatgtttcagtgaacaagtttcagcggttcaactttataataattataaataaacctgttaaatttttctggacaatgccagcatttggatttttttaaaacaagtaaatttcttattgatggcaactaaatggtgtttgtagcatttttatcatacagtagattccatccattcactatacttttctaactgagttgtcctacatgcaagtacatgtttttaatgttgtctgtcttctgtgctgttcctgtaagtttgctattaaaatacattaaactataaaaaaacaaaaaaaactcgaggcgg

SEQ ID NO: 278993 - DNA, 3471 bp, Homo sapiens
acgccaccactggaacccgggggaagatggcggcagccgttctgagtgggccctctgcgggctccgcggctggggttcctggcgggaccgggggtctctcggcagtgagctcgggcccgcggctccgcctgctgctgctggagagtgtttctggtttgctgcaacctcgaacggggtctgccgttgctccggtgcatcccccaaaccgctcggccccacatttgcccgggctcatgtgcctattgcggctgcatgggtcggtgggcggggcccagaacctttcagctcttggggcattggtgagtctcagtaatgcacgtctcagttccatcaaaactcggtttgagggcctgtgtctgctgtccctgctggtaggggagagccccacagagctattccagcagcactgtgtgtcttggcttcggagcattcagcaggtgttacagacccaggacccgcctgccacaatggagctggccgtggctgtcctgagggacctcctccgatatgcagcccagctgcctgcactgttccgggacatctccatgaaccacctccctggccttctcacctccctgctgggcctcaggccagagtgtgagcagtcagcattggaaggaatgaaggcttgtatgacctatttccctcgggcttgtggttctctcaaaggcaagctggcctcattttttctgtctagggtggatgccttgagccctcagctccaacagttggcctgtgagtgttattcccggctgccctctttaggggctggcttttcccaaggcctgaagcacaccgagagctgggagcaggagctacacagtctgctggcctcactgcacaccctgctgggggccctgtacgagggagcagagactgctcctgtgcagaatgaaggccctggggtggagatgctgctgtcctcagaagatggtgatgcccatgtccttctccagcttcggcagaggttttcgggactggcccgctgcctagggctcatgctcagctctgagtttggagctcccgtgtccgtccctgtgcaggaaatcctggatttcatctgccggaccctcagcgtcagtagcaagaatattagcttgcatggagatggtcccctgcggctgctgctgctgccctctatccaccttgaggccttggacctgctgtctgcactcatcctcgcgtgtggaagccggctcttgcgctttgggatcctgatcggccgcctgcttccccaggtcctcaattcctggagcatcggtagagattccctctctccaggccaggagaggccttacagcacggttcggaccaaggtgtatgcgatattagagctgtgggtgcaggtttgtggggcctcggcgggaatgcttcagggaggagcctctggagaggccctgctcacccacctgctcagcgacatctccccgccagctgatgcccttaagctgcgtagcccgcgggggagccctgatgggagtttgcagactgggaagcctagcgcccccaagaagctaaagctggatgtgggggaagctatggccccgccaagccaccggaaaggggatagcaatgccaacagcgacgtgtgtgcggctgcactcagaggcctcagccggaccatcctcatgtgtgggcctctcatcaaggaggagactcacaggagactgcatgacctggtcctccccctggtcatgggtgtacagcagggtgaggtcctaggcagctccccgtacacgagctcccgctgccgccgtgaactctactgcctgctgctggcgctgctgctggccccgtctcctcgctgcccacctcctcttgcctgtgccctgcaagccttctccctcggccagcgagaagatagccttgaggtctcctctttctgctcagaagcactggtgacctgtgctgctctgacccacccccgggttcctcccctgcagcccatgggccccacctgccccacacctgctccagttccccctcctgaggccccatcgcccttcagggccccaccgttccatcctccgggccccatgccctcagtgggctccatgccctcagcaggccccatgccttcagcaggccccatgccctcagcaggccctgtgccctcggcacgccctggacctcccaccacagccaaccacctaggcctttctgtcccaggcctagtgtctgtccctccccggcttcttcctggccctgagaaccaccgggcaggctcaaatgaggaccccatccttgcccctagtgggactcccccacctactatacccccagatgaaacttttggggggagagtgcccagaccagcctttgtccactatgacaaggaggaggcatctgatgtggagatctccttggaaagtgactctgatgacagcgtggtgatcgtgcccgaggggcttccccccctgccacccccaccaccctcaggtgccacaccaccccctatagcccccactgggccaccaacagcctcccctcctgtgccagcgaaggaggagcctgaagaacttcctgcagccccagggcctctcccgccacccccacctccgccgccgcctgttcctggtcctgtgacgctccctccaccccagttggtccctgaagggactcctggtgggggaggacccccagccctggaagaggatttgacagttattaatatcaacagcagtgatgaagaggaggaggaagaggaagaagaggaagaagaagaagaggaagaagaggaagaggaggaagactttgaggaagaggaagaggatgaagaggaatattttgaagaggaagaagaggaggaagaagagtttgaggaagaatttgaggaagaagaaggtgagttagaggaagaagaagaagaggaggatgaggaggaggaagaagaactggaagaggtggaagacctggagtttggcacagcaggaggggaggtagaagaaggtgcacctccacccccaaccctgcctccagctctgcctccccctgagtctcccccaaaggtgcagccagaacccgaacccgaacccgggctgcttttggaagtggaggagccagggacggaggaggagcgtggggctgacacagctcccaccctggcccctgaagcgctcccctcccagggagaggtggagagggaaggggaaagccctgcggcagggccccctccccaggagcttgttgaagaagagccctctgctcccccaaccctgttggaagaggagactgaggatgggagtgacaaggtgcagcccccaccagagacacctgcagaagaagagatggagacagagacagaggccgaagctctccaggaaaaggagcaggatgacacagctgccatgctggccgacttcatcgattgtccccctgatgatgagaagccaccacctcccacagagcctgactcctagccatcttctgcaccccactctttgtttccaataaagttatgtccttagatag

SEQ ID NO: 278994 - DNA, 3930 bp, Homo sapiens
  misc_feature (1405)..(1405): n is a, c, g, or t
acgccaccactggaacccgggggaagatggcggcagccgttctgagtgggccctctgcgggctccgcggctggggttcctggcgggaccgggggtctctcggcagtgagctcgggcccgcggctccgcctgctgctgctggagagtgtttctggtttgctgcaacctcgaacggggtctgccgttgctccggtgcatcccccaaaccgctcggccccacatttgcccgggctcatgtgcctattgcggctgcatgggtcggtgggcggggcccagaacctttcagctcttggggcattggtgagtctcagtaatgcacgtctcagttccatcaaaactcggtttgagggcctgtgtctgctgtccctgctggtaggggagagccccacagagctattccagcagcactgtgtgtcttggcttcggagcattcagcaggtgttacagacccaggacccgcctgccacaatggagctggccgtggctgtcctgagggacctcctccgatatgcagcccagctgcctgcactgttccgggacatctccatgaaccacctccctggccttctcacctccctgctgggcctcaggccagagtgtgagcagtcagcattggaaggaatgaaggcttgtatgacctatttccctcgggcttgtggttctctcaaaggcaagctggcctcattttttctgtctagggtggatgccttgagccctcagctccaacagttggcctgtgagtgttattcccggctgccctctttaggggctggcttttcccaaggcctgaagcacaccgagagctgggagcaggagctacacagtctgctggcctcactgcacaccctgctgggggccctgtacgagggagcagagactgctcctgtgcagaatgaaggccctggggtggagatgctgctgtcctcagaagatggtgatgcccatgtccttctccagcttcggcagaggttttcgggactggcccgctgcctagggctcatgctcagctctgagtttggagctcccgtgtccgtccctgtgcaggaaatcctggatttcatctgccggaccctcagcgtcagtagcaagaatattgtaagtgggatttgtcatctcttcagagcccttgctcaggataccaggcaaccaggaaagtactggggacctgagtctccccaaacagtgtcatcctggagtcgtcccagagagcttctacttttgtccaaataacatcacttcctatgtgtcgtgacacaggagcacagtgtcagagtgtagcaaatgcttccttgggggagggtgaatttggggatcagctgagtcattgctgagaggcccagccatccttcttaccttccatccagggtctattttagaggataggggtttgattttgttgggagagntgagatcaggggttgggtttcttacctatgtgtacatatgtaaatggtcattccctgtttctgtctctctctggctctcactttcttcctccactctttatctctgccccttttttctccagagcttgcatggagatggtcccctgcggctgctgctgctgccctctatccaccttgaggccttggacctgctgtctgcactcatcctcgcgtgtggaagccggctcttgcgctttgggatcctgatcggccgcctgcttccccaggtcctcaattcctggagcatcggtagagattccctctctccaggccaggagaggccttacagcacggttcggaccaaggtgtatgcgatattagagctgtgggtgcaggtttgtggggcctcggcgggaatgcttcagggaggagcctctggagaggccctgctcacccacctgctcagcgacatctccccgccagctgatgcccttaagctgcgtagcccgcgggggagccctgatgggagtttgcagactgggaagcctagcgcccccaagaagctaaagctggatgtgggggaagctatggccccgccaagccaccggaaaggggatagcaatgccaacagcgacgtgtgtgcggctgcactcagaggcctcagccggaccatcctcatgtgtgggcctctcatcaaggaggagactcacaggagactgcatgacctggtcctccccctggtcatgggtgtacagcagggtgaggtcctaggcagctccccgtacacgagctcccgctgccgccgtgaactctactgcctgctgctggcgctgctgctggccccgtctcctcgctgcccacctcctcttgcctgtgccctgcaagccttctccctcggccagcgagaagatagccttgaggtctcctctttctgctcagaagcactggtgacctgtgctgctctgacccacccccgggttcctcccctgcagcccatgggccccacctgccccacacctgctccagttccccctcctgaggccccatcgcccttcagggccccaccgttccatcctccgggccccatgccctcagtgggctccatgccctcagcaggccccatgccttcagcaggccccatgccctcagcaggccctgtgccctcggcacgccctggacctcccaccacagccaaccacctaggcctttctgtcccaggcctagtgtctgtccctccccggcttcttcctggccctgagaaccaccgggcaggctcaaatgaggaccccatccttgcccctagtgggactcccccacctactatacccccagatgaaacttttggggggagagtgcccagaccagcctttgtccactatgacaaggaggaggcatctgatgtggagatctccttggaaagtgactctgatgacagcgtggtgatcgtgcccgaggggcttccccccctgccacccccaccaccctcaggtgccacaccaccccctatagcccccactgggccaccaacagcctcccctcctgtgccagcgaaggaggagcctgaagaacttcctgcagccccagggcctctcccgccacccccacctccgccgccgcctgttcctggtcctgtgacgctccctccaccccagttggtccctgaagggactcctggtgggggaggacccccagccctggaagaggatttgacagttattaatatcaacagcagtgatgaagaggaggaggaagaggagaagaggaagaagaagaagaagaagaagaagaggaagaagaagaagaggaagaagaggaagaggaggaagactttgaggaagaggaagaggatgaagaggaatattttgaagaggaagaagaggaggaagaagagtttgaggaagaatttgaggaagaagaaggtgagttagaggaagaagaagaagaggaggatgaggaggaggaagaagaactggaagaggtggaagacctggagtttggcacagcaggaggggaggtagaagaaggtgcacctccacccccaaccctgcctccagctctgcctccccctgagtctcccccaaaggtgcagccagaacccgaacccgaacccgggctgcttttggaagtggaggagccagggacggaggaggagcgtggggctgacacagctcccaccctggcccctgaagcgctcccctcccagggagaggtggagagggaaggggaaagccctgcggcagggccccctccccaggagcttgttgaagaagagccctctgctcccccaaccctgttggaagaggagactgaggatgggagtgacaaggtgcagcccccaccagagacacctgcagaagaagagatggagacagagacagaggccgaagctctccaggaaaaggagcaggatgacacagctgccatgctggccgacttcatcgattgtccccctgatgatgagaagccaccacctcccacagagcctgactcctagccatcttctgcaccccactctttgtttccaataaagttatgtccttagatag

SEQ ID NO: 278995 - DNA, 3241 bp, Homo sapiens
acgccaccactggaacccgggggaagatggcggcagccgttctgagtgggccctctgcgggctccgcggctggggttcctggcgggaccgggggtctctcggcagtgagctcgggcccgcggctccgcctgctgctgctggagagtgtttctggtttgctgcaacctcgaacggggtctgccgttgctccggtgcatcccccaaaccgctcggccccacatttgcccgggctcatgtgcctattgcggctgcatgggtcggtgggcggggcccagaacctttcagctcttggggcattggtgagtctcagtaatgcacgtctcagttccatcaaaactcggtttgagggcctgtgtctgctgtccctgctggtaggggagagccccacagagctattccagcagcactgtgtgtcttggcttcggagcattcagcaggtgttacagacccaggacccgcctgccacaatggagctggccgtggctgtcctgagggacctcctccgatatgcagcccagctgcctgcactgttccgggacatctccatgaaccacctccctggccttctcacctccctgctgggcctcaggccagagtgtgagcagtcagcattggaaggaatgaaggcttgtatgacctatttccctcgggcttgtggttctctcaaaggcaagctggcctcattttttctgtctagggtggatgccttgagccctcagctccaacagttggcctgtgagtgttattcccggctgccctctttaggggctggcttttcccaaggcctgaagcacaccgagagctgggagcaggagctacacagtctgctggcctcactgcacaccctgctgggggccctgtacgagggagcagagactgctcctgtgcagaatgaaggccctggggtggagatgctgctgtcctcagaagatggtgatgcccatgtccttctccagcttcggcagaggttttcgggactggcccgctgcctagggctcatgctcagctctgagtttggagctcccgtgtccgtccctgtgcaggaaatcctggatttcatctgccggaccctcagcgtcagtagcaagaatattagcttgcatggagatggtcccctgcggctgctgctgctgccctctatccaccttgaggccttggacctgctgtctgcactcatcctcgcgtgtggaagccggctcttgcgctttgggatcctgatcggccgcctgcttccccaggtcctcaattcctggagcatcggtagagattccctctctccaggccaggagaggccttacagcacggttcggaccaaggtgtatgcgatattagagctgtgggtgcaggtttgtggggcctcggcgggaatgcttcagggaggagcctctggagaggccctgctcacccacctgctcagcgacatctccccgccagctgatgcccttaagctgcgtagcccgcgggggagccctgatgggagtttgcagactgggaagcctagcgcccccaagaagctaaagctggatgtgggggaagctatggccccgccaagccacctcctcttgcctgtgccctgcaagccttctccctcggccagcgagaagatagccttgaggtctcctctttctgctcagaagcactggtgacctgtgctgctctgacccacccccgggttcctcccctgcagcccatgggccccacctgccccacacctgctccagttccccctcctgaggccccatcgcccttcagggccccaccgttccatcctccgggccccatgccctcagtgggctccatgccctcagcaggccccatgccttcagcaggccccatgccctcagcaggccctgtgccctcggcacgccctggacctcccaccacagccaaccacctaggcctttctgtcccaggcctagtgtctgtccctccccggcttcttcctggccctgagaaccaccgggcaggctcaaatgaggaccccatccttgcccctagtgggactcccccacctactatacccccagatgaaacttttggggggagagtgcccagaccagcctttgtccactatgacaaggaggaggcatctgatgtggagatctccttggaaagtgactctgatgacagcgtggtgatcgtgcccgaggggcttccccccctgccacccccaccaccctcaggtgccacaccaccccctatagcccccactgggccaccaacagcctcccctcctgtgccagcgaaggaggagcctgaagaacttcctgcagccccagggcctctcccgccacccccacctccgccgccgcctgttcctggtcctgtgacgctccctccaccccagttggtccctgaagggactcctggtgggggaggacccccagccctggaagaggatttgacagttattaatatcaacagcagtgatgaagaggaggaggaagaggagaagaggaagaagaagaagaagaagaagaagaggaagaagaagaagaggaagaagaggaagaggaggaagactttgaggaagaggaagaggatgaagaggaatattttgaagaggaagaagaggaggaagaagagtttgaggaagaatttgaggaagaagaaggtgagttagaggaagaagaagaagaggaggatgaggaggaggaagaagaactggaagaggtggaagacctggagtttggcacagcaggaggggaggtagaagaaggtgcacctccacccccaaccctgcctccagctctgcctccccctgagtctcccccaaaggtgcagccagaacccgaacccgaacccgggctgcttttggaagtggaggagccagggacggaggaggagcgtggggctgacacagctcccaccctggcccctgaagcgctcccctcccagggagaggtggagagggaaggggaaagccctgcggcagggccccctccccaggagcttgttgaagaagagccctctgctcccccaaccctgttggaagaggagactgaggatgggagtgacaaggtgcagcccccaccagagacacctgcagaagaagagatggagacagagacagaggccgaagctctccaggaaaaggagcaggatgacacagctgccatgctggccgacttcatcgattgtccccctgatgatgagaagccaccacctcccacagagcctgactcctagccatcttctgcaccccactctttgtttccaataaagttatgtccttagatag

SEQ ID NO: 278996 - DNA, 584 bp, Homo sapiens
agctcacttgatttgaaccctaccttttccagctcccagatgtcctattccaccctgggattacctctgctcccttctttctttgcttcttccacctcattccaagtatttcaggagttggaaaccacagtggatctggggatgaagtcttgctgtagcctagtgagaataaaagagcagtcactttctctgaagtctagcctccgcccacttaacatgactctcttctttctttgaaggtttgagggcctgtgtctgctgtccctgctggtaggggagagccccacagagctattccagcagcactgtgtgtcttggcttcggagcattcagcaggtgttacagacccaggacccgcctgccacaatggagctggccgtggctgtcctgagggacctcctccgatatgcagcccagctgcctgcactgttccgggacatctccatgaaccacctccctggccttctcacctccctgctgggcctcaggccagaggtgagatgtctccctggacccttccccatggccccccgcagtcctcaccttcacacactgtttaattgtttgatggaagtgattgggga

SEQ ID NO: 278997 - DNA, 3320 bp, Homo sapiens
acgccaccactggaacccgggggaagatggcggcagccgttctgagtgggccctctgcgggctccgcggctggggttcctggcgggaccgggggtctctcggcagtgagctcgggcccgcggctccgcctgctgctgctggagagtgtttctggtttgctgcaacctcgaacggggtctgccgttgctccggtgcatcccccaaaccgctcggccccacatttgcccgggctcatgtgcctattgcggctgcatgggtcggtgggcggggcccagaacctttcagctcttggggcattggtgagtctcagtaatgcacgtctcagttccatcaaaactcggtttgagggcctgtgtctgctgtccctgctggtaggggagagccccacagagctattccagcagcactgtgtgtcttggcttcggagcattcagcaggtgttacagacccaggacccgcctgccacaatggagctggccgtggctgtcctgagggacctcctccgatatgcagcccagctgcctgcactgttccgggacatctccatgaaccacctccctggccttctcacctccctgctgggcctcaggccagagtgtgagcagtcagcattggaaggaatgaaggcttgtatgacctatttccctcgggcttgtggttctctcaaaggcaagctggcctcattttttctgtctagggtggatgccttgagccctcagctccaacagctcctgtgcagaatgaaggccctggggtggagatgctgctgtcctcagaagatggtgatgcccatgtccttctccagcttcggcagaggttttcgggactggcccgctgcctagggctcatgctcagctctgagtttggagctcccgtgtccgtccctgtgcaggaaatcctggatttcatctgccggaccctcagcgtcagtagcaagaatattagcttgcatggagatggtcccctgcggctgctgctgctgccctctatccaccttgaggccttggacctgctgtctgcactcatcctcgcgtgtggaagccggctcttgcgctttgggatcctgatcggccgcctgcttccccaggtcctcaattcctggagcatcggtagagattccctctctccaggccaggagaggccttacagcacggttcggaccaaggtgtatgcgatattagagctgtgggtgcaggtttgtggggcctcggcgggaatgcttcagggaggagcctctggagaggccctgctcacccacctgctcagcgacatctccccgccagctgatgcccttaagctgcgtagcccgcgggggagccctgatgggagtttgcagactgggaagcctagcgcccccaagaagctaaagctggatgtgggggaagctatggccccgccaagccaccggaaaggggatagcaatgccaacagcgacgtgtgtgcggctgcactcagaggcctcagccggaccatcctcatgtgtgggcctctcatcaaggaggagactcacaggagactgcatgacctggtcctccccctggtcatgggtgtacagcagggtgaggtcctaggcagctccccgtacacgagctcccgctgccgccgtgaactctactgcctgctgctggcgctgctgctggccccgtctcctcgctgcccacctcctcttgcctgtgccctgcaagccttctccctcggccagcgagaagatagccttgaggtctcctctttctgctcagaagcactggtgacctgtgctgctctgacccacccccgggttcctcccctgcagcccatgggccccacctgccccacacctgctccagttccccctcctgaggccccatcgcccttcagggccccaccgttccatcctccgggccccatgccctcagtgggctccatgccctcagcaggccccatgccttcagcaggccccatgccctcagcaggccctgtgccctcggcacgccctggacctcccaccacagccaaccacctaggcctttctgtcccaggcctagtgtctgtccctccccggcttcttcctggccctgagaaccaccgggcaggctcaaatgaggaccccatccttgcccctagtgggactcccccacctactatacccccagatgaaacttttggggggagagtgcccagaccagcctttgtccactatgacaaggaggaggcatctgatgtggagatctccttggaaagtgactctgatgacagcgtggtgatcgtgcccgaggggcttccccccctgccacccccaccaccctcaggtgccacaccaccccctatagcccccactgggccaccaacagcctcccctcctgtgccagcgaaggaggagcctgaagaacttcctgcagccccagggcctctcccgccacccccacctccgccgccgcctgttcctggtcctgtgacgctccctccaccccagttggtccctgaagggactcctggtgggggaggacccccagccctggaagaggatttgacagttattaatatcaacagcagtgatgaagaggaggaggaagaggaagaagaggaagaagaagaagaggaagaagaggaagaggaggaagactttgaggaagaggaagaggatgaagaggaatattttgaagaggaagaagaggaggaagaagagtttgaggaagaatttgaggaagaagaaggtgagttagaggaagaagaagaagaggaggatgaggaggaggaagaagaactggaagaggtggaagacctggagtttggcacagcaggaggggaggtagaagaaggtgcacctccacccccaaccctgcctccagctctgcctccccctgagtctcccccaaaggtgcagccagaacccgaacccgaacccgggctgcttttggaagtggaggagccagggacggaggaggagcgtggggctgacacagctcccaccctggcccctgaagcgctcccctcccagggagaggtggagagggaaggggaaagccctgcggcagggccccctccccaggagcttgttgaagaagagccctctgctcccccaaccctgttggaagaggagactgaggatgggagtgacaaggtgcagcccccaccagagacacctgcagaagaagagatggagacagagacagaggccgaagctctccaggaaaaggagcaggatgacacagctgccatgctggccgacttcatcgattgtccccctgatgatgagaagccaccacctcccacagagcctgactcctagccatcttctgcaccccactctttgtttccaataaagttatgtccttagatag

SEQ ID NO: 278998 - DNA, 3158 bp, Homo sapiens
atttacactcagttccatcaaaactcggtttgagggcctgtgtctgctgtccctgctggtaggggagagccccacagagctattccagcagcactgtgtgtcttggcttcggagcattcagcaggtgttacagacccaggacccgcctgccacaatggagctggccgtggctgtcctgagggacctcctccgatatgcagcccagctgcctgcactgttccgggacatctccatgaaccacctccctggccttctcacctccctgctgggcctcaggccagagtgtgagcagtcagcattggaaggaatgaaggcttgtatgacctatttccctcgggcttgtggttctctcaaaggcaagctggcctcattttttctgtctagggtggatgccttgagccctcagctccaacagttggcctgtgagtgttattcccggctgccctctttaggggctggcttttcccaaggcctgaagcacaccgagagctgggagcaggagctacacagtctgctggcctcactgcacaccctgctgggggccctgtacgagggagcagagactgctcctgtgcagaatgaaggccctggggtggagatgctgctgtcctcagaagatggtgatgcccatgtccttctccagcttcggcagaggttttcgggactggcccgctgcctagggctcatgctcagctctgagtttggagctcccgtgtccgtccctgtgcaggaaatcctggatttcatctgccggaccctcagcgtcagtagcaagaatattagcttgcatggagatggtcccctgcggctgctgctgctgccctctatccaccttgaggccttggacctgctgtctgcactcatcctcgcgtgtggaagccggctcttgcgctttgggatcctgatcggccgcctgcttccccaggtcctcaattcctggagcatcggtagagattccctctctccaggccaggagaggccttacagcacggttcggaccaaggtgtatgcgatattagagctgtgggtgcaggtttgtggggcctcggcgggaatgcttcagggaggagcctctggagaggccctgctcacccacctgctcagcgacatctccccgccagctgatgcccttaagctgcgtagcccgcgggggagccctgatgggagtttgcagactgggaagcctagcgcccccaagaagctaaagctggatgtgggggaagctatggccccgccaagccaccggaaaggggatagcaatgccaacagcgacgtgtgtgcggctgcactcagaggcctcagccggaccatcctcatgtgtgggcctctcatcaaggaggagactcacaggagactgcatgacctggtcctccccctggtcatgggtgtacagcagggtgaggtcctaggcagctccccgtacacgagctcccgctgccgccgtgaactctactgcctgctgctggcgctgctgctggccccgtctcctcgctgcccacctcctcttgcctgtgccctgcaagccttctccctcggccagcgagaagatagccttgaggtctcctctttctgctcagaagcactggtgacctgtgctgctctgacccacccccgggttcctcccctgcagcccatgggccccacctgccccacacctgctccagttccccctcctgaggccccatcgcccttcagggccccaccgttccatcctccgggccccatgccctcagtgggctccatgccctcagcaggccccatgccttcagcaggccccatgccctcagcaggccctgtgccctcggcacgccctggacctcccaccacagccaaccacctaggcctttctgtcccaggcctagtgtctgtccctccccggcttcttcctggccctgagaaccaccgggcaggctcaaatgaggaccccatccttgcccctagtgggactcccccacctactatacccccagatgaaacttttggggggagagtgcccagaccagcctttgtccactatgacaaggaggaggcatctgatgtggagatctccttggaaagtgactctgatgacagcgtggtgatcgtgcccgaggggcttccccccctgccacccccaccaccctcaggtgccacaccaccccctatagcccccactgggccaccaacagcctcccctcctgtgccagcgaaggaggagcctgaagaacttcctgcagccccagggcctctcccgccacccccacctccgccgccgcctgttcctggtcctgtgacgctccctccaccccagttggtccctgaagggactcctggtgggggaggacccccagccctggaagaggatttgacagttattaatatcaacagcagtgatgaagaggaggaggaagaggaagaagaggaagaagaagaagaggaagaagaggaagaggaggaagactttgaggaagaggaagaggatgaagaggaatattttgaagaggaagaagaggaggaagaagagtttgaggaagaatttgaggaagaagaaggtgagttagaggaagaagaagaagaggaggatgaggaggaggaagaagaactggaagaggtggaagacctggagtttggcacagcaggaggggaggtagaagaaggtgcacctccacccccaaccctgcctccagctctgcctccccctgagtctcccccaaaggtgcagccagaacccgaacccgaacccgggctgcttttggaagtggaggagccagggacggaggaggagcgtggggctgacacagctcccaccctggcccctgaagcgctcccctcccagggagaggtggagagggaaggggaaagccctgcggcagggccccctccccaggagcttgttgaagaagagccctctgctcccccaaccctgttggaagaggagactgaggatgggagtgacaaggtgcagcccccaccagagacacctgcagaagaagagatggagacagagacagaggccgaagctctccaggaaaaggagcaggatgacacagctgccatgctggccgacttcatcgattgtccccctgatgatgagaagccaccacctcccacagagcctgactcctagccatcttctgcaccccactctttgtttccaataaagttatgtccttagatag

SEQ ID NO: 278999 - DNA, 3430 bp, Homo sapiens
acgccaccactggaacccgggggaagatggcggcagccgttctgagtgggccctctgcgggctccgcggctggggttcctggcgggaccgggggtctctcggcagtgagctcgggcccgcggctccgcctgctgctgctggagagtgtttctggtttgctgcaacctcgaacggggtctgccgttgctccggtgcatcccccaaaccgctcggccccacatttgcccgggctcatgtgcctattgcggctgcatgggtcggtgggcggggcccagaacctttcagctcttggggcattggtttgagggcctgtgtctgctgtccctgctggtaggggagagccccacagagctattccagcagcactgtgtgtcttggcttcggagcattcagcaggtgttacagacccaggacccgcctgccacaatggagctggccgtggctgtcctgagggacctcctccgatatgcagcccagctgcctgcactgttccgggacatctccatgaaccacctccctggccttctcacctccctgctgggcctcaggccagagtgtgagcagtcagcattggaaggaatgaaggcttgtatgacctatttccctcgggcttgtggttctctcaaaggcaagctggcctcattttttctgtctagggtggatgccttgagccctcagctccaacagttggcctgtgagtgttattcccggctgccctctttaggggctggcttttcccaaggcctgaagcacaccgagagctgggagcaggagctacacagtctgctggcctcactgcacaccctgctgggggccctgtacgagggagcagagactgctcctgtgcagaatgaaggccctggggtggagatgctgctgtcctcagaagatggtgatgcccatgtccttctccagcttcggcagaggttttcgggactggcccgctgcctagggctcatgctcagctctgagtttggagctcccgtgtccgtccctgtgcaggaaatcctggatttcatctgccggaccctcagcgtcagtagcaagaatattagcttgcatggagatggtcccctgcggctgctgctgctgccctctatccaccttgaggccttggacctgctgtctgcactcatcctcgcgtgtggaagccggctcttgcgctttgggatcctgatcggccgcctgcttccccaggtcctcaattcctggagcatcggtagagattccctctctccaggccaggagaggccttacagcacggttcggaccaaggtgtatgcgatattagagctgtgggtgcaggtttgtggggcctcggcgggaatgcttcagggaggagcctctggagaggccctgctcacccacctgctcagcgacatctccccgccagctgatgcccttaagctgcgtagcccgcgggggagccctgatgggagtttgcagactgggaagcctagcgcccccaagaagctaaagctggatgtgggggaagctatggccccgccaagccaccggaaaggggatagcaatgccaacagcgacgtgtgtgcggctgcactcagaggcctcagccggaccatcctcatgtgtgggcctctcatcaaggaggagactcacaggagactgcatgacctggtcctccccctggtcatgggtgtacagcagggtgaggtcctaggcagctccccgtacacgagctcccgctgccgccgtgaactctactgcctgctgctggcgctgctgctggccccgtctcctcgctgcccacctcctcttgcctgtgccctgcaagccttctccctcggccagcgagaagatagccttgaggtctcctctttctgctcagaagcactggtgacctgtgctgctctgacccacccccgggttcctcccctgcagcccatgggccccacctgccccacacctgctccagttccccctcctgaggccccatcgcccttcagggccccaccgttccatcctccgggccccatgccctcagtgggctccatgccctcagcaggccccatgccttcagcaggccccatgccctcagcaggccctgtgccctcggcacgccctggacctcccaccacagccaaccacctaggcctttctgtcccaggcctagtgtctgtccctccccggcttcttcctggccctgagaaccaccgggcaggctcaaatgaggaccccatccttgcccctagtgggactcccccacctactatacccccagatgaaacttttggggggagagtgcccagaccagcctttgtccactatgacaaggaggaggcatctgatgtggagatctccttggaaagtgactctgatgacagcgtggtgatcgtgcccgaggggcttccccccctgccacccccaccaccctcaggtgccacaccaccccctatagcccccactgggccaccaacagcctcccctcctgtgccagcgaaggaggagcctgaagaacttcctgcagccccagggcctctcccgccacccccacctccgccgccgcctgttcctggtcctgtgacgctccctccaccccagttggtccctgaagggactcctggtgggggaggacccccagccctggaagaggatttgacagttattaatatcaacagcagtgatgaagaggaggaggaagaggaagaagaggaagaagaagaagaggaagaagaggaagaggaggaagactttgaggaagaggaagaggatgaagaggaatattttgaagaggaagaagaggaggaagaagagtttgaggaagaatttgaggaagaagaaggtgagttagaggaagaagaagaagaggaggatgaggaggaggaagaagaactggaagaggtggaagacctggagtttggcacagcaggaggggaggtagaagaaggtgcacctccacccccaaccctgcctccagctctgcctccccctgagtctcccccaaaggtgcagccagaacccgaacccgaacccgggctgcttttggaagtggaggagccagggacggaggaggagcgtggggctgacacagctcccaccctggcccctgaagcgctcccctcccagggagaggtggagagggaaggggaaagccctgcggcagggccccctccccaggagcttgttgaagaagagccctctgctcccccaaccctgttggaagaggagactgaggatgggagtgacaaggtgcagcccccaccagagacacctgcagaagaagagatggagacagagacagaggccgaagctctccaggaaaaggagcaggatgacacagctgccatgctggccgacttcatcgattgtccccctgatgatgagaagccaccacctcccacagagcctgactcctagccatcttctgcaccccactctttgtttccaataaagttatgtccttagatag

SEQ ID NO: 279000 - DNA, 4331 bp, Homo sapiens
  misc_feature (3513)..(3513): n is a, c, g, or t
  misc_feature (3517)..(3517): n is a, c, g, or t
  misc_feature (3529)..(3529): n is a, c, g, or t
acgccaccactggaacccgggggaagatggcggcagccgttctgagtgggccctctgcgggctccgcggctggggttcctggcgggaccgggggtctctcggcagtgagctcgggcccgcggctccgcctgctgctgctggagagtgtttctggtttgctgcaacctcgaacggggtctgccgttgctccggtgcatcccccaaaccgctcggccccacatttgcccgggctcatgtgcctattgcggctgcatgggtcggtgggcggggcccagaacctttcagctcttggggcattggtgagtctcagtaatgcacgtctcagttccatcaaaactcggtttgagggcctgtgtctgctgtccctgctggtaggggagagccccacagagctattccagcagcactgtgtgtcttggcttcggagcattcagcaggtgttacagacccaggacccgcctgccacaatggagctggccgtggctgtcctgagggacctcctccgatatgcagcccagctgcctgcactgttccgggacatctccatgaaccacctccctggccttctcacctccctgctgggcctcaggccagagtgtgagcagtcagcattggaaggaatgaaggcttgtatgacctatttccctcgggcttgtggttctctcaaaggcaagctggcctcattttttctgtctagggtggatgccttgagccctcagctccaacagttggcctgtgagtgttattcccggctgccctctttaggggctggcttttcccaaggcctgaagcacaccgagagctgggagcaggagctacacagtctgctggcctcactgcacaccctgctgggggccctgtacgagggagcagagactgctcctgtgcagaatgaaggccctggggtggagatgctgctgtcctcagaagatggtgatgcccatgtccttctccagcttcggcagaggttttcgggactggcccgctgcctagggctcatgctcagctctgagtttggagctcccgtgtccgtccctgtgcaggaaatcctggatttcatctgccggaccctcagcgtcagtagcaagaatattagcttgcatggagatggtcccctgcggctgctgctgctgccctctatccaccttgaggccttggacctgctgtctgcactcatcctcgcgtgtggaagccggctcttgcgctttgggatcctgatcggccgcctgcttccccaggtcctcaattcctggagcatcggtagagattccctctctccaggccaggagaggccttacagcacggttcggaccaaggtgtatgcgatattagagctgtgggtgcaggtttgtggggcctcggcgggaatgcttcagggaggagcctctggagaggccctgctcacccacctgctcagcgacatctccccgccagctgatgcccttaagctgcgtagcccgcgggggagccctgatgggagtttgcagactgggaagcctagcgcccccaagaagctaaagctggatgtgggggaagctatggccccgccaagccaccggaaaggggatagcaatgccaacagcgacgtgtgtgcggctgcactcagaggcctcagccggaccatcctcatgtgtgggcctctcatcaaggaggagactcacaggagactgcatgacctggtcctccccctggtcatgggtgtacagcagggtgaggtcctaggcagctccccgtacacgagctcccgctgccgccgtgaactctactgcctgctgctggcgctgctgctggccccgtctcctcgctgcccacctcctcttgcctgtgccctgcaagccttctccctcggccagcgagaagatagccttgaggtctcctctttctgctcagaagcactggtgacctgtgctgctctgacccacccccgggttcctcccctgcagcccatgggccccacctgccccacacctgctccagttccccctcctgaggccccatcgcccttcagggccccaccgttccatcctccgggccccatgccctcagtgggctccatgccctcagcaggccccatgccttcagcaggccccatgccctcagcaggccctgtgccctcggcacgccctggacctcccaccacagccaaccacctaggcctttctgtcccaggcctagtgtctgtccctccccggcttcttcctggccctgagaaccaccgggcaggctcaaatgaggaccccatccttgcccctagtgggactcccccacctactatacccccagatgaaacttttggggggagagtgcccagaccagcctttgtccactatgacaaggaggaggcatctgatgtggagatctccttggaaagtgactctgatgacagcgtggtgatcgtgcccgaggggcttccccccctgccacccccaccaccctcaggtgccacaccaccccctatagcccccactgggccaccaacagcctcccctcctgtgccagcgaaggaggagcctgaagaacttcctgcagccccagggcctctcccgccacccccacctccgccgccgcctgttcctggtcctgtgacgctccctccaccccagttggtccctgaagggactcctggtgggggaggacccccagccctggaagaggatttgacagttattaatatcaacagcagtgatgaagaggaggaggaagaggaagaagaggaagaagaagaagaggaagaagaggaagaggaggaagactttgaggaagaggaagaggatgaagaggaatattttgaagaggaagaagaggaggaagaagagtttgaggaagaatttgaggaagaagaaggtgagttagaggaagaagaagaagaggaggatgaggaggaggaagaagaactggaagaggtggaagacctggagtttggcacagcaggaggggaggtagaagaaggtgcacctccacccccaaccctgcctccagctctgcctccccctgagtctcccccaaaggtgcagccagaacccgaacccgaacccgggctgcttttggaagtggaggagccagggacggaggaggagcgtggggctgacacagctcccaccctggcccctgaagcgctcccctcccagggagaggtggagagggaaggggaaagccctgcggcagggccccctccccaggagcttgttgaagaagagccctctgctcccccaaccctgttggaagaggagactgaggatgggagtgacaaggtgcagcccccaccagagacacctgcagaagaagagatggagacagagacagaggccgaagctctccaggaaaaggagcaggatgacacagctgccatgctggccgacttcatcgattgtccccctgatgatgagaagccaccacctcccacagagcctgactcctagccatcttctgcaccccactctttgtttccaataaagttatgtccttagatagaagaaaaaaaaaaaaaaaaaaaaaaaacacacaaaaaaaaanaaanaaaaaaaaaagngggggggggccaaaaattcccccggggggagcgccagaaatttagtccgacgtcacacccagtgttttttctggtaacaaaaggggcgccccccataaggaggagcgcgcgtatataataaacgcactaaggagacgagaggacggggcgatattaacacaagcggctggtagaagcgggacaacacgggaagcatggaagcaactattcgggagagagcagagccgccttacatcagcgggggaggggaggagacacaacttattgtgggggcacaaccctctcccctccacagaggagtaattatacagacacccccagaggggagagaaattataaaaaatcttttaaaacggcgggtgacttaccaaggggggttatacacccatacagcgagaatataaccagcccgcgtcgcgaagaagaaaaaatggttggggatcaagcagggagatatcgtgtactcagggcgacaacagtatttttcaccccccgggagcagcgcctgccgttctacaacccaccctagcacaagaggagggagaaacatgaaagaagaacgccaccgagcagaagaaacgaacgaggcagcaacgcacgaggagggacaggacaacgaggaccggagaggataccaaggaatgaggggcaaggaaggaggagaggagcagggaacgagaacagaaaaagagtcagaagaagagacacaaaaaaagacaagcgaaaggaagaaaagagaacggagagaagagcgagacccaaaactccaccgacacacgaatgcacacgaaccacaaaggaa

SEQ ID NO: 279001 - DNA, 3630 bp, Homo sapiens
acgccaccactggaacccgggggaagatggcggcagccgttctgagtgggccctctgcgggctccgcggctggggttcctggcgggaccgggggtctctcggcagtgagctcgggcccgcggctccgcctgctgctgctggagagtgtttctggtttgctgcaacctcgaacggggtctgccgttgctccggtgcatcccccaaaccgctcggccccacatttgcccgggctcatgtgcctattgcggctgcatgggtcggtgggcggggcccagaacctttcagctcttggggcattggtgagtctcagtaatgcacgtctcagttccatcaaaactcggtttgagggcctgtgtctgctgtccctgctggtaggggagagccccacagagctattccagcagcactgtgtgtcttggcttcggagcattcagcaggtgttacagacccaggacccgcctgccacaatggagctggccgtggctgtcctgagggacctcctccgatatgcagcccagctgcctgcactgttccgggacatctccatgaaccacctccctggccttctcacctccctgctgggcctcaggccagagtgtgagcagtcagcattggaaggaatgaaggcttgtatgacctatttccctcgggcttgtggttctctcaaaggcaagctggcctcattttttctgtctagggtggatgccttgagccctcagctccaacagttggcctgtgagtgttattcccggctgccctctttaggggctggcttttcccaaggcctgaagcacaccgagagctgggagcaggagctacacagtctgctggcctcactgcacaccctgctgggggccctgtacgagggagcagagactgctcctgtgcagaatgaaggccctggggtggagatgctgctgtcctcagaagatggtgatgcccatgtccttctccagcttcggcagaggttttcgggactggcccgctgcctagggctcatgctcagctctgagtttggagctcccgtgtccgtccctgtgcaggaaatcctggatttcatctgccggaccctcagcgtcagtagcaagaatattagcttgcatggagatggtcccctgcggctgctgctgctgccctctatccaccttgaggccttggacctgctgtctgcactcatcctcgcgtgtggaagccggctcttgcgctttgggatcctgatcggccgcctgcttccccaggtcctcaattcctggagcatcggtagagattccctctctccaggccaggagaggccttacagcacggttcggaccaaggtgtatgcgatattagagctgtgggtgcaggtttgtggggcctcggcgggaatgcttcagggaggagcctctggagaggccctgctcacccacctgctcagcgacatctccccgccagctgatgcccttaagctgcgtagcccgcgggggagccctgatgggagtttgcagactgggaagcctagcgcccccaagaagctaaagctggatgtgggggaagctatggccccgccaagccaccggaaaggggatagcaatgccaacagcgacgtgtgtgcggctgcactcagaggcctcagccggaccatcctcatgtgtgggcctctcatcaaggaggagactcacaggagactgcatgacctggtcctccccctggtcatgggtgtacagcagggtgaggtcctaggcagctccccgtacacgagctcccgctgccgccgtgaactctactgcctgctgctggcgctgctgctggccccgtctcctcgctgcccacctcctcttgcctgtgccctgcaagccttctccctcggccagcgagaagatagccttgaggtctcctctttctgctcagaagcactggtgacctgtgctgctctgacccacccccgggttcctcccctgcagcccatgggccccacctgccccacacctgctccagttccccctcctgaggccccatcgcccttcagggccccaccgttccatcctccgggccccatgccctcagtgggctccatgccctcagcaggccccatgccttcagcaggccccatgccctcagcaggccctgtgccctcggcacgccctggacctcccaccacagccaaccacctaggcctttctgtcccaggcctagtgtctgtccctccccggcttcttcctggccctgagaaccaccgggcaggctcaaatgaggaccccatccttgcccctagtgggactcccccacctactatacccccagatgaaacttttggggggagagtgcccagaccagcctttgtccactatgacaaggaggaggcatctgatgtggagatctccttggaaagtgactctgatgacagcgtggtgatcgtgcccgaggggcttccccccctgccacccccaccaccctcaggtgccacaccaccccctatagcccccactgggccaccaacagcctcccctcctgtgccagcgaaggaggagcctgaagaacttcctgcagccccagggcctctcccgccacccccacctccgccgccgcctgttcctggtcctgtgacgctccctccaccccagttggtccctgaagggactcctggtgggggaggacccccagccctggaagaggatttgacagttattaatatcaacagcagtgatgaagaggaggaggaagaggaagaagaggaagaagaagaagaggaagaagaggaagaggaggaagactttgaggaagaggaagaggatgaagaggaatattttgaagaggaagaagaggaggaagaagagtttgaggaagaatttgaggaagaagaaggtgagttagaggaagaagaagaagaggaggatgaggaggaggaagaagaactggaagaggtggaagacctggagtttggcacagcaggaggggaggtagaagaaggtgcacctccacccccaaccctgcctccagctctgcctccccctgagtctcccccaaaggtgcagccagaacccgaacccgaacccgggctgcttttggaagtggaggagccagggacggaggaggagcgtggggctgacacagctcccaccctggcccctgaagcgctcccctcccagggagaggtggagagggaaggggaaagccctgcggcagggccccctccccaggagcttgttgaagaagagccctctgctcccccaaccctgttggaagaggagactgaggatgggagtgacaaggtgcagcccccaccagagacacctgcagaagaagagatggagacagagacagaggccgaagctctccaggaaaaggtgagaggccaggcagggaaggttccttgggcgagaaggtggggctggcgggagaaggggtggcagctgcttctcttaggagaggtttgcccagcctgaaccattcttctgtgtatgtgtgtgtgactattctgaatcttgtatctttgtgcctaaaaggagcaggatgacacagctgccatgctggccgacttcatcgattgtccccctgatgatgagaagccaccacctcccacagagcctgactcctagccatcttctgcaccccactctttgtttccaataaagttatgtccttagatag

SEQ ID NO: 279002 - DNA, 2982 bp, Homo sapiens
acgccaccactggaacccgggggaagatggcggcagccgttctgagtgggccctctgcgggctccgcggctggggttcctggcgggaccgggggtctctcggcagtgagctcgggcccgcggctccgcctgctgctgctggagagtgtttctggtttgctgcaacctcgaacggggtctgccgttgctccggtgcatcccccaaaccgctcggccccacatttgcccgggctcatgtgcctattgcggctgcatgggtcggtgggcggggcccagaacctttcagctcttggggcattggtgagtctcagtaatgcacgtctcagttccatcaaaactcggtttgagggcctgtgtctgctgtccctgctggtaggggagagccccacagagctattccagcagcactgtgtgtcttggcttcggagcattcagcaggtgttacagacccaggacccgcctgccacaatggagctggccgtggctgtcctgagggacctcctccgatatgcagcccagctgcctgcactgttccgggacatctccatgaaccacctccctggccttctcacctccctgctgggcctcaggccagagtgtgagcagtcagcattggaaggaatgaaggcttgtatgacctatttccctcgggcttgtggttctctcaaaggcaagctggcctcattttttctgtctagggtggatgccttgagccctcagctccaacagttggcctgtgagtgttattcccggctgccctctttaggggctggcttttcccaaggcctgaagcacaccgagagctgggagcaggagctacacagtctgctggcctcactgcacaccctgctgggggccctgtacgagggagcagagactgctcctgtgcagaatgaaggccctggggtggagatgctgctgtcctcagaagatggtgatgcccatgtccttctccagcttcggcagaggttttcgggactggcccgctgcctagggctcatgctcagctctgagtttggagctcccgtgtccgtccctgtgcaggaaatcctggatttcatctgccggaccctcagcgtcagtagcaagaatattagcttgcatggagatggtcccctgcggctgctgctgctgccctctatccaccttgaggccttggacctgctgtctgcactcatcctcgcgtgtggaagccggctcttgcgctttgggatcctgatcggccgcctgcttccccaggtcctcaattcctggagcatcggtagagattccctctctccaggccaggagaggccttacagcacggttcggaccaaggtgtatgcgatattagagctgtgggtgcaggtttgtggggcctcggcgggaatgcttcagggaggagcctctggagaggccctgctcacccacctgctcagcgacatctccccgccagctgatgcccttaagctgcgtagcccgcgggggagccctgatgggagtttgcagactgggaagcctagcgcccccaagaagctaaagctggatgtgggggaagctatggccccgccaagccaccggaaaggggatagcaatgccaacagcgacgtgtgtgcggctgcactcagaggcctcagccggaccatcctcatgtgtgggcctctcatcaaggaggagactcacaggagactgcatgacctggtcctccccctggtcatgggtgtacagcagggtgaggtcctaggcagctccccgtacacgagctcccgctgccgccgtgaactctactgcctgctgctggcgctgctgctggccccgtctcctcgctgcccacctcctcttgcctgtgccctgcaagccttctccctcggccagcgagaagatagccttgaggtctcctctttctgctcagaagcactggtgacctgtgctgctctgacccacccccgggttcctcccctgcagcccatgggccccacctgccccacacctgctccagttccccctcctgaggccccatcgcccttcagggccccaccgttccatcctccgggccccatgccctcagtgggctccatgccctcagcaggccccatgccttcagcaggccccatgccctcagcaggccctgtgccctcggcacgccctggacctcccaccacagccaaccacctaggcctttctgtcccaggcctagtgtctgtccctccccggcttcttcctggccctgagaaccaccgggcaggctcaaatgaggaccccatccttgcccctagtgggactcccccacctactatacccccagatgaaacttttggggggagagtgcccagaccagcctttgtccactatgacaaggaggaggcatctgatgtggagatctccttggaaagtgactctgatgacagcgtggtgatcgtgcccgaggggcttccccccctgccacccccaccaccctcaggtgccacaccaccccctatagcccccactgggccaccaacagcctcccctcctgtgccagcgaaggaggagcctgaagaacttcctgcagccccagggcctctcccgccacccccacctccgccgccgcctgttcctggtcctgtgacgctccctccaccccagttggtccctgaagggactcctggtgggggaggacccccagccctggaagaggatttgacagttattaatatcaacagcagtgatgaagaggaggaggaagaggaagaagaggaagaagaagaagaggaagaagaggaagaggaggaagactttgaggaagaggaagaggatgaagaggaatattttgaagaggagatggagacagagacagaggccgaagctctccaggaaaaggagcaggatgacacagctgccatgctggccgacttcatcgattgtccccctgatgatgagaagccaccacctcccacagagcctgactcctagccatcttctgcaccccactctttgtttccaataaagttatgtccttagatag

SEQ ID NO: 279003 - DNA, 1901 bp, Homo sapiens
gcgtttctagaggatcccttcgatgtgggactcagatggcctcagccggaccatcctcatgtgtgggcctctcatcaaggaggagactcacaggagactgcatgacctggtcctccccctggtcatgggtgtacagcagggtgaggtcctaggcagctccccgtacacgagctcccgctgccgccgtgaactctactgcctgctgctggcgctgctgctggccccgtctcctcgctgcccacctcctcttgcctgtgccctgcaagccttctccctcggccagcgagaagatagccttgaggtctcctctttctgctcagaagcactggtgacctgtgctgctctgacccacccccgggttcctcccctgcagcccatgggccccacctgccccacacctgctccagttccccctcctgaggccccatcgcccttcagggccccaccgttccatcctccgggccccatgccctcagtgggctccatgccctcagcaggccccatgccttcagcaggccccatgccctcagcaggccctgtgccctcggcacgccctggacctcccaccacagccaaccacctaggcctttctgtcccaggcctagtgtctgtccctccccggcttcttcctggccctgagaaccaccgggcaggctcaaatgaggaccccatccttgcccctagtgggactcccccacctactatacccccagatgaaacttttggggggagagtgcccagaccagcctttgtccactatgacaaggaggaggcatctgatgtggagatctccttggaaagtgactctgatgacagcgtggtgatcgtgcccgaggggcttccccccctgccacccccaccaccctcaggtgccacaccaccccctatagcccccactgggccaccaacagcctcccctcctgtgccagcgaaggaggagcctgaagaacttcctgcagccccagggcctctcccgccacccccacctccgccgccgcctgttcctggtcctgtgacgctccctccaccccagttggtccctgaagggactcctggtgggggaggacccccagccctggaagaggatttgacagttattaatatcaacagcagtgatgaagaggaggaggaagaggaagaagaggaagaagaagaagaggaagaagaggaagaggaggaagactttgaggaagaggaagaggatgaagaggaatattttgaagaggaagaagaggaggaagaagagtttgaggaagaatttgaggaagaagaaggtgagttagaggaagaagaagaagaggaggatgaggaggaggaagaagaactggaagaggtggaagacctggagtttggcacagcaggaggggaggtagaagaaggtgcacctccacccccaaccctgcctccagctctgcctccccctgagtctcccccaaaggtgcagccagaacccgaacccgaacccgggctgcttttggaagtggaggagccagggacggaggaggagcgtggggctgacacagctcccaccctggcccctgaagcgctcccctcccagggagaggtggagagggaaggggaaagccctgcggcagggccccctccccaggagcttgttgaagaagagccctctgctcccccaaccctgttggaagaggagactgaggatgggagtgacaaggtgcagcccccaccagagacacctgcagaagaagagatggagacagagacagaggccgaagctctccaggaaaaggagcaggatgacacagctgccatgctggccgacttcatcgattgtccccctgatgatgagaagccaccacctcccacagagcctgactcctagccatcttctgcaccccactctttgtttccaataaagttatgtccttagatag

SEQ ID NO: 279004 - DNA, 1333 bp, Homo sapiens
  misc_feature (112)..(112): n is a, c, g, or t
caaggtaggaggccttggttgccgaattccgcacgaggatgaagaggaatattttgaagaggaagaagaggagaagaagagtttgaggaagaacttcctgcagccccagggnctctcccgcctcccccacctactatacccccagatgaaacttttggggggagagtgcccagaccagcctttgtccactatgacaaggaggaggcatctgatgtggagatctccttggaaagtgactctgatgacagcgtggtgatcgtgcccgaggggcttccccccctgccacccccaccaccctcaggtgccacaccaccccctatagcccccactgggccaccaacagcctcccctcctgtgccagcgaaggaggagcctgaagaacttcctgcagccccagggcctctcccgccacccccacctccgccgccgcctgttcctggtcctgtgacgctccctccaccccagttggtccctgaagggactcctggtgggggaggacccccagccctggaagaggatttgacagttattaatatcaacagcagtgatgaagaggaggaggaagaggaagaagaggaagaagaagaagaggaagaagaggaagaggaggaagactttgaggaagaggaagaggatgaagaggaatattttgaagaggaagaagaggaggaagaagagtttgaggaagaatttgaggaagaagaaggtgagttagaggaagaagaagaagaggaggatgaggaggaggaagaagaactggaagaggtggaagacctggagtttggcacagcaggaggggaggtagaagaaggtgcacctccacccccaaccctgcctccagctctgcctccccctgagtctcccccaaaggtgcagccagaacccgaacccgaacccgggctgcttttggaagtggaggagccagggacggaggaggagcgtggggctgacacagctcccaccctggcccctgaagcgctcccctcccagggagaggtggagagggaaggggaaagccctgcggcagggccccctccccaggagcttgttgaagaagagccctctgctcccccaaccctgttggaagaggagactgaggatgggagtgacaaggtgcagcccccaccagagacacctgcagaagaagagatggagacagagacagaggccgaagctctccaggaaaaggagcaggatgacacagctgccatgctggccgacttcatcgattgtccccctgatgatgagaagccaccacctcccacagagcctgactcctagccatcttctgcaccccactctttgtttccaataaagttatgtccttagatag

SEQ ID NO: 279005 - DNA, 2146 bp, Homo sapiens
acgccaccactggaacccgggggaagatggcggcagccgttctgagtgggccctctgcgggctccgcggctggggttcctggcgggaccgggggtctctcggcagtgagctcgggcccgcggctccgcctgctgctgctggagagtgtttctggtttgctgcaacctcgaacggggtctgccgttgctccggtgcatcccccaaaccgctcggccccacatttgcccgggctcatgtgcctattgcggctgcatgggtcggtgggcggggcccagaacctttcagctcttggggcattggtgagtctcagtaatgcacgtctcagttccatcaaaactcggtttgagggcctgtgtctgctgtccctgctggtaggggagagccccacagagctattccagcagcactgtgtgtcttggcttcggagcattcagcaggtgttacagacccaggacccgcctgccacaatggagctggccgtggctgtcctgagggacctcctccgatatgcagcccagctgcctgcactgttccgggacatctccatgaaccacctccctggccttctcacctccctgctgggcctcaggccagagtgtgagcagtcagcattggaaggaatgaaggcttgtatgacctatttccctcgggcttgtggttctctcaaaggcaagctggcctcattttttctgtctagggtggatgccttgagccctcagctccaacagttggcctgtgagtgttattcccggctgccctctttaggggctggcttttcccaaggcctgaagcacaccgagagctgggagcaggagctacacagtctgctggcctcactgcacaccctgctgggggccctgtacgagggagcagagactgctcctgtgcagaatgaaggccctggggtggagatgctgctgtcctcagaagatggtgatgcccatgtccttctccagcttcggcagaggttttcgggactggcccgctgcctagggctcatgctcagctctgagtttggagctcccgtgtccgtccctgtgcaggaaatcctggatttcatctgccggaccctcagcgtcagtagcaagaatattagcttgcatggagatggtcccctgcggctgctgctgctgccctctatccaccttgaggccttggacctgctgtctgcactcatcctcgcgtgtggaagccggctcttgcgctttgggatcctgatcggccgcctgcttccccaggtcctcaattcctggagcatcggtagagattccctctctccaggccaggagaggccttacagcacggttcggaccaaggtgtatgcgatattagagctgtgggtgcaggtttgtggggcctcggcgggaatgcttcagggaggagcctctggagaggccctgctcacccacctgctcagcgacatctccccgccagctgatgcccttaagctgcgtagcccgcgggggagccctgatgggagtttgcagactgggaagcctagcgcccccaagaagctaaagctggatgtgggggaagctatggccccgccaagccaccggaaaggggatagcaatgccaacagcgacgtgtgtgcggctgcactcagaggcctcagccggaccatcctcatgtgtgggcctctcatcaaggaggagactcacaggagactgcatgacctggtcctccccctggtcatgggtgtacagcagggtgaggtcctaggcagctccccgtacacgagctcccgctgccgccgtgaactctactgcctgctgctggcgctgctgctggccccgtctcctcgctgcccacctcctcttgcctgtgccctgcaagccttctccctcggccagcgagaagatagccttgaggtctcctctttctgctcagaagcaggaagaggagactgaggatgggagtgacaaggtgcagcccccaccagagacacctgcagaagaagagatggagacagagacagaggccgaagctctccaggaaaaggagcaggatgacacagctgccatgctggccgacttcatcgattgtccccctgatgatgagaagccaccacctcccacagagcctgactcctagccatcttctgcaccccactctttgtttccaataaagttatgtccttagatag

SEQ ID NO: 279006 - DNA, 1616 bp, Homo sapiens
acgccaccactggaacccgggggaagatggcggcagccgttctgagtgggccctctgcgggctccgcggctggggttcctggcgggaccgggggtctctcggcagtgagctcgggcccgcggctccgcctgctgctgctggagagtgtttctggtttgctgcaacctcgaacggggtctgccgttgctccggtgcatcccccaaaccgctcggccccacatttgcccgggctcatgtgcctattgcggctgcatgggtcggtgggcggggcccagaacctttcagctcttggggcattggtgagtctcagtaatgcacgtctcagttccatcaaaactcggtttgagggcctgtgtctgctgtccctgctggtaggggagagccccacagagctattccagcagcactgtgtgtcttggcttcggagcattcagcaggtgttacagacccaggacccgcctgccacaatggagctggccgtggctgtcctgagggacctcctccgatatgcagcccagctgcctgcactgttccgggacatctccatgaaccacctccctggccttctcacctccctgctgggcctcaggccagagtgtgagcagtcagcattggaaggaatgaaggcttgtatgacctatttccctcgggcttgtggttctctcaaaggcaagctggcctcattttttctgtctagggtggatgccttgagccctcagctccaacagttggcctgtgagtgttattcccggctgccctctttaggggctggcttttcccaaggcctgaagcacaccgagagctgggagcaggagctacacagtctgctggcctcactgcacaccctgctgggggccctgtacgagggagcagagactgctcctgtgcagaatgaaggccctggggtggagatgctgctgtcctcagaagatggtgatgcccatgtccttctccagcttcggcagaggttttcgggactggcccgctgcctagggctcatgctcagctctgagtttggagctcccgtgtccgtccctgtgcaggaaatcctggatttcatctgccggaccctcagcgtcagtagcaagaatattagcttgcatggagatggtcccctgcggctgctgctgctgccctctatccaccttgaggccttggacctgctgtctgcactcatcctcgcgtgtggaagccggctcttgcgctttgggatcctgatcggccgcctgcttccccaggtcctcaattcctggagcatcggtagagattccctctctccaggccaggagaggccttacagcacggttcggaccaaggtgtatgcgatattagagctgtgggtgcaggtttgtggggcctcggcgggaatgcttcagggaggagcctctggagaggccctgctcacccaccagagacacctgcagaagaagagatggagacagagacagaggccgaagctctccaggaaaaggagcaggatgacacagctgccatgctggccgacttcatcgattgtccccctgatgatgagaagccaccacctcccacagagcctgactcctagccatcttctgcaccccactctttgtttccaataaagttatgtccttagatag

SEQ ID NO: 279007 - DNA, 325 bp, Homo sapiens
agtgattggggaataggattgaagaagtgagaagagggaggggccaagaaaaagtgatttctggagaagggcccttgtggggtgctgggggagatggaatatggtgacatggtgctcgcagcctctcgtttctccctttgtttttcctacagtgtgagcagtcagcattggaaggaatgaaggcttgtatgacctatttccctcgggcttgtggttctctcaaagtaagtatttatgcactcttctccccaccagtgtaagcgttgagagctcttacctcagattcctgtcctgagattcctaagcacctatcttctgattatcc

SEQ ID NO: 279008 - DNA, 378 bp, Homo sapiens
tgaggaaaggccgagaaacagcctttcccacaggaaaaaaggggaaaagctcaaggcttctagtgggatggccttttggcctcagaggagatgtgacttcagaaaggcttcataggtgctgggacagagaagggcttgaagaatcttctgcatttttaacatcccgtttgtgactcgcttccctgttttctttcctccagaacctttcagctcttggggcattggtgagtctcagtaatgcacgtctcagttccatcaaaactcggtaagtctttggcccttttttttctccaggggcgtgttcccttaggaagtgggcatatgtacatctttgctttcattgtcaccgtccccaggattcaagacctctctctattc

SEQ ID NO: 279009 - DNA, 323 bp, Homo sapiens
ggggaagggccccccccccctctctcccccaagattttaaaaaaaagccttttgtttcccccccaaccctttggaagaggagactgaggatgggagtgacaaggtgcagcccccaccagagacacctgcagaagaagagatggagacagagacagaggccgaagctctccaggaaaaggagcaggatgacacagctgccatgctggccgacttcatcgattgtccccctgatgatgagaagccaccacctcccacagagcctgactcctagccatcttctgcaccccactctttgtttccaataaagttatgtccttagatag

SEQ ID NO: 279010 - DNA, 2621 bp, Homo sapiens
acagtgtacagggtagttgtgcttctgccctcctgtgcagaatgaaggccctggggtggagatgctgctgtcctcagaagatggtgatgcccatgtccttctccagcttcggcagaggttttcgggactggcccgctgcctagggctcatgctcagctctgagtttggagctcccgtgtccgtccctgtgcaggaaatcctggatttcatctgccggaccctcagcgtcagtagcaagaatattagcttgcatggagatggtcccctgcggctgctgctgctgccctctatccaccttgaggccttggacctgctgtctgcactcatcctcgcgtgtggaagccggctcttgcgctttgggatcctgatcggccgcctgcttccccaggtcctcaattcctggagcatcggtagagattccctctctccaggccaggagaggccttacagcacggttcggaccaaggtgtatgcgatattagagctgtgggtgcaggtttgtggggcctcggcgggaatgcttcagggaggagcctctggagaggccctgctcacccacctgctcagcgacatctccccgccagctgatgcccttaagctgcgtagcccgcgggggagccctgatgggagtttgcagactgggaagcctagcgcccccaagaagctaaagctggatgtgggggaagctatggccccgccaagccaccggaaaggggatagcaatgccaacagcgacgtgtgtgcggctgcactcagaggcctcagccggaccatcctcatgtgtgggcctctcatcaaggaggagactcacaggagactgcatgacctggtcctccccctggtcatgggtgtacagcagggtgaggtcctaggcagctccccgtacacgagctcccgctgccgccgtgaactctactgcctgctgctggcgctgctgctggccccgtctcctcgctgcccacctcctcttgcctgtgccctgcaagccttctccctcggccagcgagaagatagccttgaggtctcctctttctgctcagaagcactggtgacctgtgctgctctgacccacccccgggttcctcccctgcagcccatgggccccacctgccccacacctgctccagttccccctcctgaggccccatcgcccttcagggccccaccgttccatcctccgggccccatgccctcagtgggctccatgccctcagcaggccccatgccttcagcaggccccatgccctcagcaggccctgtgccctcggcacgccctggacctcccaccacagccaaccacctaggcctttctgtcccaggcctagtgtctgtccctccccggcttcttcctggccctgagaaccaccgggcaggctcaaatgaggaccccatccttgcccctagtgggactcccccacctactatacccccagatgaaacttttggggggagagtgcccagaccagcctttgtccactatgacaaggaggaggcatctgatgtggagatctccttggaaagtgactctgatgacagcgtggtgatcgtgcccgaggggcttccccccctgccacccccaccaccctcaggtgccacaccaccccctatagcccccactgggccaccaacagcctcccctcctgtgccagcgaaggaggagcctgaagaacttcctgcagccccagggcctctcccgccacccccacctccgccgccgcctgttcctggtcctgtgacgctccctccaccccagttggtccctgaagggactcctggtgggggaggacccccagccctggaagaggatttgacagttattaatatcaacagcagtgatgaagaggaggaggaagaggaagaagaggaagaagaagaagaggaagaagaggaagaggaggaagactttgaggaagaggaagaggatgaagaggaatattttgaagaggaagaagaggaggaagaagagtttgaggaagaatttgaggaagaagaaggtgagttagaggaagaagaagaagaggaggatgaggaggaggaagaagaactggaagaggtggaagacctggagtttggcacagcaggaggggaggtagaagaaggtgcacctccacccccaaccctgcctccagctctgcctccccctgagtctcccccaaaggtgcagccagaacccgaacccgaacccgggctgcttttggaagtggaggagccagggacggaggaggagcgtggggctgacacagctcccaccctggcccctgaagcgctcccctcccagggagaggtggagagggaaggggaaagccctgcggcagggccccctccccaggagcttgttgaagaagagccctctgctcccccaaccctgttggaagaggagactgaggatgggagtgacaaggtgcagcccccaccagagacacctgcagaagaagagatggagacagagacagaggccgaagctctccaggaaaaggagcaggatgacacagctgccatgctggccgacttcatcgattgtccccctgatgatgagaagccaccacctcccacagagcctgactcctagccatcttctgcaccccactctttgtttccaataaagttatgtccttagatag

SEQ ID NO: 279011 - DNA, 2444 bp, Homo sapiens
acgatcccgtattctatcgcggagaactgtggccttacacggcgcgtgcacgaggaggaggacgcaggctcggcagctcatcgggttctacgactgaactcaggaccccgtctcctctctgacatccgcatcgattatcccccctgcggctgctgctgctgccctctatccaccttgaggccttggacctgctgtctgcactcatcctcgcgtcctcaattcctggagcatcggtagagattccctctctccaggccaggagaggccttacagcacggttcggaccaaggtgtatgcgatattagagctgtgggtgcaggtttgtggggcctcggcgggaatgcttcagggaggagcctctggagaggccctgctcacccacctgctcagcgacatctccccgccagctgatgcccttaagctgcgtagcccgcgggggagccctgatgggagtttgcagactgggaagcctagcgcccccaagaagctaaagctggatgtgggggaagctatggccccgccaagccaccggaaaggggatagcaatgccaacagcgacgtgtgtgcggctgcactcagaggcctcagccggaccatcctcatgtgtgggcctctcatcaaggaggagactcacaggagactgcatgacctggtcctccccctggtcatgggtgtacagcagggtgaggtcctaggcagctccccgtacacgagctcccgctgccgccgtgaactctactgcctgctgctggcgctgctgctggccccgtctcctcgctgcccacctcctcttgcctgtgccctgcaagccttctccctcggccagcgagaagatagccttgaggtctcctctttctgctcagaagcactggtgacctgtgctgctctgacccacccccgggttcctcccctgcagcccatgggccccacctgccccacacctgctccagttccccctcctgaggccccatcgcccttcagggccccaccgttccatcctccgggccccatgccctcagtgggctccatgccctcagcaggccccatgccttcagcaggccccatgccctcagcaggccctgtgccctcggcacgccctggacctcccaccacagccaaccacctaggcctttctgtcccaggcctagtgtctgtccctccccggcttcttcctggccctgagaaccaccgggcaggctcaaatgaggaccccatccttgcccctagtgggactcccccacctactatacccccagatgaaacttttggggggagagtgcccagaccagcctttgtccactatgacaaggaggaggcatctgatgtggagatctccttggaaagtgactctgatgacagcgtggtgatcgtgcccgaggggcttccccccctgccacccccaccaccctcaggtgccacaccaccccctatagcccccactgggccaccaacagcctcccctcctgtgccagcgaaggaggagcctgaagaacttcctgcagccccagggcctctcccgccacccccacctccgccgccgcctgttcctggtcctgtgacgctccctccaccccagttggtccctgaagggactcctggtgggggaggacccccagccctggaagaggatttgacagttattaatatcaacagcagtgatgaagaggaggaggaagaggaagaagaggaagaagaagaagaggaagaagaggaagaggaggaagactttgaggaagaggaagaggatgaagaggaatattttgaagaggaagaagaggaggaagaagagtttgaggaagaatttgaggaagaagaaggtgagttagaggaagaagaagaagaggaggatgaggaggaggaagaagaactggaagaggtggaagacctggagtttggcacagcaggaggggaggtagaagaaggtgcacctccacccccaaccctgcctccagctctgcctccccctgagtctcccccaaaggtgcagccagaacccgaacccgaacccgggctgcttttggaagtggaggagccagggacggaggaggagcgtggggctgacacagctcccaccctggcccctgaagcgctcccctcccagggagaggtggagagggaaggggaaagccctgcggcagggccccctccccaggagcttgttgaagaagagccctctgctcccccaaccctgttggaagaggagactgaggatgggagtgacaaggtgcagcccccaccagagacacctgcagaagaagagatggagacagagacagaggccgaagctctccaggaaaaggagcaggatgacacagctgccatgctggccgacttcatcgattgtccccctgatgatgagaagccaccacctcccacagagcctgactcctagccatcttctgcaccccactctttgtttccaataaagttatgtccttagatag

SEQ ID NO: 279012 - DNA, 1893 bp, Homo sapiens
gtgggtccattccgacctgggagtaggctctggagaagggttgggtggtcttggggatgtttccaggtgtgctctgtccttttcagagactgcatgacctggtcctccccctggtcatgggtgtacagcagggtgaggtcctaggcagctccccgtacacgagctcccgctgccgccgtgaactctactgcctgctgctggcgctgctgctggccccgtctcctcgctgcccacctcctcttgcctgtgccctgcaagccttctccctcggccagcgagaagatagccttgaggtctcctctttctgctcagaagcactggtgacctgtgctgctctgacccacccccgggttcctcccctgcagcccatgggccccacctgccccacacctgctccagttccccctcctgaggccccatcgcccttcagggccccaccgttccatcctccgggccccatgccctcagtgggctccatgccctcagcaggccccatgccttcagcaggccccatgccctcagcaggccctgtgccctcggcacgccctggacctcccaccacagccaaccacctaggcctttctgtcccaggcctagtgtctgtccctccccggcttcttcctggccctgagaaccaccgggcaggctcaaatgaggaccccatccttgcccctagtgggactcccccacctactatacccccagatgaaacttttggggggagagtgcccagaccagcctttgtccactatgacaaggaggaggcatctgatgtggagatctccttggaaagtgactctgatgacagcgtggtgatcgtgcccgaggggcttccccccctgccacccccaccaccctcaggtgccacaccaccccctatagcccccactgggccaccaacagcctcccctcctgtgccagcgaaggaggagcctgaagaacttcctgcagccccagggcctctcccgccacccccacctccgccgccgcctgttcctggtcctgtgacgctccctccaccccagttggtccctgaagggactcctggtgggggaggacccccagccctggaagaggatttgacagttattaatatcaacagcagtgatgaagaggaggaggaagaggaagaagaggaagaagaagaagaggaagaagaggaagaggaggaagactttgaggaagaggaagaggatgaagaggaatattttgaagaggaagaagaggaggaagaagagtttgaggaagaatttgaggaagaagaaggtgagttagaggaagaagaagaagaggaggatgaggaggaggaagaagaactggaagaggtggaagacctggagtttggcacagcaggaggggaggtagaagaaggtgcacctccacccccaaccctgcctccagctctgcctccccctgagtctcccccaaaggtgcagccagaacccgaacccgaacccgggctgcttttggaagtggaggagccagggacggaggaggagcgtggggctgacacagctcccaccctggcccctgaagcgctcccctcccagggagaggtggagagggaaggggaaagccctgcggcagggccccctccccaggagcttgttgaagaagagccctctgctcccccaaccctgttggaagaggagactgaggatgggagtgacaaggtgcagcccccaccagagacacctgcagaagaagagatggagacagagacagaggccgaagctctccaggaaaaggagcaggatgacacagctgccatgctggccgacttcatcgattgtccccctgatgatgagaagccaccacctcccacagagcctgactcctagccatcttctgcaccccactctttgtttccaataaagttatgtccttagatag

SEQ ID NO: 279013 - DNA, 1024 bp, Homo sapiens
  misc_feature (112)..(112): n is a, c, g, or t
caaggtaggaggccttggttgccgaattccgcacgaggatgaagaggaatattttgaagaggaagaagaggagaagaagagtttgaggaagaacttcctgcagccccagggnctctcccgcctcccccacctactatacccccagatgaaacttttggggggagagtgcccagaccagcctttgtccactatgacaaggaggaggcatctgatgtggagatctccttggaaagtgactctgatgacagcgtggtgatcgtgcccgaggggcttccccccctgccacccccaccaccctcaggtgccacaccaccccctatagcccccactgggccaccaacagcctcccctcctgtgccagcgaaggaggagcctgaagaatttgaggaagaagaaggtgagttagaggaagaagaagaagaggaggatgaggaggaggaagaagaactggaagaggtggaagacctggagtttggcacagcaggaggggaggtagaagaaggtgcacctccacccccaaccctgcctccagctctgcctccccctgagtctcccccaaaggtgcagccagaacccgaacccgaacccgggctgcttttggaagtggaggagccagggacggaggaggagcgtggggctgacacagctcccaccctggcccctgaagcgctcccctcccagggagaggtggagagggaaggggaaagccctgcggcagggccccctccccaggagcttgttgaagaagagccctctgctcccccaaccctgttggaagaggagactgaggatgggagtgacaaggtgcagcccccaccagagacacctgcagaagaagagatggagacagagacagaggccgaagctctccaggaaaaggagcaggatgacacagctgccatgctggccgacttcatcgattgtccccctgatgatgagaagccaccacctcccacagagcctgactcctagccatcttctgcaccccactctttgtttccaataaagttatgtccttagatag

SEQ ID NO: 279014 - DNA, 423 bp, Homo sapiens
acgccaccactggaacccgggggaagatggcggcagccgttctgagtgggccctctgcgggctccgcggctggggttcctggcgggaccgggggtctctcggcagtgagctcgggcccgcggctccgcctgctgctgctggagagtgtttctggtttgctgcaacctcgaacggggtctgccgttgctccggtgcatcccccaaaccgctcggccccacatttgcccgggctcatgtgcctattgcggctgcatgggtcggtgggcggggcccagaacctttcagctcttggggcattggtgagtctcagtaatgcacgtctcagttccatcaaaactcggtaagtctttggcccttttttttctccaggggcgtgttcccttaggaagtgggcatatgtacatctttgctttcattgtcacc

SEQ ID NO: 279015 - DNA, 895 bp, Homo sapiens
gtgatttcatccttatgtgaaaaagggcttagtactgtgctggccatttagtaagtggttaataaactgtgctatcatttacatgatcatcgctgccagaggttgtagatccttgggatatgaatgaagctgatctcacgcatttggactacctaattagtaataaggaccaaacctaaaagagaggtagtaaatgaattgaggaggactgaggcctttccattcatcactgtggagtcctgtacattaaggctcaggtcatatggagatggctgggtctgtgaggcttaggcttaggggacctatgaggctggaccaaaaaaaatctagacattaatgcatggctagagttggaggttctgttgtagatttgctcatgtaggcatgtgactgcagattataatcacaaattgagtaataagtacaaagaggaaggaaggcaggatgtgaaatctgttggccatgttccacacagtctggagtgtatgtcagtgtgagctgaagaccagcagagactaggatggatgacggcctgtccaggggctgaatggacacaggtgtcagcagggccacctggtaaaggtatggaggtgagccatgaacaaggttacctgcttaaggggaaggttgtggcttaaatctagatgctgctgagatattagacattaggtgcccacaggctgtgtggaggtagaagggggatgtgcttctcttatttgcacaaagatgtgagttactgaggagtattattgaacagcagcatgttgggtttgagaagagacctagtagtagaaagagtagtatgtctgccactgaggaagcagggaacagaagggtgcctcaccccagggcagatggggacatggtttaggatcctagtgactaaaaaaaaaaa

SEQ ID NO: 279016 - DNA, 1155 bp, Homo sapiens
gtgatttcatccttatgtgaaaaagggcttagtactgtgctggccatttagtaagtggttaataaactgtgctatcatttacatgatcatcgctgccagaggttgtagatccttgggatatgaatgaagctgatctcacgcatttggactacctaattagtaataaggaccaaacctaaaagagaggtagtaaatgaattgaggaggactgaggcctttccattcatcactgtggagtcctgtacattaaggctcaggtcatatggagatggctgggtctgtgaggcttaggcttaggggacctatgaggctggaccaaaaaaaatctagacattaatgcatggctagagttggaggttctgttgtagatttgctcatgtaggcatgtgactgcagattataatcacaaattgagtaataagtacaaagaggaaggaaggcaggatgtgaaatctgttggccatgttccacacagtctggagtgtatgtcagtgtgagctgaagaccagcagagactaggatggatgacggcctgtccaggggctgaatggacacaggtgtcagcagggccacctggtaaaggtatggaggtgagccagccatgagagggtatcttgtggccatattcctgagtgctgtcttcctctattatgtactgcattgcatattatggggaacgaatgtctattgggtggcacctgtggaaatgaaacggagaaataagatccagccttgtttatcaaagccagcttttgcctctctgctgagtcagagctctgcatatattttaagaaaaggcattgaggaactcaatcaaaccagtattcttttcacacaggtttcatcagtttcacccttttctgtgtgcggctgattttagaaagattgcttccttgtatggtagcgataagtttgatttgccctatgggatgagaacatcagcggaatattttcgacttgctctttcaaaactgcagagttgtgatctctttgatgagtttgacaacataccctgtaaaaagtgtgtggtggttggtaatggaggagttttgaagaataagacattaggagaaaaaatcgactcctatgatgtaataataagcttaagggataataaaaaaagaaaaatgggcccggtttaagaacataagaaaa

SEQ ID NO: 279017 - DNA, 2819 bp, Homo sapiens
caagcctcagtgtttacttctgccgcctgccagccgggcggggaaggggagtacccggccacccctcactttagctcctgcagctttccaaacaaaccagggcgggatgggagtgtcttcttggctgtggaaatcgatcctcctaccttgtcctgaagccacccgccgcctttcctcgtccctcccttcgcggtgattttccggtcccggcgcccggcgagggcgcgcggctggtgtccgccccgcccgaaaggtgagccagccatgagagggtatcttgtggccatattcctgagtgctgtcttcctctattatgtactgcattgcatattatggggaacgaatgtctattgggtggcacctgtggaaatgaaacggagaaataagatccagccttgtttatcaaagccagcttttgcctctctgctgagtcagagctctgcatatattttaagaaaaggcattgaggaactcaatcaaaccagtattcttttcacacaggtttcatcagtttcacccttttctgtgtgcggctgattttagaaagattgcttccttgtatggtagcgataagtttgatttgccctatgggatgagaacatcagcggaatattttcgacttgctctttcaaaactgcagagttgtgatctctttgatgagtttgacaacataccctgtaaaaagtgtgtggtggttggtaatggaggagttttgaagaataagacattaggagaaaaaatcgactcctatgatgtaataataagaatgaataatggtcctgttttaggacatgaagaagaagttgggagaaggacaaccttccgacttttttatccagaatctgttttttcagatcctattcacaatgaccctaatacgacagtgattctcactgcttttaagccacatgatttaaggtggctgttggaattgttgatgggtgacaaaataaacactaatggtttttggaagaaaccagccttaaacctgatttataaaccttatcaaatccgaatattagatcctttcattatcagaacagcagcttatgaactgcttcattttccaaaagtgtttcccaaaaatcagaaacctaaacacccaacaacaggaattattgccatcacattggcgttttacatatgtcacgaagttcacctagctggttttaaatacaacttttctgacctcaagagtcctttgcactactatgggaatgccaccatgtctttgatgaataagaacgcgtatcacaatgtgactgcagagcagctctttttgaaggacattatagaaaaaaacctcgtaatcaacttgactcaagattgactctacagactcagaagatgatgctaacagtgttagttttatttttgtactgcaatttttagtttaaaatatgttggatgcactcgtcaaataattatgtatactgtctgttgctgcctggtgattcataaccaccagcttaatttctgtgaatactgtatatttaacttatgaaaaccaagaaatgtaaagataacaggaaaataagttttgattgcattgtttttaaaataagctagttttctgaggtgttttcacacgtctttttatagttacttcatcttagatttttgaagggatatgacttcctactaaggatttagtttaccacaacaattctgactacaataagacattttgaggaggatatttggctactgtaaacatggctggtggaaaatcacgattgtggcttgatgtggcaagccgaaaccacttggctctggaaatctaagttcatactggtttaattaagctctctcctgacaacccccagaattaaatgaaccatgattgtgaagagtaatttggtacaatgaaggcagtgtttgtttttaagttaaaggaaatgggctaaacataaagttcttattagataagtaaataactaaagaaagaatacaattactaaactctgatggctttgtattattttaaagaaatgaagtttaactttatacaatgaagctaagctaggcaagctcaagaaggaaaaaaaaatcttgaacattatttttttttgcctgacttacttattcattaaattttgaaggttttccacttgaagtaaattaggaaaggtaaagaagataacagaacaagtaaacacttaagaaaagtcaagctgaggccgggcagggtggctcacacctgtaatcctaacaaacactttgggaggccgagggaggcagctggattgcctgaactcaggagttcaagaccagcctggccaacatggtgaaacctcatctctactaaaatacaaaataattagctgggcgtggtggtatgcgctgtagtcccaggtactcgggaggctgaggcacgagaattgcttgagcccgggaggcagaggttgcagtgagccaagatcgcgccactgcacttcagcctgggtgacagagtgaggctgtcttctaaaaaatataaaaagtgaagttgggatttttggatttaaatggtacaaaaagaatatctcattttcccatgattaaagctaatcttcagatggaaagcttgcctggctacctagggtgcaccagagaatctgatccaatgcaagccagtcaatcctacaaatgtggtgagctagtcttccttcctatattttaataaatgtaaccaaaggccatctggaggtaggggaatgagaggtgaagaaacagaaaaatagaggttataaggatggaactaaaagttgtcagaagaggtatgagctgaagaaagaattactctcttttgaccaataaatacaattgggaaacactgg

SEQ ID NO: 279018 - DNA, 3182 bp, Homo sapiens
tgctggtacggtcggaattttgggatccgccgcctttcctcgtccctcccttcgcggtgattttccggtcccggcgcccggcgagggcgcgcggctggtgtccgccccgcccgaaaggtgagccagccatgagagggtatcttgtggccatattcctgagtgctgtcttcctctattatgtactgcattgcatattatggggaacgaatgtctattgggtggcacctgtggaaatgaaacggagaaataagatccagccttgtttatcaaagccagcttttgcctctctgctgagtcagagctctgcatatattttaagaaaaggcattgaggaactcaatcaaaccagtattcttttcacacaggtttcatcagtttcacccttttctgtgtgcggctgattttagaaagattgcttccttgtatggtagcgataagtttgatttgccctatgggatgagaacatcagcggaatattttcgacttgctctttcaaaactgcagagttgtgatctctttgatgagtttgacaaaatgaataatggtcctgttttaggacatgaagaagaagttgggagaaggacaaccttccgacttttttatccagaatctgttttttcagatcctattcacaatgaccctaatacgacagtgattctcactgcttttaagccacatgatttaaggtggctgttggaattgttgatgggtgacaaaataaacactaatggtttttggaagaaaccagccttaaacctgatttataaaccttatcaaatccgaatattagatcctttcattatcagaacagcagcttatgaactgcttcattttccaaaagtgtttcccaaaaatcagaaacctaaacacccaacaacaggaattattgccatcacattggcgttttacatatgtcacgaagttcacctagctggttttaaatacaacttttctgacctcaagagtcctttgcactactatgggaatgccaccatgtctttgatgaataagaacgcgtatcacaatgtgactgcagagcagctctttttgaaggacattatagaaaaaaacctcgtaatcaacttgactcaagattgactctacagactcagaagatgatgctaacagtgttagttttatttttgtactgcaatttttagtttaaaatatgttggatgcactcgtcaaataattatgtatactgtctgttgctgcctggtgattcataaccaccagcttaatttctgtgaatactgtatatttaacttatgaaaaccaagaaatgtaaagataacaggaaaataagttttgattgcattgtttttaaaataagctagttttctgaggtgttttcacacgtctttttatagttacttcatcttagatttttgaagggatatgacttcctactaaggatttagtttaccacaacaattctgactacaataagacattttgaggaggatatttggctactgtaaacatggctggtggaaaatcacgattgtggcttgatgtggcaagccgaaaccacttggctctggaaatctaagttcatactggtttaattaagctctctcctgacaacccccagaattaaatgaaccatgattgtgaagagtaatttggtacaatgaaggcagtgtttgtttttaagttaaaggaaatgggctaaacataaagttcttattagataagtaaataactaaagaaagaatacaattactaaactctgatggctttgtattattttaaagaaatgaagtttaactttatacaatgaagctaagctaggcaagctcaagaaggaaaaaaaaatcttgaacattatttttttttgcctgacttacttattcattaaattttgaaggttttccacttgaagtaaattaggaaaggtaaagaagataacagaacaagtaaacacttaagaaaagtcaagctgaggccgggcagggtggctcacacctgtaatcctaacaaacactttgggaggccgagggaggcagctggattgcctgaactcaggagttcaagaccagcctggccaacatggtgaaacctcatctctactaaaatacaaaataattagctgggcgtggtggtatgcgctgtagtcccaggtactcgggaggctgaggcacgagaattgcttgagcccgggaggcagaggttgcagtgagccaagatcgcgccactgcacttcagcctgggtgacagagtgaggctgtcttctaaaaaatataaaaagtgaagttgggatttttggatttaaatggtacaaaaagaatatctcattttcccatgattaaagctaatcttcagatggaaagcttgcctggctacctagggtgcaccagagaatctgatccaatgcaagccagtcaatcctacaaatgtggtgagctagtcttccttcctatattttaataaatgtaaccaaaggccatctggaggtaggggaatgagaggtgaagaaacagaaaaatagaggttataaggatggaactaaaagttgtcagaagaggtatgagctgaagaaagaattactctcttttgaccaataaatacaattgggaaacactggaaaaccatggcttgattactgacaaccaacctgcctctctaaagagggtgtataaagggtgaaatacattagatttggctcagaaacagaatgcggtacttataaagcagaataaaggggagaacagtagtagttgatctaacccagattagacatgaataccagcatatgtttgcagagtcccacagttttgattcttcttataactttttgaggtgcaaaaggaaggtaccagaactggaatcgcatgtaatcaatcagtgtgattttcccctcataccacacagccataggctgcagtgtggctgctgaagttcaattgatataaagtaaatcaggcttcaaaaagaatggtgctgtgggtacacaaggacataaagatgggaacgatagacactgaggactgcggcggggggagcgaggggagcggggagggcaagggctgaaagactatgtattgggtactatgctcacaacctggatgatgggatcattcataccacaaacctcagtatcacacaatatacccatgtaacaacctgcactctgcacatgtacccttagaatctaaaataaaagttgaaattattttttt

SEQ ID NO: 279019 - DNA, 3344 bp, Homo sapiens
caagcctcagtgtttacttctgccgcctgccagccgggcggggaaggggagtacccggccacccctcactttagctcctgcagctttccaaacaaaccagggcgggatgggagtgtcttcttggctgtggaaatcgatcctcctaccttgtcctgaagccacccgccgcctttcctcgtccctcccttcgcggtgattttccggtcccggcgcccggcgagggcgcgcggctggtgtccgccccgcccgaaaggtgagccagccatgagagggtatcttgtggccatattcctgagtgctgtcttcctctattatgtactgcattgcatattatggggaacgaatgtctattgggtggcacctgtggaaatgaaacggagaaataagatccagccttgtttatcaaagccagcttttgcctctctgctgaggtttcatcagtttcacccttttctgtgtgcggctgattttagaaagattgcttccttgtatggtagcgataagtttgatttgccctatgggatgagaacatcagcggaatattttcgacttgctctttcaaaactgcagagttgtgatctctttgatgagtttgacaacataccctgtaaaaagtgtgtggtggttggtaatggaggagttttgaagaataagacattaggagaaaaaatcgactcctatgatgtaataataagaatgaataatggtcctgttttaggacatgaagaagaagttgggagaaggacaaccttccgacttttttatccagaatctgttttttcagatcctattcacaatgaccctaatacgacagtgattctcactgcttttaagccacatgatttaaggtggctgttggaattgttgatgggtgacaaaataaacactaatggtttttggaagaaaccagccttaaacctgatttataaaccttatcaaatccgaatattagatcctttcattatcagaacagcagcttatgaactgcttcattttccaaaagtgtttcccaaaaatcagaaacctaaacacccaacaacaggaattattgccatcacattggcgttttacatatgtcacgaagttcacctagctggttttaaatacaacttttctgacctcaagagtcctttgcactactatgggaatgccaccatgtctttgatgaataagaacgcgtatcacaatgtgactgcagagcagctctttttgaaggacattatagaaaaaaacctcgtaatcaacttgactcaagattgactctacagactcagaagatgatgctaacagtgttagttttatttttgtactgcaatttttagtttaaaatatgttggatgcactcgtcaaataattatgtatactgtctgttgctgcctggtgattcataaccaccagcttaatttctgtgaatactgtatatttaacttatgaaaaccaagaaatgtaaagataacaggaaaataagttttgattgcattgtttttaaaataagctagttttctgaggtgttttcacacgtctttttatagttacttcatcttagatttttgaagggatatgacttcctactaaggatttagtttaccacaacaattctgactacaataagacattttgaggaggatatttggctactgtaaacatggctggtggaaaatcacgattgtggcttgatgtggcaagccgaaaccacttggctctggaaatctaagttcatactggtttaattaagctctctcctgacaacccccagaattaaatgaaccatgattgtgaagagtaatttggtacaatgaaggcagtgtttgtttttaagttaaaggaaatgggctaaacataaagttcttattagataagtaaataactaaagaaagaatacaattactaaactctgatggctttgtattattttaaagaaatgaagtttaactttatacaatgaagctaagctaggcaagctcaagaaggaaaaaaaaatcttgaacattatttttttttgcctgacttacttattcattaaattttgaaggttttccacttgaagtaaattaggaaaggtaaagaagataacagaacaagtaaacacttaagaaaagtcaagctgaggccgggcagggtggctcacacctgtaatcctaacaaacactttgggaggccgagggaggcagctggattgcctgaactcaggagttcaagaccagcctggccaacatggtgaaacctcatctctactaaaatacaaaataattagctgggcgtggtggtatgcgctgtagtcccaggtactcgggaggctgaggcacgagaattgcttgagcccgggaggcagaggttgcagtgagccaagatcgcgccactgcacttcagcctgggtgacagagtgaggctgtcttctaaaaaatataaaaagtgaagttgggatttttggatttaaatggtacaaaaagaatatctcattttcccatgattaaagctaatcttcagatggaaagcttgcctggctacctagggtgcaccagagaatctgatccaatgcaagccagtcaatcctacaaatgtggtgagctagtcttccttcctatattttaataaatgtaaccaaaggccatctggaggtaggggaatgagaggtgaagaaacagaaaaatagaggttataaggatggaactaaaagttgtcagaagaggtatgagctgaagaaagaattactctcttttgaccaataaatacaattgggaaacactggaaaaccatggcttgattactgacaaccaacctgcctctctaaagagggtgtataaagggtgaaatacattagatttggctcagaaacagaatgcggtacttataaagcagaataaaggggagaacagtagtagttgatctaacccagattagacatgaataccagcatatgtttgcagagtcccacagttttgattcttcttataactttttgaggtgcaaaaggaaggtaccagaactggaatcgcatgtaatcaatcagtgtgattttcccctcataccacacagccataggctgcagtgtggctgctgaagttcaattgatataaagtaaatcaggcttcaaaaagaatggtgctgtgggtacacaaggacataaagatgggaacgatagacactgaggactgcggcggggggagcgaggggagcggggagggcaagggctgaaagactatgtattgggtactatgctcacaacctggatgatgggatcattcataccacaaacctcagtatcacacaatatacccatgtaacaacctgcactctgcacatgtacccttagaatctaaaataaaagttgaaattattttttt

SEQ ID NO: 279020 - DNA, 3681 bp, Homo sapiens
gtgatttcatccttatgtgaaaaagggcttagtactgtgctggccatttagtaagtggttaataaactgtgctatcatttacatgatcatcgctgccagaggttgtagatccttgggatatgaatgaagctgatctcacgcatttggactacctaattagtaataaggaccaaacctaaaagagaggtagtaaatgaattgaggaggactgaggcctttccattcatcactgtggagtcctgtacattaaggctcaggtcatatggagatggctgggtctgtgaggcttaggcttaggggacctatgaggctggaccaaaaaaaatctagacattaatgcatggctagagttggaggttctgttgtagatttgctcatgtaggcatgtgactgcagattataatcacaaattgagtaataagtacaaagaggaaggaaggcaggatgtgaaatctgttggccatgttccacacagtctggagtgtatgtcagtgtgagctgaagaccagcagagactaggatggatgacggcctgtccaggggctgaatggacacaggtgtcagcagggccacctggtaaaggtatggaggtgagccagccatgagagggtatcttgtggccatattcctgagtgctgtcttcctctattatgtactgcattgcatattatggggaacgaatgtctattgggtggcacctgtggaaatgaaacggagaaataagatccagccttgtttatcaaagccagcttttgcctctctgctgaggtttcatcagtttcacccttttctgtgtgcggctgattttagaaagattgcttccttgtatggtagcgataagtttgatttgccctatgggatgagaacatcagcggaatattttcgacttgctctttcaaaactgcagagttgtgatctctttgatgagtttgacaacataccctgtaaaaagtgtgtggtggttggtaatggaggagttttgaagaataagacattaggagaaaaaatcgactcctatgatgtaataataagaatgaataatggtcctgttttaggacatgaagaagaagttgggagaaggacaaccttccgacttttttatccagaatctgttttttcagatcctattcacaatgaccctaatacgacagtgattctcactgcttttaagccacatgatttaaggtggctgttggaattgttgatgggtgacaaaataaacactaatggtttttggaagaaaccagccttaaacctgatttataaaccttatcaaatccgaatattagatcctttcattatcagaacagcagcttatgaactgcttcattttccaaaagtgtttcccaaaaatcagaaacctaaacacccaacaacaggaattattgccatcacattggcgttttacatatgtcacgaagttcacctagctggttttaaatacaacttttctgacctcaagagtcctttgcactactatgggaatgccaccatgtctttgatgaataagaacgcgtatcacaatgtgactgcagagcagctctttttgaaggacattatagaaaaaaacctcgtaatcaacttgactcaagattgactctacagactcagaagatgatgctaacagtgttagttttatttttgtactgcaatttttagtttaaaatatgttggatgcactcgtcaaataattatgtatactgtctgttgctgcctggtgattcataaccaccagcttaatttctgtgaatactgtatatttaacttatgaaaaccaagaaatgtaaagataacaggaaaataagttttgattgcattgtttttaaaataagctagttttctgaggtgttttcacacgtctttttatagttacttcatcttagatttttgaagggatatgacttcctactaaggatttagtttaccacaacaattctgactacaataagacattttgaggaggatatttggctactgtaaacatggctggtggaaaatcacgattgtggcttgatgtggcaagccgaaaccacttggctctggaaatctaagttcatactggtttaattaagctctctcctgacaacccccagaattaaatgaaccatgattgtgaagagtaatttggtacaatgaaggcagtgtttgtttttaagttaaaggaaatgggctaaacataaagttcttattagataagtaaataactaaagaaagaatacaattactaaactctgatggctttgtattattttaaagaaatgaagtttaactttatacaatgaagctaagctaggcaagctcaagaaggaaaaaaaaatcttgaacattatttttttttgcctgacttacttattcattaaattttgaaggttttccacttgaagtaaattaggaaaggtaaagaagataacagaacaagtaaacacttaagaaaagtcaagctgaggccgggcagggtggctcacacctgtaatcctaacaaacactttgggaggccgagggaggcagctggattgcctgaactcaggagttcaagaccagcctggccaacatggtgaaacctcatctctactaaaatacaaaataattagctgggcgtggtggtatgcgctgtagtcccaggtactcgggaggctgaggcacgagaattgcttgagcccgggaggcagaggttgcagtgagccaagatcgcgccactgcacttcagcctgggtgacagagtgaggctgtcttctaaaaaatataaaaagtgaagttgggatttttggatttaaatggtacaaaaagaatatctcattttcccatgattaaagctaatcttcagatggaaagcttgcctggctacctagggtgcaccagagaatctgatccaatgcaagccagtcaatcctacaaatgtggtgagctagtcttccttcctatattttaataaatgtaaccaaaggccatctggaggtaggggaatgagaggtgaagaaacagaaaaatagaggttataaggatggaactaaaagttgtcagaagaggtatgagctgaagaaagaattactctcttttgaccaataaatacaattgggaaacactggaaaaccatggcttgattactgacaaccaacctgcctctctaaagagggtgtataaagggtgaaatacattagatttggctcagaaacagaatgcggtacttataaagcagaataaaggggagaacagtagtagttgatctaacccagattagacatgaataccagcatatgtttgcagagtcccacagttttgattcttcttataactttttgaggtgcaaaaggaaggtaccagaactggaatcgcatgtaatcaatcagtgtgattttcccctcataccacacagccataggctgcagtgtggctgctgaagttcaattgatataaagtaaatcaggcttcaaaaagaatggtgctgtgggtacacaaggacataaagatgggaacgatagacactgaggactgcggcggggggagcgaggggagcggggagggcaagggctgaaagactatgtattgggtactatgctcacaacctggatgatgggatcattcataccacaaacctcagtatcacacaatatacccatgtaacaacctgcactctgcacatgtacccttagaatctaaaataaaagttgaaattattttttt

SEQ ID NO: 279021 - DNA, 3554 bp, Homo sapiens
ctggcgggagcctgagactccgggcagggctgctccctcctctgctcccccgccagatccgcggggaaggaatcgtgcccgcgccgcccctggcccgcgccaccttcctttggtttctgccggcctcgggcttctgcggcccgatgtggcaggcgccgcgagagaggcagcagccggctggagcagcggcccctcaggtctcggagcccggtgcgcctctgcggtcgtcgctcctgggcctcggcgggtcactcttgccggccggcttcgctgcgggtttgcactgcccggcatttgcaagtgaggaagcagcacaaccctgggttttagataatttctaacagagaggccccagcaattcagcaggcagcgtcctgagtctttggcagcctggtccctctttcgcaaattctccacctttgcgaacagagggtctttaggacacagattcttaaaagtgcaggtgagccagccatgagagggtatcttgtggccatattcctgagtgctgtcttcctctattatgtactgcattgcatattatggggaacgaatgtctattgggtggcacctgtggaaatgaaacggagaaataagatccagccttgtttatcaaagccagcttttgcctctctgctgaggtttcatcagtttcacccttttctgtgtgcggctgattttagaaagattgcttccttgtatggtagcgataagtttgatttgccctatgggatgagaacatcagcggaatattttcgacttgctctttcaaaactgcagagttgtgatctctttgatgagtttgacaacataccctgtaaaaagtgtgtggtggttggtaatggaggagttttgaagaataagacattaggagaaaaaatcgactcctatgatgtaataataagaatgaataatggtcctgttttaggacatgaagaagaagttgggagaaggacaaccttccgacttttttatccagaatctgttttttcagatcctattcacaatgaccctaatacgacagtgattctcactgcttttaagccacatgatttaaggtggctgttggaattgttgatgggtgacaaaataaacactaatggtttttggaagaaaccagccttaaacctgatttataaaccttatcaaatccgaatattagatcctttcattatcagaacagcagcttatgaactgcttcattttccaaaagtgtttcccaaaaatcagaaacctaaacacccaacaacaggaattattgccatcacattggcgttttacatatgtcacgaagttcacctagctggttttaaatacaacttttctgacctcaagagtcctttgcactactatgggaatgccaccatgtctttgatgaataagaacgcgtatcacaatgtgactgcagagcagctctttttgaaggacattatagaaaaaaacctcgtaatcaacttgactcaagattgactctacagactcagaagatgatgctaacagtgttagttttatttttgtactgcaatttttagtttaaaatatgttggatgcactcgtcaaataattatgtatactgtctgttgctgcctggtgattcataaccaccagcttaatttctgtgaatactgtatatttaacttatgaaaaccaagaaatgtaaagataacaggaaaataagttttgattgcattgtttttaaaataagctagttttctgaggtgttttcacacgtctttttatagttacttcatcttagatttttgaagggatatgacttcctactaaggatttagtttaccacaacaattctgactacaataagacattttgaggaggatatttggctactgtaaacatggctggtggaaaatcacgattgtggcttgatgtggcaagccgaaaccacttggctctggaaatctaagttcatactggtttaattaagctctctcctgacaacccccagaattaaatgaaccatgattgtgaagagtaatttggtacaatgaaggcagtgtttgtttttaagttaaaggaaatgggctaaacataaagttcttattagataagtaaataactaaagaaagaatacaattactaaactctgatggctttgtattattttaaagaaatgaagtttaactttatacaatgaagctaagctaggcaagctcaagaaggaaaaaaaaatcttgaacattatttttttttgcctgacttacttattcattaaattttgaaggttttccacttgaagtaaattaggaaaggtaaagaagataacagaacaagtaaacacttaagaaaagtcaagctgaggccgggcagggtggctcacacctgtaatcctaacaaacactttgggaggccgagggaggcagctggattgcctgaactcaggagttcaagaccagcctggccaacatggtgaaacctcatctctactaaaatacaaaataattagctgggcgtggtggtatgcgctgtagtcccaggtactcgggaggctgaggcacgagaattgcttgagcccgggaggcagaggttgcagtgagccaagatcgcgccactgcacttcagcctgggtgacagagtgaggctgtcttctaaaaaatataaaaagtgaagttgggatttttggatttaaatggtacaaaaagaatatctcattttcccatgattaaagctaatcttcagatggaaagcttgcctggctacctagggtgcaccagagaatctgatccaatgcaagccagtcaatcctacaaatgtggtgagctagtcttccttcctatattttaataaatgtaaccaaaggccatctggaggtaggggaatgagaggtgaagaaacagaaaaatagaggttataaggatggaactaaaagttgtcagaagaggtatgagctgaagaaagaattactctcttttgaccaataaatacaattgggaaacactggaaaaccatggcttgattactgacaaccaacctgcctctctaaagagggtgtataaagggtgaaatacattagatttggctcagaaacagaatgcggtacttataaagcagaataaaggggagaacagtagtagttgatctaacccagattagacatgaataccagcatatgtttgcagagtcccacagttttgattcttcttataactttttgaggtgcaaaaggaaggtaccagaactggaatcgcatgtaatcaatcagtgtgattttcccctcataccacacagccataggctgcagtgtggctgctgaagttcaattgatataaagtaaatcaggcttcaaaaagaatggtgctgtgggtacacaaggacataaagatgggaacgatagacactgaggactgcggcggggggagcgaggggagcggggagggcaagggctgaaagactatgtattgggtactatgctcacaacctggatgatgggatcattcataccacaaacctcagtatcacacaatatacccatgtaacaacctgcactctgcacatgtacccttagaatctaaaataaaagttgaaattattttttt

SEQ ID NO: 279022 - DNA, 3399 bp, Homo sapiens
acgcgaggagggttgaggggtctggaaggttctggtctcttaccgtataaagtttttcgagaaaccctttttccctccacaatggaactagacctaacaaaacaagctccgaggcagtttaggagaaaggaggacgcatttgcaagtgaggaagcagcacaaccctgggttttagataatttctaacagagaggccccagcaattcagcaggcagcgtcctgagtctttggcagcctggtccctctttcgcaaattctccacctttgcgaacagagggtctttaggacacagattcttaaaagtgcaggtgagccagccatgagagggtatcttgtggccatattcctgagtgctgtcttcctctattatgtactgcattgcatattatggggaacgaatgtctattgggtggcacctgtggaaatgaaacggagaaataagatccagccttgtttatcaaagccagcttttgcctctctgctgaggtttcatcagtttcacccttttctgtgtgcggctgattttagaaagattgcttccttgtatggtagcgataagtttgatttgccctatgggatgagaacatcagcggaatattttcgacttgctctttcaaaactgcagagttgtgatctctttgatgagtttgacaacataccctgtaaaaagtgtgtggtggttggtaatggaggagttttgaagaataagacattaggagaaaaaatcgactcctatgatgtaataataagaatgaataatggtcctgttttaggacatgaagaagaagttgggagaaggacaaccttccgacttttttatccagaatctgttttttcagatcctattcacaatgaccctaatacgacagtgattctcactgcttttaagccacatgatttaaggtggctgttggaattgttgatgggtgacaaaataaacactaatggtttttggaagaaaccagccttaaacctgatttataaaccttatcaaatccgaatattagatcctttcattatcagaacagcagcttatgaactgcttcattttccaaaagtgtttcccaaaaatcagaaacctaaacacccaacaacaggaattattgccatcacattggcgttttacatatgtcacgaagttcacctagctggttttaaatacaacttttctgacctcaagagtcctttgcactactatgggaatgccaccatgtctttgatgaataagaacgcgtatcacaatgtgactgcagagcagctctttttgaaggacattatagaaaaaaacctcgtaatcaacttgactcaagattgactctacagactcagaagatgatgctaacagtgttagttttatttttgtactgcaatttttagtttaaaatatgttggatgcactcgtcaaataattatgtatactgtctgttgctgcctggtgattcataaccaccagcttaatttctgtgaatactgtatatttaacttatgaaaaccaagaaatgtaaagataacaggaaaataagttttgattgcattgtttttaaaataagctagttttctgaggtgttttcacacgtctttttatagttacttcatcttagatttttgaagggatatgacttcctactaaggatttagtttaccacaacaattctgactacaataagacattttgaggaggatatttggctactgtaaacatggctggtggaaaatcacgattgtggcttgatgtggcaagccgaaaccacttggctctggaaatctaagttcatactggtttaattaagctctctcctgacaacccccagaattaaatgaaccatgattgtgaagagtaatttggtacaatgaaggcagtgtttgtttttaagttaaaggaaatgggctaaacataaagttcttattagataagtaaataactaaagaaagaatacaattactaaactctgatggctttgtattattttaaagaaatgaagtttaactttatacaatgaagctaagctaggcaagctcaagaaggaaaaaaaaatcttgaacattatttttttttgcctgacttacttattcattaaattttgaaggttttccacttgaagtaaattaggaaaggtaaagaagataacagaacaagtaaacacttaagaaaagtcaagctgaggccgggcagggtggctcacacctgtaatcctaacaaacactttgggaggccgagggaggcagctggattgcctgaactcaggagttcaagaccagcctggccaacatggtgaaacctcatctctactaaaatacaaaataattagctgggcgtggtggtatgcgctgtagtcccaggtactcgggaggctgaggcacgagaattgcttgagcccgggaggcagaggttgcagtgagccaagatcgcgccactgcacttcagcctgggtgacagagtgaggctgtcttctaaaaaatataaaaagtgaagttgggatttttggatttaaatggtacaaaaagaatatctcattttcccatgattaaagctaatcttcagatggaaagcttgcctggctacctagggtgcaccagagaatctgatccaatgcaagccagtcaatcctacaaatgtggtgagctagtcttccttcctatattttaataaatgtaaccaaaggccatctggaggtaggggaatgagaggtgaagaaacagaaaaatagaggttataaggatggaactaaaagttgtcagaagaggtatgagctgaagaaagaattactctcttttgaccaataaatacaattgggaaacactggaaaaccatggcttgattactgacaaccaacctgcctctctaaagagggtgtataaagggtgaaatacattagatttggctcagaaacagaatgcggtacttataaagcagaataaaggggagaacagtagtagttgatctaacccagattagacatgaataccagcatatgtttgcagagtcccacagttttgattcttcttataactttttgaggtgcaaaaggaaggtaccagaactggaatcgcatgtaatcaatcagtgtgattttcccctcataccacacagccataggctgcagtgtggctgctgaagttcaattgatataaagtaaatcaggcttcaaaaagaatggtgctgtgggtacacaaggacataaagatgggaacgatagacactgaggactgcggcggggggagcgaggggagcggggagggcaagggctgaaagactatgtattgggtactatgctcacaacctggatgatgggatcattcataccacaaacctcagtatcacacaatatacccatgtaacaacctgcactctgcacatgtacccttagaatctaaaataaaagttgaaattattttttt

SEQ ID NO: 279023 - DNA, 3102 bp, Homo sapiens
caagcctcagtgtttacttctgccgcctgccagccgggcggggaaggggagtacccggccacccctcactttagctcctgcagctttccaaacaaaccagggcgggatgggagtgtcttcttggctgtggaaatcgatcctcctaccttgtcctgaagccacccgccgcctttcctcgtccctcccttcgcggtgattttccggtcccggcgcccggcgagggcgcgcggctggtgtccgccccgcccgaaaggtttcatcagtttcacccttttctgtgtgcggctgattttagaaagattgcttccttgtatggtagcgataagtttgatttgccctatgggatgagaacatcagcataccctgtaaaaagtgtgtggtggttggtaatggaggagttttgaagaataagacattaggagaaaaaatcgactcctatgatgtaataataagaatgaataatggtcctgttttaggacatgaagaagaagttgggagaaggacaaccttccgacttttttatccagaatctgttttttcagatcctattcacaatgaccctaatacgacagtgattctcactgcttttaagccacatgatttaaggtggctgttggaattgttgatgggtgacaaaataaacactaatggtttttggaagaaaccagccttaaacctgatttataaaccttatcaaatccgaatattagatcctttcattatcagaacagcagcttatgaactgcttcattttccaaaagtgtttcccaaaaatcagaaacctaaacacccaacaacaggaattattgccatcacattggcgttttacatatgtcacgaagttcacctagctggttttaaatacaacttttctgacctcaagagtcctttgcactactatgggaatgccaccatgtctttgatgaataagaacgcgtatcacaatgtgactgcagagcagctctttttgaaggacattatagaaaaaaacctcgtaatcaacttgactcaagattgactctacagactcagaagatgatgctaacagtgttagttttatttttgtactgcaatttttagtttaaaatatgttggatgcactcgtcaaataattatgtatactgtctgttgctgcctggtgattcataaccaccagcttaatttctgtgaatactgtatatttaacttatgaaaaccaagaaatgtaaagataacaggaaaataagttttgattgcattgtttttaaaataagctagttttctgaggtgttttcacacgtctttttatagttacttcatcttagatttttgaagggatatgacttcctactaaggatttagtttaccacaacaattctgactacaataagacattttgaggaggatatttggctactgtaaacatggctggtggaaaatcacgattgtggcttgatgtggcaagccgaaaccacttggctctggaaatctaagttcatactggtttaattaagctctctcctgacaacccccagaattaaatgaaccatgattgtgaagagtaatttggtacaatgaaggcagtgtttgtttttaagttaaaggaaatgggctaaacataaagttcttattagataagtaaataactaaagaaagaatacaattactaaactctgatggctttgtattattttaaagaaatgaagtttaactttatacaatgaagctaagctaggcaagctcaagaaggaaaaaaaaatcttgaacattatttttttttgcctgacttacttattcattaaattttgaaggttttccacttgaagtaaattaggaaaggtaaagaagataacagaacaagtaaacacttaagaaaagtcaagctgaggccgggcagggtggctcacacctgtaatcctaacaaacactttgggaggccgagggaggcagctggattgcctgaactcaggagttcaagaccagcctggccaacatggtgaaacctcatctctactaaaatacaaaataattagctgggcgtggtggtatgcgctgtagtcccaggtactcgggaggctgaggcacgagaattgcttgagcccgggaggcagaggttgcagtgagccaagatcgcgccactgcacttcagcctgggtgacagagtgaggctgtcttctaaaaaatataaaaagtgaagttgggatttttggatttaaatggtacaaaaagaatatctcattttcccatgattaaagctaatcttcagatggaaagcttgcctggctacctagggtgcaccagagaatctgatccaatgcaagccagtcaatcctacaaatgtggtgagctagtcttccttcctatattttaataaatgtaaccaaaggccatctggaggtaggggaatgagaggtgaagaaacagaaaaatagaggttataaggatggaactaaaagttgtcagaagaggtatgagctgaagaaagaattactctcttttgaccaataaatacaattgggaaacactggaaaaccatggcttgattactgacaaccaacctgcctctctaaagagggtgtataaagggtgaaatacattagatttggctcagaaacagaatgcggtacttataaagcagaataaaggggagaacagtagtagttgatctaacccagattagacatgaataccagcatatgtttgcagagtcccacagttttgattcttcttataactttttgaggtgcaaaaggaaggtaccagaactggaatcgcatgtaatcaatcagtgtgattttcccctcataccacacagccataggctgcagtgtggctgctgaagttcaattgatataaagtaaatcaggcttcaaaaagaatggtgctgtgggtacacaaggacataaagatgggaacgatagacactgaggactgcggcggggggagcgaggggagcggggagggcaagggctgaaagactatgtattgggtactatgctcacaacctggatgatgggatcattcataccacaaacctcagtatcacacaatatacccatgtaacaacctgcactctgcacatgtacccttagaatctaaaataaaagttgaaattattttttt

SEQ ID NO: 279024 - DNA, 3512 bp, Homo sapiens
cccatgtgtgacaaatgtggtcctggcattgtaggcatgtttgtaaagctgcggggaccatcatcccctccctgaatgttacgtgtgcactgattgtgacactcacccgaaagagaagggcttttttttttttttttccatcaaatctactgtgaagagcatgcccaggagcaagtcacaccacttgagggtacgatgtgatcatcatgttccccaagtgatccagcagacctgcactgaccaccgttctccagccagcctctgctgcagctagttctctaaatgttctggccttgtctcttgaaagttctgtacttattcccccaccccacaacccgcttaccttggttttatccctgctcattgaaccttgagtcccttgtcttggttaactgactcacactgactgtgtggtgcccgcccacttttacaatgaatggcaaactgtttttgttcagtgtccccttgccggcaacactgtgtaccttcctcccctcagttcttctctgctgcaaatggacatcagccacatttgaaccaaatcaaatataatatgtctgacattgatttcatttttgctccatctatagactcccagaaaaaagaaataaaaaaaatgcaaagaaaatttaaatgaacaaacagacccttctggaacctactgtgacatgagatgtgtccacaaggcgaggtttcaggcacacactgaaggagcatctgctggacagccctccccgcccccaagtccttaccaacctgtgccactgcataccctgtaaaaagtgtgtggtggttggtaatggaggagttttgaagaataagacattaggagaaaaaatcgactcctatgatgtaataataagaatgaataatggtcctgttttaggacatgaagaagaagttgggagaaggacaaccttccgacttttttatccagaatctgttttttcagatcctattcacaatgaccctaatacgacagtgattctcactgcttttaagccacatgatttaaggtggctgttggaattgttgatgggtgacaaaataaacactaatggtttttggaagaaaccagccttaaacctgatttataaaccttatcaaatccgaatattagatcctttcattatcagaacagcagcttatgaactgcttcattttccaaaagtgtttcccaaaaatcagaaacctaaacacccaacaacaggaattattgccatcacattggcgttttacatatgtcacgaagttcacctagctggttttaaatacaacttttctgacctcaagagtcctttgcactactatgggaatgccaccatgtctttgatgaataagaacgcgtatcacaatgtgactgcagagcagctctttttgaaggacattatagaaaaaaacctcgtaatcaacttgactcaagattgactctacagactcagaagatgatgctaacagtgttagttttatttttgtactgcaatttttagtttaaaatatgttggatgcactcgtcaaataattatgtatactgtctgttgctgcctggtgattcataaccaccagcttaatttctgtgaatactgtatatttaacttatgaaaaccaagaaatgtaaagataacaggaaaataagttttgattgcattgtttttaaaataagctagttttctgaggtgttttcacacgtctttttatagttacttcatcttagatttttgaagggatatgacttcctactaaggatttagtttaccacaacaattctgactacaataagacattttgaggaggatatttggctactgtaaacatggctggtggaaaatcacgattgtggcttgatgtggcaagccgaaaccacttggctctggaaatctaagttcatactggtttaattaagctctctcctgacaacccccagaattaaatgaaccatgattgtgaagagtaatttggtacaatgaaggcagtgtttgtttttaagttaaaggaaatgggctaaacataaagttcttattagataagtaaataactaaagaaagaatacaattactaaactctgatggctttgtattattttaaagaaatgaagtttaactttatacaatgaagctaagctaggcaagctcaagaaggaaaaaaaaatcttgaacattatttttttttgcctgacttacttattcattaaattttgaaggttttccacttgaagtaaattaggaaaggtaaagaagataacagaacaagtaaacacttaagaaaagtcaagctgaggccgggcagggtggctcacacctgtaatcctaacaaacactttgggaggccgagggaggcagctggattgcctgaactcaggagttcaagaccagcctggccaacatggtgaaacctcatctctactaaaatacaaaataattagctgggcgtggtggtatgcgctgtagtcccaggtactcgggaggctgaggcacgagaattgcttgagcccgggaggcagaggttgcagtgagccaagatcgcgccactgcacttcagcctgggtgacagagtgaggctgtcttctaaaaaatataaaaagtgaagttgggatttttggatttaaatggtacaaaaagaatatctcattttcccatgattaaagctaatcttcagatggaaagcttgcctggctacctagggtgcaccagagaatctgatccaatgcaagccagtcaatcctacaaatgtggtgagctagtcttccttcctatattttaataaatgtaaccaaaggccatctggaggtaggggaatgagaggtgaagaaacagaaaaatagaggttataaggatggaactaaaagttgtcagaagaggtatgagctgaagaaagaattactctcttttgaccaataaatacaattgggaaacactggaaaaccatggcttgattactgacaaccaacctgcctctctaaagagggtgtataaagggtgaaatacattagatttggctcagaaacagaatgcggtacttataaagcagaataaaggggagaacagtagtagttgatctaacccagattagacatgaataccagcatatgtttgcagagtcccacagttttgattcttcttataactttttgaggtgcaaaaggaaggtaccagaactggaatcgcatgtaatcaatcagtgtgattttcccctcataccacacagccataggctgcagtgtggctgctgaagttcaattgatataaagtaaatcaggcttcaaaaagaatggtgctgtgggtacacaaggacataaagatgggaacgatagacactgaggactgcggcggggggagcgaggggagcggggagggcaagggctgaaagactatgtattgggtactatgctcacaacctggatgatgggatcattcataccacaaacctcagtatcacacaatatacccatgtaacaacctgcactctgcacatgtacccttagaatctaaaataaaagttgaaattattttttt

SEQ ID NO: 279025 - DNA, 2604 bp, Homo sapiens
ggccactttctcagaaacagaaaagccagcagcaatttggagaagctcttctgggaaacctggagcttttatcttcagtgttataaagagaacatctttccttataattaggcttgggtgtggatttcagctgtcatttatgggatagtgaccccagacttgtcatagctgatacaacttcacatatatggtttcatcagtttcacccttttctgtgtgcggctgattttagaaagattgcttccttgtatggtagcgataagtttgatttgccctatgggatgagaacatcagtgattggcctatatagcattaagttctagatttttgagggatcataaaagcccaaggtgacaagccttcaacattcggaatattttcgacttgctctttcaaaactgcagagttgtgatctctttgatgagtttgacaaaacgcgtatcacaatgtgactgcagagcagctctttttgaaggacattatagaaaaaaacctcgtaatcaacttgactcaagattgactctacagactcagaagatgatgctaacagtgttagttttatttttgtactgcaatttttagtttaaaatatgttggatgcactcgtcaaataattatgtatactgtctgttgctgcctggtgattcataaccaccagcttaatttctgtgaatactgtatatttaacttatgaaaaccaagaaatgtaaagataacaggaaaataagttttgattgcattgtttttaaaataagctagttttctgaggtgttttcacacgtctttttatagttacttcatcttagatttttgaagggatatgacttcctactaaggatttagtttaccacaacaattctgactacaataagacattttgaggaggatatttggctactgtaaacatggctggtggaaaatcacgattgtggcttgatgtggcaagccgaaaccacttggctctggaaatctaagttcatactggtttaattaagctctctcctgacaacccccagaattaaatgaaccatgattgtgaagagtaatttggtacaatgaaggcagtgtttgtttttaagttaaaggaaatgggctaaacataaagttcttattagataagtaaataactaaagaaagaatacaattactaaactctgatggctttgtattattttaaagaaatgaagtttaactttatacaatgaagctaagctaggcaagctcaagaaggaaaaaaaaatcttgaacattatttttttttgcctgacttacttattcattaaattttgaaggttttccacttgaagtaaattaggaaaggtaaagaagataacagaacaagtaaacacttaagaaaagtcaagctgaggccgggcagggtggctcacacctgtaatcctaacaaacactttgggaggccgagggaggcagctggattgcctgaactcaggagttcaagaccagcctggccaacatggtgaaacctcatctctactaaaatacaaaataattagctgggcgtggtggtatgcgctgtagtcccaggtactcgggaggctgaggcacgagaattgcttgagcccgggaggcagaggttgcagtgagccaagatcgcgccactgcacttcagcctgggtgacagagtgaggctgtcttctaaaaaatataaaaagtgaagttgggatttttggatttaaatggtacaaaaagaatatctcattttcccatgattaaagctaatcttcagatggaaagcttgcctggctacctagggtgcaccagagaatctgatccaatgcaagccagtcaatcctacaaatgtggtgagctagtcttccttcctatattttaataaatgtaaccaaaggccatctggaggtaggggaatgagaggtgaagaaacagaaaaatagaggttataaggatggaactaaaagttgtcagaagaggtatgagctgaagaaagaattactctcttttgaccaataaatacaattgggaaacactggaaaaccatggcttgattactgacaaccaacctgcctctctaaagagggtgtataaagggtgaaatacattagatttggctcagaaacagaatgcggtacttataaagcagaataaaggggagaacagtagtagttgatctaacccagattagacatgaataccagcatatgtttgcagagtcccacagttttgattcttcttataactttttgaggtgcaaaaggaaggtaccagaactggaatcgcatgtaatcaatcagtgtgattttcccctcataccacacagccataggctgcagtgtggctgctgaagttcaattgatataaagtaaatcaggcttcaaaaagaatggtgctgtgggtacacaaggacataaagatgggaacgatagacactgaggactgcggcggggggagcgaggggagcggggagggcaagggctgaaagactatgtattgggtactatgctcacaacctggatgatgggatcattcataccacaaacctcagtatcacacaatatacccatgtaacaacctgcactctgcacatgtacccttagaatctaaaataaaagttgaaattattttttt

SEQ ID NO: 279026 - DNA, 2280 bp, Homo sapiens
aacattcgagttctttattcggatttttttagatataaagtactccattggtgctgctaatactttgagattgggaaagaatgatggtaattgtatttttcttctttagaacgcgtatcacaatgtgactgcagagcagctctttttgaaggacattatagaaaaaaacctcgtaatcaacttgactcaagattgactctacagactcagaagatgatgctaacagtgttagttttatttttgtactgcaatttttagtttaaaatatgttggatgcactcgtcaaataattatgtatactgtctgttgctgcctggtgattcataaccaccagcttaatttctgtgaatactgtatatttaacttatgaaaaccaagaaatgtaaagataacaggaaaataagttttgattgcattgtttttaaaataagctagttttctgaggtgttttcacacgtctttttatagttacttcatcttagatttttgaagggatatgacttcctactaaggatttagtttaccacaacaattctgactacaataagacattttgaggaggatatttggctactgtaaacatggctggtggaaaatcacgattgtggcttgatgtggcaagccgaaaccacttggctctggaaatctaagttcatactggtttaattaagctctctcctgacaacccccagaattaaatgaaccatgattgtgaagagtaatttggtacaatgaaggcagtgtttgtttttaagttaaaggaaatgggctaaacataaagttcttattagataagtaaataactaaagaaagaatacaattactaaactctgatggctttgtattattttaaagaaatgaagtttaactttatacaatgaagctaagctaggcaagctcaagaaggaaaaaaaaatcttgaacattatttttttttgcctgacttacttattcattaaattttgaaggttttccacttgaagtaaattaggaaaggtaaagaagataacagaacaagtaaacacttaagaaaagtcaagctgaggccgggcagggtggctcacacctgtaatcctaacaaacactttgggaggccgagggaggcagctggattgcctgaactcaggagttcaagaccagcctggccaacatggtgaaacctcatctctactaaaatacaaaataattagctgggcgtggtggtatgcgctgtagtcccaggtactcgggaggctgaggcacgagaattgcttgagcccgggaggcagaggttgcagtgagccaagatcgcgccactgcacttcagcctgggtgacagagtgaggctgtcttctaaaaaatataaaaagtgaagttgggatttttggatttaaatggtacaaaaagaatatctcattttcccatgattaaagctaatcttcagatggaaagcttgcctggctacctagggtgcaccagagaatctgatccaatgcaagccagtcaatcctacaaatgtggtgagctagtcttccttcctatattttaataaatgtaaccaaaggccatctggaggtaggggaatgagaggtgaagaaacagaaaaatagaggttataaggatggaactaaaagttgtcagaagaggtatgagctgaagaaagaattactctcttttgaccaataaatacaattgggaaacactggaaaaccatggcttgattactgacaaccaacctgcctctctaaagagggtgtataaagggtgaaatacattagatttggctcagaaacagaatgcggtacttataaagcagaataaaggggagaacagtagtagttgatctaacccagattagacatgaataccagcatatgtttgcagagtcccacagttttgattcttcttataactttttgaggtgcaaaaggaaggtaccagaactggaatcgcatgtaatcaatcagtgtgattttcccctcataccacacagccataggctgcagtgtggctgctgaagttcaattgatataaagtaaatcaggcttcaaaaagaatggtgctgtgggtacacaaggacataaagatgggaacgatagacactgaggactgcggcggggggagcgaggggagcggggagggcaagggctgaaagactatgtattgggtactatgctcacaacctggatgatgggatcattcataccacaaacctcagtatcacacaatatacccatgtaacaacctgcactctgcacatgtacccttagaatctaaaataaaagttgaaattattttttt

SEQ ID NO: 279027 - DNA, 1104 bp, Homo sapiens
caagcctcagtgtttacttctgccgcctgccagccgggcggggaaggggagtacccggccacccctcactttagctcctgcagctttccaaacaaaccagggcgggatgggagtgtcttcttggctgtggaaatcgatcctcctaccttgtcctgaagccacccgccgcctttcctcgtccctcccttcgcggtgattttccggtcccggcgcccggcgagggcgcgcggctggtgtccgccccgcccgaaaggtgagccagccatgagagggtatcttgtggccatattcctgagtgctgtcttcctctattatgtactgcattgcatattatggggaacgaatgtctattgggtggcacctgtggaaatgaaacggagaaataagatccagccttgtttatcaaagccagcttttgcctctctgctgaggtttcatcagtttcacccttttctgtgtgcggctgattttagaaagattgcttccttgtatggtagcgataagtttgatttgccctatgggatgagaacatcagcggaatattttcgacttgctctttcaaaactgcagagttgtgatctctttgatgagtttgacaacataccctgtaaaaagtgtgtggtggttggtaatggaggagttttgaagaataagacattaggagaaaaaatcgactcctatgatgtaataataagaatgaataatggtcctgttttaggacatgaagaagaagttgggagaaggacaaccttccgacttttttatccagaatctgttttttcagatcctattcacaatgaccctaatacgacagtgattctcactgcttttaagccacatgatttaaggtggctgttggaattgttgatgggtgacaaaataaacactaatggtttttggaagaaaccagccttaaacctgatttataaaccttatcaaatccgaatattagatcctttcattatcagaacagcagcttatgaactgcttcattttccaaaagtgtttcccaaaaatcagaaacctaaacacccaacaacaggaattattgccatttttacataacctctatgattttaataaaaaaaattatgtaaaaaaaaa

SEQ ID NO: 279028 - DNA, 761 bp, Homo sapiens
taaaatataaattatcactccttttgaggcagtatagaaccaaaggataacaggggtagatttgttgttgttgagaaactactttttacatttgctctgccgccatgtgatccatgtaagttctggtgccttactttattctaatttagaattagcaggaaaacctgagggttagcttccttcctagcttcccatggcttctttttacctgtgagttttatctcatcagcgattcttatctccttaagcagtcttttaatttaaccagtggatattttatttttgttaagtttagagataattattccatcttctaatgataaaacactttcccttctgcttgttgataagtgattggcctatatagcattaagttctagatttttgagggatcataaaagcccaaggtgacaagccttcaacattgtgagtcatattttgcttattcaactgatcctgtgagggtgggggttgtatttttttgttttattttttattttaaaactattttgcagagaatttgagaatttaattgggttaaacttactatttctattctaacatcaatttcagaatcgtgctattttaaaattatatgattgtttttcagattaaatgtgttgttttttggggaggttttggaaagtgtctttagagcatttacgattttgaatgggcctgctgaagtagtgctggctaattgcagttgtatcattaatttttcacagaataaatcaatgtggccatgctggttggaaatg

SEQ ID NO: 279029 - DNA, 99 bp, Homo sapiens
tgagaaactactttttacatttgctctgccgccatgtgatccatgtaagttctggtgccttactttattctaatttagaattagcaggaaaacctgagg

SEQ ID NO: 279030 - DNA, 3382 bp, Homo sapiens
ctggcgggagcctgagactccgggcagggctgctccctcctctgctcccccgccagatccgcggggaaggaatcgtgcccgcgccgcccctggcccgcgccaccttcctttggtttctgccggcctcgggcttctgcggcccgatgtggcaggcgccgcgagagaggcagcagccggctggagcagcggcccctcaggtctcggagcccggtgcgcctctgcggtcgtcgctcctgggcctcggcgggtcactcttgccggccggcttcgctgcgggtttgcactgcccgggtgagccagccatgagagggtatcttgtggccatattcctgagtgctgtcttcctctattatgtactgcattgcatattatggggaacgaatgtctattgggtggcacctgtggaaatgaaacggagaaataagatccagccttgtttatcaaagccagcttttgcctctctgctgaggtttcatcagtttcacccttttctgtgtgcggctgattttagaaagattgcttccttgtatggtagcgataagtttgatttgccctatgggatgagaacatcagcggaatattttcgacttgctctttcaaaactgcagagttgtgatctctttgatgagtttgacaacataccctgtaaaaagtgtgtggtggttggtaatggaggagttttgaagaataagacattaggagaaaaaatcgactcctatgatgtaataataagaatgaataatggtcctgttttaggacatgaagaagaagttgggagaaggacaaccttccgacttttttatccagaatctgttttttcagatcctattcacaatgaccctaatacgacagtgattctcactgcttttaagccacatgatttaaggtggctgttggaattgttgatgggtgacaaaataaacactaatggtttttggaagaaaccagccttaaacctgatttataaaccttatcaaatccgaatattagatcctttcattatcagaacagcagcttatgaactgcttcattttccaaaagtgtttcccaaaaatcagaaacctaaacacccaacaacaggaattattgccatcacattggcgttttacatatgtcacgaagttcacctagctggttttaaatacaacttttctgacctcaagagtcctttgcactactatgggaatgccaccatgtctttgatgaataagaacgcgtatcacaatgtgactgcagagcagctctttttgaaggacattatagaaaaaaacctcgtaatcaacttgactcaagattgactctacagactcagaagatgatgctaacagtgttagttttatttttgtactgcaatttttagtttaaaatatgttggatgcactcgtcaaataattatgtatactgtctgttgctgcctggtgattcataaccaccagcttaatttctgtgaatactgtatatttaacttatgaaaaccaagaaatgtaaagataacaggaaaataagttttgattgcattgtttttaaaataagctagttttctgaggtgttttcacacgtctttttatagttacttcatcttagatttttgaagggatatgacttcctactaaggatttagtttaccacaacaattctgactacaataagacattttgaggaggatatttggctactgtaaacatggctggtggaaaatcacgattgtggcttgatgtggcaagccgaaaccacttggctctggaaatctaagttcatactggtttaattaagctctctcctgacaacccccagaattaaatgaaccatgattgtgaagagtaatttggtacaatgaaggcagtgtttgtttttaagttaaaggaaatgggctaaacataaagttcttattagataagtaaataactaaagaaagaatacaattactaaactctgatggctttgtattattttaaagaaatgaagtttaactttatacaatgaagctaagctaggcaagctcaagaaggaaaaaaaaatcttgaacattatttttttttgcctgacttacttattcattaaattttgaaggttttccacttgaagtaaattaggaaaggtaaagaagataacagaacaagtaaacacttaagaaaagtcaagctgaggccgggcagggtggctcacacctgtaatcctaacaaacactttgggaggccgagggaggcagctggattgcctgaactcaggagttcaagaccagcctggccaacatggtgaaacctcatctctactaaaatacaaaataattagctgggcgtggtggtatgcgctgtagtcccaggtactcgggaggctgaggcacgagaattgcttgagcccgggaggcagaggttgcagtgagccaagatcgcgccactgcacttcagcctgggtgacagagtgaggctgtcttctaaaaaatataaaaagtgaagttgggatttttggatttaaatggtacaaaaagaatatctcattttcccatgattaaagctaatcttcagatggaaagcttgcctggctacctagggtgcaccagagaatctgatccaatgcaagccagtcaatcctacaaatgtggtgagctagtcttccttcctatattttaataaatgtaaccaaaggccatctggaggtaggggaatgagaggtgaagaaacagaaaaatagaggttataaggatggaactaaaagttgtcagaagaggtatgagctgaagaaagaattactctcttttgaccaataaatacaattgggaaacactggaaaaccatggcttgattactgacaaccaacctgcctctctaaagagggtgtataaagggtgaaatacattagatttggctcagaaacagaatgcggtacttataaagcagaataaaggggagaacagtagtagttgatctaacccagattagacatgaataccagcatatgtttgcagagtcccacagttttgattcttcttataactttttgaggtgcaaaaggaaggtaccagaactggaatcgcatgtaatcaatcagtgtgattttcccctcataccacacagccataggctgcagtgtggctgctgaagttcaattgatataaagtaaatcaggcttcaaaaagaatggtgctgtgggtacacaaggacataaagatgggaacgatagacactgaggactgcggcggggggagcgaggggagcggggagggcaagggctgaaagactatgtattgggtactatgctcacaacctggatgatgggatcattcataccacaaacctcagtatcacacaatatacccatgtaacaacctgcactctgcacatgtacccttagaatctaaaataaaagttgaaattattttttt

SEQ ID NO: 279031 - DNA, 3208 bp, Homo sapiens
tgctggtacggtcggaattttgggatccgccgcctttcctcgtccctcccttcgcggtgattttccggtcccggcgcccggcgagggcgcgcggctggtgtccgccccgcccgaaaggtgagccagccatgagagggtatcttgtggccatattcctgagtgctgtcttcctctattatgtactgcattgcatattatggggaacgaatgtctattgggtggcacctgtggaaatgaaacggagaaataagatccagccttgtttatcaaagccagcttttgcctctctgctgaggtttcatcagtttcacccttttctgtgtgcggctgattttagaaagattgcttccttgtatggtagcgataagtttgatttgccctatgggatgagaacatcagcggaatattttcgacttgctctttcaaaactgcagagttgtgatctctttgatgagtttgacaacataccctgtaaaaagtgtgtggtggttggtaatggaggagttttgaagaataagacattaggagaaaaaatcgactcctatgatgtaataataagaatgaataatggtcctgttttaggacatgaagaagaagttgggagaaggacaaccttccgacttttttatccagaatctgttttttcagatcctattcacaatgaccctaatacgacagtgattctcactgcttttaagccacatgatttaaggtggctgttggaattgttgatgggtgacaaaataaacactaatggtttttggaagaaaccagccttaaacctgatttataaaccttatcaaatccgaatattagatcctttcattatcagaacagcagcttatgaactgcttcattttccaaaagtgtttcccaaaaatcagaaacctaaacacccaacaacaggaattattgccatcacattggcgttttacatatgtcacgaagttcacctagctggttttaaatacaacttttctgacctcaagagtcctttgcactactatgggaatgccaccatgtctttgatgaataagaacgcgtatcacaatgtgactgcagagcagctctttttgaaggacattatagaaaaaaacctcgtaatcaacttgactcaagattgactctacagactcagaagatgatgctaacagtgttagttttatttttgtactgcaatttttagtttaaaatatgttggatgcactcgtcaaataattatgtatactgtctgttgctgcctggtgattcataaccaccagcttaatttctgtgaatactgtatatttaacttatgaaaaccaagaaatgtaaagataacaggaaaataagttttgattgcattgtttttaaaataagctagttttctgaggtgttttcacacgtctttttatagttacttcatcttagatttttgaagggatatgacttcctactaaggatttagtttaccacaacaattctgactacaataagacattttgaggaggatatttggctactgtaaacatggctggtggaaaatcacgattgtggcttgatgtggcaagccgaaaccacttggctctggaaatctaagttcatactggtttaattaagctctctcctgacaacccccagaattaaatgaaccatgattgtgaagagtaatttggtacaatgaaggcagtgtttgtttttaagttaaaggaaatgggctaaacataaagttcttattagataagtaaataactaaagaaagaatacaattactaaactctgatggctttgtattattttaaagaaatgaagtttaactttatacaatgaagctaagctaggcaagctcaagaaggaaaaaaaaatcttgaacattatttttttttgcctgacttacttattcattaaattttgaaggttttccacttgaagtaaattaggaaaggtaaagaagataacagaacaagtaaacacttaagaaaagtcaagctgaggccgggcagggtggctcacacctgtaatcctaacaaacactttgggaggccgagggaggcagctggattgcctgaactcaggagttcaagaccagcctggccaacatggtgaaacctcatctctactaaaatacaaaataattagctgggcgtggtggtatgcgctgtagtcccaggtactcgggaggctgaggcacgagaattgcttgagcccgggaggcagaggttgcagtgagccaagatcgcgccactgcacttcagcctgggtgacagagtgaggctgtcttctaaaaaatataaaaagtgaagttgggatttttggatttaaatggtacaaaaagaatatctcattttcccatgattaaagctaatcttcagatggaaagcttgcctggctacctagggtgcaccagagaatctgatccaatgcaagccagtcaatcctacaaatgtggtgagctagtcttccttcctatattttaataaatgtaaccaaaggccatctggaggtaggggaatgagaggtgaagaaacagaaaaatagaggttataaggatggaactaaaagttgtcagaagaggtatgagctgaagaaagaattactctcttttgaccaataaatacaattgggaaacactggaaaaccatggcttgattactgacaaccaacctgcctctctaaagagggtgtataaagggtgaaatacattagatttggctcagaaacagaatgcggtacttataaagcagaataaaggggagaacagtagtagttgatctaacccagattagacatgaataccagcatatgtttgcagagtcccacagttttgattcttcttataactttttgaggtgcaaaaggaaggtaccagaactggaatcgcatgtaatcaatcagtgtgattttcccctcataccacacagccataggctgcagtgtggctgctgaagttcaattgatataaagtaaatcaggcttcaaaaagaatggtgctgtgggtacacaaggacataaagatgggaacgatagacactgaggactgcggcggggggagcgaggggagcggggagggcaagggctgaaagactatgtattgggtactatgctcacaacctggatgatgggatcattcataccacaaacctcagtatcacacaatatacccatgtaacaacctgcactctgcacatgtacccttagaatctaaaataaaagttgaaattattttttt

SEQ ID NO: 279032 - DNA, 3295 bp, Homo sapiens
  misc_feature (21)..(21): n is a, c, g, or t
gggtattatgaccgggcctcngggccttcgtgcggcaccgtatgtgagctgagcgctggctgagaagacgtgcgtgcaccgtacggactagtacgcaggcggcccctcaggtctcggagcccggtgcgcctctgcggtcgtcgctcctgggcctcggcgggtcactcttgccggccggcttcgctgcgggtttgcactgcccgggtgagccagccatgagagggtatcttgtggccatattcctgagtgctgtcttcctctattatgtactgcattgcatattatggggaacgaatgtctattgggtggcacctgtggaaatgaaacggagaaataagatccagccttgtttatcaaagccagcttttgcctctctgctgaggtttcatcagtttcacccttttctgtgtgcggctgattttagaaagattgcttccttgtatggtagcgataagtttgatttgccctatgggatgagaacatcagcggaatattttcgacttgctctttcaaaactgcagagttgtgatctctttgatgagtttgacaacataccctgtaaaaagtgtgtggtggttggtaatggaggagttttgaagaataagacattaggagaaaaaatcgactcctatgatgtaataataagaatgaataatggtcctgttttaggacatgaagaagaagttgggagaaggacaaccttccgacttttttatccagaatctgttttttcagatcctattcacaatgaccctaatacgacagtgattctcactgcttttaagccacatgatttaaggtggctgttggaattgttgatgggtgacaaaataaacactaatggtttttggaagaaaccagccttaaacctgatttataaaccttatcaaatccgaatattagatcctttcattatcagaacagcagcttatgaactgcttcattttccaaaagtgtttcccaaaaatcagaaacctaaacacccaacaacaggaattattgccatcacattggcgttttacatatgtcacgaagttcacctagctggttttaaatacaacttttctgacctcaagagtcctttgcactactatgggaatgccaccatgtctttgatgaataagaacgcgtatcacaatgtgactgcagagcagctctttttgaaggacattatagaaaaaaacctcgtaatcaacttgactcaagattgactctacagactcagaagatgatgctaacagtgttagttttatttttgtactgcaatttttagtttaaaatatgttggatgcactcgtcaaataattatgtatactgtctgttgctgcctggtgattcataaccaccagcttaatttctgtgaatactgtatatttaacttatgaaaaccaagaaatgtaaagataacaggaaaataagttttgattgcattgtttttaaaataagctagttttctgaggtgttttcacacgtctttttatagttacttcatcttagatttttgaagggatatgacttcctactaaggatttagtttaccacaacaattctgactacaataagacattttgaggaggatatttggctactgtaaacatggctggtggaaaatcacgattgtggcttgatgtggcaagccgaaaccacttggctctggaaatctaagttcatactggtttaattaagctctctcctgacaacccccagaattaaatgaaccatgattgtgaagagtaatttggtacaatgaaggcagtgtttgtttttaagttaaaggaaatgggctaaacataaagttcttattagataagtaaataactaaagaaagaatacaattactaaactctgatggctttgtattattttaaagaaatgaagtttaactttatacaatgaagctaagctaggcaagctcaagaaggaaaaaaaaatcttgaacattatttttttttgcctgacttacttattcattaaattttgaaggttttccacttgaagtaaattaggaaaggtaaagaagataacagaacaagtaaacacttaagaaaagtcaagctgaggccgggcagggtggctcacacctgtaatcctaacaaacactttgggaggccgagggaggcagctggattgcctgaactcaggagttcaagaccagcctggccaacatggtgaaacctcatctctactaaaatacaaaataattagctgggcgtggtggtatgcgctgtagtcccaggtactcgggaggctgaggcacgagaattgcttgagcccgggaggcagaggttgcagtgagccaagatcgcgccactgcacttcagcctgggtgacagagtgaggctgtcttctaaaaaatataaaaagtgaagttgggatttttggatttaaatggtacaaaaagaatatctcattttcccatgattaaagctaatcttcagatggaaagcttgcctggctacctagggtgcaccagagaatctgatccaatgcaagccagtcaatcctacaaatgtggtgagctagtcttccttcctatattttaataaatgtaaccaaaggccatctggaggtaggggaatgagaggtgaagaaacagaaaaatagaggttataaggatggaactaaaagttgtcagaagaggtatgagctgaagaaagaattactctcttttgaccaataaatacaattgggaaacactggaaaaccatggcttgattactgacaaccaacctgcctctctaaagagggtgtataaagggtgaaatacattagatttggctcagaaacagaatgcggtacttataaagcagaataaaggggagaacagtagtagttgatctaacccagattagacatgaataccagcatatgtttgcagagtcccacagttttgattcttcttataactttttgaggtgcaaaaggaaggtaccagaactggaatcgcatgtaatcaatcagtgtgattttcccctcataccacacagccataggctgcagtgtggctgctgaagttcaattgatataaagtaaatcaggcttcaaaaagaatggtgctgtgggtacacaaggacataaagatgggaacgatagacactgaggactgcggcggggggagcgaggggagcggggagggcaagggctgaaagactatgtattgggtactatgctcacaacctggatgatgggatcattcataccacaaacctcagtatcacacaatatacccatgtaacaacctgcactctgcacatgtacccttagaatctaaaataaaagttgaaattattttttt

SEQ ID NO: 279033 - DNA, 3321 bp, Homo sapiens
atcaacgcagagtggccattacggcgggggcgcggctggtgtccgccccgtccgaaagcatttgcaagtgaggaagcagcacaaccctgggttttagataatttctaacagagaggccccagcaattcagcaggcagcgtcctgagtctttggcagcctggtccctctttcgcaaattctccacctttgcgaacagagggtctttaggacacagattcttaaaagtgcaggtgagccagccatgagagggtatcttgtggccatattcctgagtgctgtcttcctctattatgtactgcattgcatattatggggaacgaatgtctattgggtggcacctgtggaaatgaaacggagaaataagatccagccttgtttatcaaagccagcttttgcctctctgctgaggtttcatcagtttcacccttttctgtgtgcggctgattttagaaagattgcttccttgtatggtagcgataagtttgatttgccctatgggatgagaacatcagcggaatattttcgacttgctctttcaaaactgcagagttgtgatctctttgatgagtttgacaacataccctgtaaaaagtgtgtggtggttggtaatggaggagttttgaagaataagacattaggagaaaaaatcgactcctatgatgtaataataagaatgaataatggtcctgttttaggacatgaagaagaagttgggagaaggacaaccttccgacttttttatccagaatctgttttttcagatcctattcacaatgaccctaatacgacagtgattctcactgcttttaagccacatgatttaaggtggctgttggaattgttgatgggtgacaaaataaacactaatggtttttggaagaaaccagccttaaacctgatttataaaccttatcaaatccgaatattagatcctttcattatcagaacagcagcttatgaactgcttcattttccaaaagtgtttcccaaaaatcagaaacctaaacacccaacaacaggaattattgccatcacattggcgttttacatatgtcacgaagttcacctagctggttttaaatacaacttttctgacctcaagagtcctttgcactactatgggaatgccaccatgtctttgatgaataagaacgcgtatcacaatgtgactgcagagcagctctttttgaaggacattatagaaaaaaacctcgtaatcaacttgactcaagattgactctacagactcagaagatgatgctaacagtgttagttttatttttgtactgcaatttttagtttaaaatatgttggatgcactcgtcaaataattatgtatactgtctgttgctgcctggtgattcataaccaccagcttaatttctgtgaatactgtatatttaacttatgaaaaccaagaaatgtaaagataacaggaaaataagttttgattgcattgtttttaaaataagctagttttctgaggtgttttcacacgtctttttatagttacttcatcttagatttttgaagggatatgacttcctactaaggatttagtttaccacaacaattctgactacaataagacattttgaggaggatatttggctactgtaaacatggctggtggaaaatcacgattgtggcttgatgtggcaagccgaaaccacttggctctggaaatctaagttcatactggtttaattaagctctctcctgacaacccccagaattaaatgaaccatgattgtgaagagtaatttggtacaatgaaggcagtgtttgtttttaagttaaaggaaatgggctaaacataaagttcttattagataagtaaataactaaagaaagaatacaattactaaactctgatggctttgtattattttaaagaaatgaagtttaactttatacaatgaagctaagctaggcaagctcaagaaggaaaaaaaaatcttgaacattatttttttttgcctgacttacttattcattaaattttgaaggttttccacttgaagtaaattaggaaaggtaaagaagataacagaacaagtaaacacttaagaaaagtcaagctgaggccgggcagggtggctcacacctgtaatcctaacaaacactttgggaggccgagggaggcagctggattgcctgaactcaggagttcaagaccagcctggccaacatggtgaaacctcatctctactaaaatacaaaataattagctgggcgtggtggtatgcgctgtagtcccaggtactcgggaggctgaggcacgagaattgcttgagcccgggaggcagaggttgcagtgagccaagatcgcgccactgcacttcagcctgggtgacagagtgaggctgtcttctaaaaaatataaaaagtgaagttgggatttttggatttaaatggtacaaaaagaatatctcattttcccatgattaaagctaatcttcagatggaaagcttgcctggctacctagggtgcaccagagaatctgatccaatgcaagccagtcaatcctacaaatgtggtgagctagtcttccttcctatattttaataaatgtaaccaaaggccatctggaggtaggggaatgagaggtgaagaaacagaaaaatagaggttataaggatggaactaaaagttgtcagaagaggtatgagctgaagaaagaattactctcttttgaccaataaatacaattgggaaacactggaaaaccatggcttgattactgacaaccaacctgcctctctaaagagggtgtataaagggtgaaatacattagatttggctcagaaacagaatgcggtacttataaagcagaataaaggggagaacagtagtagttgatctaacccagattagacatgaataccagcatatgtttgcagagtcccacagttttgattcttcttataactttttgaggtgcaaaaggaaggtaccagaactggaatcgcatgtaatcaatcagtgtgattttcccctcataccacacagccataggctgcagtgtggctgctgaagttcaattgatataaagtaaatcaggcttcaaaaagaatggtgctgtgggtacacaaggacataaagatgggaacgatagacactgaggactgcggcggggggagcgaggggagcggggagggcaagggctgaaagactatgtattgggtactatgctcacaacctggatgatgggatcattcataccacaaacctcagtatcacacaatatacccatgtaacaacctgcactctgcacatgtacccttagaatctaaaataaaagttgaaattattttttt

SEQ ID NO: 279034 - DNA, 3469 bp, Homo sapiens
acgcgaggagggttgaggggtctggaaggttctggtctcttaccgtataaagtttttcgagaaaccctttttccctccacaatggaactagacctaacaaaacaagctccgaggcagtttaggagaaaggaggacgcatttgcaagtgaggaagcagcacaaccctgggttttagataatttctaacagagaggccccagcaattcagcaggcagcgtcctgagtctttggcagcctggtccctctttcgcaaattctccacctttgcgaacagagggtctttaggacacagattcttaaaagtgcaggtgagccagccatgagagggtatcttgtggccatattcctgagtgctgtcttcctctattatgtactgcattgcatattatggggaacgaatgtctattgggtggcacctgtggaaatgaaacggagaaataagatccagccttgtttatcaaagccagcttttgcctctctgctgagtcagagctctgcatatattttaagaaaaggcattgaggaactcaatcaaaccagtattcttttcacacaggtttcatcagtttcacccttttctgtgtgcggctgattttagaaagattgcttccttgtatggtagcgataagtttgatttgccctatgggatgagaacatcagcggaatattttcgacttgctctttcaaaactgcagagttgtgatctctttgatgagtttgacaacataccctgtaaaaagtgtgtggtggttggtaatggaggagttttgaagaataagacattaggagaaaaaatcgactcctatgatgtaataataagaatgaataatggtcctgttttaggacatgaagaagaagttgggagaaggacaaccttccgacttttttatccagaatctgttttttcagatcctattcacaatgaccctaatacgacagtgattctcactgcttttaagccacatgatttaaggtggctgttggaattgttgatgggtgacaaaataaacactaatggtttttggaagaaaccagccttaaacctgatttataaaccttatcaaatccgaatattagatcctttcattatcagaacagcagcttatgaactgcttcattttccaaaagtgtttcccaaaaatcagaaacctaaacacccaacaacaggaattattgccatcacattggcgttttacatatgtcacgaagttcacctagctggttttaaatacaacttttctgacctcaagagtcctttgcactactatgggaatgccaccatgtctttgatgaataagaacgcgtatcacaatgtgactgcagagcagctctttttgaaggacattatagaaaaaaacctcgtaatcaacttgactcaagattgactctacagactcagaagatgatgctaacagtgttagttttatttttgtactgcaatttttagtttaaaatatgttggatgcactcgtcaaataattatgtatactgtctgttgctgcctggtgattcataaccaccagcttaatttctgtgaatactgtatatttaacttatgaaaaccaagaaatgtaaagataacaggaaaataagttttgattgcattgtttttaaaataagctagttttctgaggtgttttcacacgtctttttatagttacttcatcttagatttttgaagggatatgacttcctactaaggatttagtttaccacaacaattctgactacaataagacattttgaggaggatatttggctactgtaaacatggctggtggaaaatcacgattgtggcttgatgtggcaagccgaaaccacttggctctggaaatctaagttcatactggtttaattaagctctctcctgacaacccccagaattaaatgaaccatgattgtgaagagtaatttggtacaatgaaggcagtgtttgtttttaagttaaaggaaatgggctaaacataaagttcttattagataagtaaataactaaagaaagaatacaattactaaactctgatggctttgtattattttaaagaaatgaagtttaactttatacaatgaagctaagctaggcaagctcaagaaggaaaaaaaaatcttgaacattatttttttttgcctgacttacttattcattaaattttgaaggttttccacttgaagtaaattaggaaaggtaaagaagataacagaacaagtaaacacttaagaaaagtcaagctgaggccgggcagggtggctcacacctgtaatcctaacaaacactttgggaggccgagggaggcagctggattgcctgaactcaggagttcaagaccagcctggccaacatggtgaaacctcatctctactaaaatacaaaataattagctgggcgtggtggtatgcgctgtagtcccaggtactcgggaggctgaggcacgagaattgcttgagcccgggaggcagaggttgcagtgagccaagatcgcgccactgcacttcagcctgggtgacagagtgaggctgtcttctaaaaaatataaaaagtgaagttgggatttttggatttaaatggtacaaaaagaatatctcattttcccatgattaaagctaatcttcagatggaaagcttgcctggctacctagggtgcaccagagaatctgatccaatgcaagccagtcaatcctacaaatgtggtgagctagtcttccttcctatattttaataaatgtaaccaaaggccatctggaggtaggggaatgagaggtgaagaaacagaaaaatagaggttataaggatggaactaaaagttgtcagaagaggtatgagctgaagaaagaattactctcttttgaccaataaatacaattgggaaacactggaaaaccatggcttgattactgacaaccaacctgcctctctaaagagggtgtataaagggtgaaatacattagatttggctcagaaacagaatgcggtacttataaagcagaataaaggggagaacagtagtagttgatctaacccagattagacatgaataccagcatatgtttgcagagtcccacagttttgattcttcttataactttttgaggtgcaaaaggaaggtaccagaactggaatcgcatgtaatcaatcagtgtgattttcccctcataccacacagccataggctgcagtgtggctgctgaagttcaattgatataaagtaaatcaggcttcaaaaagaatggtgctgtgggtacacaaggacataaagatgggaacgatagacactgaggactgcggcggggggagcgaggggagcggggagggcaagggctgaaagactatgtattgggtactatgctcacaacctggatgatgggatcattcataccacaaacctcagtatcacacaatatacccatgtaacaacctgcactctgcacatgtacccttagaatctaaaataaaagttgaaattattttttt

SEQ ID NO: 279035 - DNA, 2688 bp, Homo sapiens
gcaggcagggggagagtggtggaattggaagctgaagcgaatgaataatggtcctgttttaggacatgaagaagaagttgggagaaggacaaccttccgacttttttatccagaatctgttttttcagatcctattcacaatgaccctaatacgacagtgattctcactgcttttaagccacatgatttaaggtggctgttggaattgttgatgggtgacaaaataaacactaatggtttttggaagaaaccagccttaaacctgatttataaaccttatcaaatccgaatattagatcctttcattatcagaacagcagcttatgaactgcttcattttccaaaagtgtttcccaaaaatcagaaacctaaacacccaacaacaggaattattgccatcacattggcgttttacatatgtcacgaagttcacctagctggttttaaatacaacttttctgacctcaagagtcctttgcactactatgggaatgccaccatgtctttgatgaataagaacgcgtatcacaatgtgactgcagagcagctctttttgaaggacattatagaaaaaaacctcgtaatcaacttgactcaagattgactctacagactcagaagatgatgctaacagtgttagttttatttttgtactgcaatttttagtttaaaatatgttggatgcactcgtcaaataattatgtatactgtctgttgctgcctggtgattcataaccaccagcttaatttctgtgaatactgtatatttaacttatgaaaaccaagaaatgtaaagataacaggaaaataagttttgattgcattgtttttaaaataagctagttttctgaggtgttttcacacgtctttttatagttacttcatcttagatttttgaagggatatgacttcctactaaggatttagtttaccacaacaattctgactacaataagacattttgaggaggatatttggctactgtaaacatggctggtggaaaatcacgattgtggcttgatgtggcaagccgaaaccacttggctctggaaatctaagttcatactggtttaattaagctctctcctgacaacccccagaattaaatgaaccatgattgtgaagagtaatttggtacaatgaaggcagtgtttgtttttaagttaaaggaaatgggctaaacataaagttcttattagataagtaaataactaaagaaagaatacaattactaaactctgatggctttgtattattttaaagaaatgaagtttaactttatacaatgaagctaagctaggcaagctcaagaaggaaaaaaaaatcttgaacattatttttttttgcctgacttacttattcattaaattttgaaggttttccacttgaagtaaattaggaaaggtaaagaagataacagaacaagtaaacacttaagaaaagtcaagctgaggccgggcagggtggctcacacctgtaatcctaacaaacactttgggaggccgagggaggcagctggattgcctgaactcaggagttcaagaccagcctggccaacatggtgaaacctcatctctactaaaatacaaaataattagctgggcgtggtggtatgcgctgtagtcccaggtactcgggaggctgaggcacgagaattgcttgagcccgggaggcagaggttgcagtgagccaagatcgcgccactgcacttcagcctgggtgacagagtgaggctgtcttctaaaaaatataaaaagtgaagttgggatttttggatttaaatggtacaaaaagaatatctcattttcccatgattaaagctaatcttcagatggaaagcttgcctggctacctagggtgcaccagagaatctgatccaatgcaagccagtcaatcctacaaatgtggtgagctagtcttccttcctatattttaataaatgtaaccaaaggccatctggaggtaggggaatgagaggtgaagaaacagaaaaatagaggttataaggatggaactaaaagttgtcagaagaggtatgagctgaagaaagaattactctcttttgaccaataaatacaattgggaaacactggaaaaccatggcttgattactgacaaccaacctgcctctctaaagagggtgtataaagggtgaaatacattagatttggctcagaaacagaatgcggtacttataaagcagaataaaggggagaacagtagtagttgatctaacccagattagacatgaataccagcatatgtttgcagagtcccacagttttgattcttcttataactttttgaggtgcaaaaggaaggtaccagaactggaatcgcatgtaatcaatcagtgtgattttcccctcataccacacagccataggctgcagtgtggctgctgaagttcaattgatataaagtaaatcaggcttcaaaaagaatggtgctgtgggtacacaaggacataaagatgggaacgatagacactgaggactgcggcggggggagcgaggggagcggggagggcaagggctgaaagactatgtattgggtactatgctcacaacctggatgatgggatcattcataccacaaacctcagtatcacacaatatacccatgtaacaacctgcactctgcacatgtacccttagaatctaaaataaaagttgaaattattttttt

SEQ ID NO: 279036 - DNA, 3259 bp, Homo sapiens
  misc_feature (2090)..(2090): n is a, c, g, or t
  misc_feature (3228)..(3228): n is a, c, g, or t
  misc_feature (3258)..(3259): n is a, c, g, or t
cttgaggattcagtctggtcctgaagggtttggggggagactgcgaccagaagatgtttccatgtcctaattaatgggtgatggtggttgttagtctgactgttgccacggtgatgaagggagacatccaagtgctggtttcagtactgaggcgaatacagggaatttcaacaggctccaggtcttactatgcagcctgaagtgggaccatcccttaaacccactccatcctgtggccacgatgggggccaggacacctttgccttctttctgggtttctttctttgccgagacagggattttgttcccaggaggcactccctggcccatgggatctcagcattcaaagcagcacaggaaacctgggcccctgaaacggggccaccgaagagatcggagaacaaccaggaggaagtactggaaggaaggaagggagatcgctcgtgtcttagatgatgagggcagaaacctgaggcagcagaagcttgatcggcagcgggccctgctggagcagaagcagaagaagaagcgccaggagcccctgatggtgcaggccaatgcagatgggcggccccggagccggcgggcccggcagtcagaggaacaagcccccctggtggagtcctacctcagcagcagtggcagcaccagctaccaagttcaagaggccgactcactcgccagtgtgcagctgggagccacgcgcccaacagcaccagcttcagccaagagaaccaaggcggcagctacagcagggggccagggtggcgccgctaggaaggagaagaagggaaagcacaaaggcaccagcgggccagcagcactggcagaagacaagtctgaggcccaaggcccagtgcagattctgactgtgggccagtcagaccacgcccaggacgcaggggagacggcagctggtgggggcgaacggcccagcgggcaggatctccgtgccacgatgcagaggaagggcatctccagcagcatgagctttgacgaggatgaggaggatgaggaggagaatagctccagctcctcccagctaaatagtaacacccgccccagctctgctactagcaggaagtccgtcagggaggcagcctcagcccctagcccaacagctccagagcaaccagtggacgttgaggtccaggatcttgaggagtttgcactgaggccggccccccagggtatcaccatcaaatgccgcatcactcgggacaagaaagggatggaccggggcatgtaccccacctactttctgcacctggaccgtgaggatgggaagaaggtgttcctcctggcgggaaggaagagaaagaagagtaaaacttccaattacctcatctctgtggacccaacagacttgtctcgaggaggggacagctatatcgggaaactgcggtccaacttgatgggcaccaagttcactgtttatgacaatggagtcaaccctcagaaggcctcatcctccactttggaaagtggaaccttacgtcaggagctggcagctgtgtgctacgagacaaacgtcttaggcttcaaggggcctcggaagatgagcgtgattgtcccaggcatgaacatggttcatgagagagtctctatccgcccccgcaacgagcatgagacactgctagcacgctggcagaataagaacacggagagtatcatcgagctgcaaaacaagacacctgtctggaatgatgacacacagtcctatgtactcaacttccatgggcgcgtcacacaggcctccgtgaagaacttccagatcatccatggcaatgacccggactacatcgtgatgcagtttggccgggtagcagaggatgtgttcaccatggattacaactacccgctgtgtgcactgcaggcctttgccattgccctgtccagcttcgacagcaagctggcgtgcgagtagaggcctcttcgtgccctttggggttgcccagcctggagcggagcttgcctgcctgcctgtggagacagccctgcctatcctctgtatataggccttccgccagatgaagctttggccctcagtgggctccctggcccagccagccaggaactggctcctttgnctctgctactgaggcaggggagtagtggagagcgggtgggtgggtgttgaagggattgagaataattctttccatgccacgagatcaacacacactcccacccttggggtagtagtgtgttgtagtcgtacttaccaagctgagcaacctcttcagctgggaaggccgcaaaaggcatagagggagaggaagcacactgcagggctgctgtggcccagtcgtccgctcagccaaggagtcagatggcaatgggtactccagcaggtaggggcacagtgaatgtgtgtatgtatgaaggccacatcaactttatgtagcaaagggcttggtggccaagcctggcccttaaacaactgcagaaagcccttcaacttcagaaggcctcactcaagcctgagagaagttgggagggtggtggggacaggtaagtggcaggaccctgtcaggattgcaggtgcctggcttgctgtggctatgggaatcagctggtggctaggtttctagcgcatttgatttctccaggtttgctgtgtctcacagaggcagtaggaacccagctctcagggctgtcttggtggatgggccctgcaagacacaggctcagcatgcagaagtgcatgaacagggtccctggatcagggttgttctgggagtcctgtcagcttccccaggagctctctgctgagcagcccagcacaacccccaggaaacacaaatggggtccaggtcaccagcctgactgcacacagctaggcatgcctgggaatcctgctgccagagaaccattcccaagccatggcatgctccttgaagaatctctcctctctctctctctctggaaagacccaactttctcactgctgtcagccaagtcatggttggtaaccatgtaggttcttgggagggaatgggacagggtgaataaagcagggaatattttagaaccacaagagatcagcagtggcaggacccttaggaatctagtacaaccttgttgctttaggtgagtcacactcagaaaatggggcttgccctgggtcacctagctggttaatggcagcattcagaacttcaagttctcttgatttctttgttcccactgtcccccaagaaactagtatctctggcctcctggggnccattctgcatgccctccccacttcccccnn

SEQ ID NO: 279037 - DNA, 2102 bp, Homo sapiens
taggagagtccgatgttaatcaggacgaggctggcacctcacgggcaagccctgaaaacccctctttcgctctgcagtgtcttagatgatgagggcagaaacctgaggcagcagaagcttgatcggcaggtgagtaggcctggggccgggtagaagggaagagtctgggctgggatctctgagggcagaggggcagggctgtccatcttccctggatgatcccgtctgattgggggatgggattcccatgtggaagaagagaggtgcactctctcccagctcagcactaaccctgccgcggcacatgggctcctgccttcaggcagctgggtgactgcagttggagggctggctgtgctgtgatcctgccagggcagccacctgggccctgttttgcctccctttcctggaccccaagtgttggggtgccaaggacatggggccttggcccaaggtgggccgtggaccccccgataactgggagcccgcccttcctggtggaggcagtgggtcagccaacctctgtgcctccatagcgggccctgctggagcagaagcagaagaagaagcgccaggagcccctgatggtgcaggccaatgcagatgggcggccccggagccggcgggcccggcagtcagaggaacaagcccccctggtggagtcctacctcagcagcagtggcagcaccagctaccaagttcaagaggccgactcactcgccagtgtgcagctgggagccacgcgcccaacagcaccagcttcagccaagagaaccaaggcggcagctacagcagggggccagggtggcgccgctaggaaggagaagaagggaaagcacaaaggcaccagcgggccagcagcactggcagaagacaagtctgaggcccaaggcccagtgcagattctgactgtgggccagtcagaccacgcccaggacgcaggggagacggcagctggtgggggcgaacggcccagcgggcaggatctccgtgccacgatgcagaggaagggcatctccagcagcatgagctttgacgaggatgaggaggatgaggaggagaatagctccagctcctcccagctaaatagtaacacccgccccagctctgctactagcaggaagtccgtcagggaggcagcctcagcccctagcccaacagctccagagcaaccagtggacgttgaggtccaggatcttgaggagtttgcactgaggccggccccccagggtatcaccatcaaatgccgcatcactcgggacaagaaagggatggaccggggcatgtaccccacctactttctgcacctggaccgtgaggatgggaagaaggtgttcctcctggcgggaaggaagagaaagaagagtaaaacttccaattacctcatctctgtggacccaacagacttgtctcgaggaggggacagctatatcgggaaactgcggtccaacttgatgggcaccaagttcactgtttatgacaatggagtcaaccctcagaaggcctcatcctccactttggaaagtggaaccttacgtcaggagctggcagctgtgtgctacgagacaaacgtcttaggcttcaaggggcctcggaagatgagcgtgattgtcccaggcatgaacatggttcatgagagagtctctatccgcccccgcaacgagcatgagacactgctagcacgctggcagaataagaacacggagagtatcatcgagctgcaaaacaagacacctgtctggaatgatgacacacagtcctatgtactcaacttccatgggcgcgtcacacaggcctccgtgaagaacttccagatcatccatggcaatgaccaaacccagagatgtgatacaattttgatctgacagaacaaatactggaatattttgggcttttctaataatcataggagcacagacttgtaaaagaacaaatgccacagaaaatgaggttaaaggacacaaactgggagtgcattgaattgtatcactcactggattaagaaccaaaagatccatgttcaagtcctagttctgccttgttagttgtgaattttggggcaaaacacttaaacattgagtaaacatttcttatgtgaaaaa

SEQ ID NO: 279038 - DNA, 3005 bp, Homo sapiens
  misc_feature (36)..(36): n is a, c, g, or t
  misc_feature (1836)..(1836): n is a, c, g, or t
  misc_feature (2974)..(2974): n is a, c, g, or t
  misc_feature (3004)..(3005): n is a, c, g, or t
tggcgtgcagcaggggcctcggcggggcccagcccnccggtcccggggaggatacgtcccgggggcggcccgggagctgagcaggccccccgcgccggcccctccgggccccggcctccagagccgcagccaccgccccgcccccgagagacatgacttccaagccgcattccgactggattccctacagtgtcttagatgatgagggcagaaacctgaggcagcagaagcttgatcggcagcgggccctgctggagcagaagcagaagaagaagcgccaggagcccctgatggtgcaggccaatgcagatgggcggccccggagccggcgggcccggcagtcagaggaacaagcccccctggtggagtcctacctcagcagcagtggcagcaccagctaccaagttcaagaggccgactcactcgccagtgtgcagctgggagccacgcgcccaacagcaccagcttcagccaagagaaccaaggcggcagctacagcagggggccagggtggcgccgctaggaaggagaagaagggaaagcacaaaggcaccagcgggccagcagcactggcagaagacaagtctgaggcccaaggcccagtgcagattctgactgtgggccagtcagaccacgcccaggacgcaggggagacggcagctggtgggggcgaacggcccagcgggcaggatctccgtgccacgatgcagaggaagggcatctccagcagcatgagctttgacgaggatgaggaggatgaggaggagaatagctccagctcctcccagctaaatagtaacacccgccccagctctgctactagcaggaagtccgtcagggaggcagcctcagcccctagcccaacagctccagagcaaccagtggacgttgaggtccaggatcttgaggagtttgcactgaggccggccccccagggtatcaccatcaaatgccgcatcactcgggacaagaaagggatggaccggggcatgtaccccacctactttctgcacctggaccgtgaggatgggaagaaggtgttcctcctggcgggaaggaagagaaagaagagtaaaacttccaattacctcatctctgtggacccaacagacttgtctcgaggaggggacagctatatcgggaaactgcggtccaacttgatgggcaccaagttcactgtttatgacaatggagtcaaccctcagaaggcctcatcctccactttggaaagtggaaccttacgtcaggagctggcagctgtgtgctacgagacaaacgtcttaggcttcaaggggcctcggaagatgagcgtgattgtcccaggcatgaacatggttcatgagagagtctctatccgcccccgcaacgagcatgagacactgctagcacgctggcagaataagaacacggagagtatcatcgagctgcaaaacaagacacctgtctggaatgatgacacacagtcctatgtactcaacttccatgggcgcgtcacacaggcctccgtgaagaacttccagatcatccatggcaatgacccggactacatcgtgatgcagtttggccgggtagcagaggatgtgttcaccatggattacaactacccgctgtgtgcactgcaggcctttgccattgccctgtccagcttcgacagcaagctggcgtgcgagtagaggcctcttcgtgccctttggggttgcccagcctggagcggagcttgcctgcctgcctgtggagacagccctgcctatcctctgtatataggccttccgccagatgaagctttggccctcagtgggctccctggcccagccagccaggaactggctcctttgnctctgctactgaggcaggggagtagtggagagcgggtgggtgggtgttgaagggattgagaataattctttccatgccacgagatcaacacacactcccacccttggggtagtagtgtgttgtagtcgtacttaccaagctgagcaacctcttcagctgggaaggccgcaaaaggcatagagggagaggaagcacactgcagggctgctgtggcccagtcgtccgctcagccaaggagtcagatggcaatgggtactccagcaggtaggggcacagtgaatgtgtgtatgtatgaaggccacatcaactttatgtagcaaagggcttggtggccaagcctggcccttaaacaactgcagaaagcccttcaacttcagaaggcctcactcaagcctgagagaagttgggagggtggtggggacaggtaagtggcaggaccctgtcaggattgcaggtgcctggcttgctgtggctatgggaatcagctggtggctaggtttctagcgcatttgatttctccaggtttgctgtgtctcacagaggcagtaggaacccagctctcagggctgtcttggtggatgggccctgcaagacacaggctcagcatgcagaagtgcatgaacagggtccctggatcagggttgttctgggagtcctgtcagcttccccaggagctctctgctgagcagcccagcacaacccccaggaaacacaaatggggtccaggtcaccagcctgactgcacacagctaggcatgcctgggaatcctgctgccagagaaccattcccaagccatggcatgctccttgaagaatctctcctctctctctctctctggaaagacccaactttctcactgctgtcagccaagtcatggttggtaaccatgtaggttcttgggagggaatgggacagggtgaataaagcagggaatattttagaaccacaagagatcagcagtggcaggacccttaggaatctagtacaaccttgttgctttaggtgagtcacactcagaaaatggggcttgccctgggtcacctagctggttaatggcagcattcagaacttcaagttctcttgatttctttgttcccactgtcccccaagaaactagtatctctggcctcctggggnccattctgcatgccctccccacttcccccnn

SEQ ID NO: 279039 - DNA, 829 bp, Homo sapiens
taggagagtccgatgttaatcaggacgaggctggcacctcacgggcaagccctgaaaacccctctttcgctctgcagtgtcttagatgatgagggcagaaacctgaggcagcagaagcttgatcggcaggtgagtaggcctggggccgggtagaagggaagagtctgggctgggatctctgagggcagaggggcagggctgtccatcttccctggatgatcccgtctgattgggggatgggattcccatgtggaagaagagaggtgcactctctcccagctcagcactaaccctgccgcggcacatgggctcctgccttcaggcagctgggtgactgcagttggagggctggctgtgctgtgatcctgccagggcagccacctgggccctgttttgcctccctttcctggaccccaagtgttggggtgccaaggacatggggccttggcccaaggtgggccgtggaccccccgataactgggagcccgcccttcctggtggaggcagtgggtcagccaacctctgtgcctccatagcgggccctgctggagcagaagcagaagaagaagcgccaggagcccctgatggtgcaggccaatgcagatgggcggccccggagccggcgggcccggcagtcagaggaacaagcccccctggtggagtcctacctcagcagcagtggcagcaccagctaccaaggtataccttgcctgctgcccaatcccgtcactgcttcggggagcccgtcacttcctgcccacctaggcaggtacggactggtcctgacgggggatgcccaggctgtgtatggcttccagcccaggcagac

SEQ ID NO: 279040 - DNA, 810 bp, Homo sapiens
cactcttgttgcccaggctggagtgcaatggcgcgatctcggctcaccacaatctctgcctcccaggttcaagcaattctcctgcctcagcctccggagtagctgtgattacaggcatgcaccaccacggctggctaattttgtatttttagtagagatgggggtttcaccatgttggtcaggctggtctcgaactcccgatctcagggaatatctttctccaccactttctcttagatttatgtgagtcctcatgtatcaggccaaggcggtgggaccgaagttacctctggagtatgaaaataagcaacaccattatgaaaagtcaaaagaactttggagtcaaacagtcctgcatttgaaggctagtgctaccactcaccattaggctatttaaccccatacttcttaaagttggataagggatggatggtataccaggagatatgaaaaagcagaggctgaacatagtaatcttcctacagaatcagttttattcaattgtttttgggaaatatttttatattcaaataaacaatatgatattatggaacagaatgcaaattatacatgatgtttttgcataaatcatgagactttaaagaaaatttgcaattccagtatgctgcagtgggttaggaaccacaacatgccaagattaactctcctctacctttaggagtatttcagcagaaacattttaaacaatgacttatcttttgggattgaattttctatttacaaaaatagagataacaatacatcatgggattctatgaagattaaatgaaaactcataacattgaccct

SEQ ID NO: 279041 - DNA, 695 bp, Homo sapiens
tcccccagcctcgctgccgccttgcagtttgatctcagactgctgtgctagcaatcagcgagactccgtgggcgtaggaccctccgagccagggaatatctttctccaccactttctcttagatttatgtgagtcctcatgtatcaggccaaggcggtgggaccgaagttacctctggagtatgaaaataagcaacaccattatgaaaagtcaaaagaactttggagtcaaacagtcctgcatttgaaggctagtgctaccactcaccattaggctatttaaccccatacttcttaaagttggataagggatggatggtataccaggagatatgaaaaagcagaggctgaacatagtaatcttcctacagaatcagttttattcaattgtttttgggaaatatttttatattcaaataaacaatatgatattatggaacagaatgcaaattatacatgatgtttttgcataaatcatgagactttaaagaaaatttgcaattccagtatgctgcagtgggttaggaaccacaacatgccaagattaactctcctctacctttaggagtatttcagcagaaacattttaaacaatgacttatcttttgggattgaattttctatttacaaaaatagagataacaatacatcatgggattctatgaagattaaatgaaaactcataacattgaccct

SEQ ID NO: 279042 - DNA, 434 bp, Homo sapiens
aaggatccttaattaaattaatcccccccccccccgcttccgccacggccgtctctggagagcagcagccatggccctacgctaccctatggccgtgggcctcaacaagggccacaaagtgaccaagaacgtgagcaagcccaggcacagccgacgccgcgggcgtctgaccaaacacaccaagttcgtgcgggacatgattcgggaggtgtgtggctttgccccgtacgagcggcgcgccatggagttactgaaggtctccaaggacaaacgggccctcaaatttatcaagaaaagggtggggacgcacatccgcgccaagaggaagcgggaggagctgagcaacgtactggccgccatgaggaaagctgctgccaagaaagactgagcccctcccctgccctctccctgaaataaagaacagcttgacagaa

SEQ ID NO: 279043 - DNA, 432 bp, Homo sapiens
ctctagagcggccgcctactactactaaattcgcggccgctcgacggcgtctctggagagcagcagccatggccctacgctaccctatggccgtgggcctcaacaagggccacaaagtgaccaagaacgtgagcaagcccaggcacagccgacgccgcgggcgtctgaccaaacacaccaagttcgtgcgggacatgattcgggaggtgtgtggctttgccccgtacgagcggcgcgccatggagttactgaaggtctccaaggacaaacgggccctcaaatttatcaagaaaagggtggggacgcacatccgcgccaagaggaagcgggaggagctgagcaacgtactggccgccatgaggaaagctgctgccaagaaagactgagcccctcccctgccctctccctgaaataaagaacagcttgacagaa

SEQ ID NO: 279044 - DNA, 412 bp, Homo sapiens
  misc_feature (1)..(1): n is a, c, g, or t
  misc_feature (6)..(7): n is a, c, g, or t
  misc_feature (10)..(13): n is a, c, g, or t
  misc_feature (16)..(16): n is a, c, g, or t
ngggcnncannnnttnggcacgagggccgtctctggagagcagcagccatggccctacgctaccctatggccgtgggcctcaacaagggccacaaagtgaccaagaacgtgagcaagcccaggcacagccgacgccgcgggcgtctgaccaaacacaccaagttcgtgcgggacatgattcgggaggtgtgtggctttgccccgtacgagcggcgcgccatggagttactgaaggtctccaaggacaaacgggccctcaaatttatcaagaaaagggtggggacgcacatccgcgccaagaggaagcgggaggagctgagcaacgtactggccgccatgaggaaagctgctgccaagaaagactgagcccctcccctgccctctccctgaaataaagaacagcttgacagaa

SEQ ID NO: 279045 - DNA, 412 bp, Homo sapiens
gctggtaccgggccggagtgtagggatcgtctctggagagcagcagccatggccctacgctaccctatggccgtgggcctcaacaagggccacaaagtgaccaagaacgtgagcaagcccaggcacagccgacgccgcgggcgtctgaccaaacacaccaagttcgtgcgggacatgattcgggaggtgtgtggctttgccccgtacgagcggcgcgccatggagttactgaaggtctccaaggacaaacgggccctcaaatttatcaagaaaagggtggggacgcacatccgcgccaagaggaagcgggaggagctgagcaacgtactggccgccatgaggaaagctgctgccaagaaagactgagcccctcccctgccctctccctgaaataaagaacagcttgacagaa

SEQ ID NO: 279046 - DNA, 608 bp, Homo sapiens
  misc_feature (475)..(475): n is a, c, g, or t
  misc_feature (481)..(481): n is a, c, g, or t
gtgcctggtaccggcccgggagtttatgggatggagagcagcagccatggccctacgctaccctatggccgtgggcctcaacaagggccacaaagtgaccaagaacgtgagcaagcccaggcacagccgacgccgcgggcgtctgaccaaacacaccaagttcgtgcgggacatgattcgggaggtgtgtggctttgccccgtacgagcggcgcgccatggagttactgaaggtctccaaggacaaacgggccctcaaatttatcaagaaaagggtggggacgcacatccgcgccaagaggaagcgggaggagctgagcaacgtactggccgccatgaggaaagctgctgccaagaaagactgagcccctcccctgccctctccctgaaataaagaacagcttgacagaaaaaaaaaaaaaaaaaaaaaaaaaaaaaaaaaaaaaaaaaaaaaaaaaaaaccaaaaaaaaaaaanaaaaanaaaaaaggccgggtttcttggtggccgctcttggccccccctttttttacccacgtaactatttttggtgggggccctatttaagactatttggggttcccccttatgggggggcctttcctttgcg

SEQ ID NO: 279047 - DNA, 618 bp, Homo sapiens
  misc_feature (1)..(1): n is a, c, g, or t
  misc_feature (6)..(7): n is a, c, g, or t
  misc_feature (10)..(13): n is a, c, g, or t
  misc_feature (16)..(16): n is a, c, g, or t
ngggcnncannnnttnggcacgagggccgtctctggagagcagcagccatggccctacgctaccctatggccgtgggcctcaacaagggccacaaagtgaccaagaacgtgagcaagcccaggcacagccgacgccgcgggcgtctgaccaaacacaccaagttcgtgcgggacatgattcgggaggtgtgtggctttgccccgtacgagcggcgcgccatggagttactgaaggtctccaaggacaaacgggccctcaaatttatcaagaaaagggtggggacgcacatccgcgccaagaggaagcgggaggagctgagcaacgtactggccgccatgaggaaagctgctgccaagaaagactgagcccctcccctgccctctccctgaaataaagaacagcttgacagaagccctggctctcctgctgtccgtgggtgggtgtgggtgtgtcgggggcccgcagtcccctgtctggtgcccgctctgagccacaccctctccgggtgctgcctggtcgtgaatcaaaagccgtggcccgcccacccttcccggggcagcaggtgaggaagccgccgtactgcaaatgactttaatcattaaatagcttctatgcca

SEQ ID NO: 279048 - DNA, 643 bp, Homo sapiens
taggctagtacgaggctggtttgcggcgttctggagagcagcagccatggccctacgctaccctatggccgtgggcctcaacaagggccacaaagtgaccaagaacgtgagcaagcccaggcacagccgacgccgcgggcgtctgaccaaacacaccaagttcgtgcgggacatgattcgggaggtgtgtggctttgccccgtacgagcggcgcgccatggagttactgaaggtctccaaggacaaacgggccctcaaatttatcaagaaaagggtggggacgcacatccgcgccaagaggaagcgggaggagctgagcaacgtactggccgccatgaggaaagctgctgccaagaaagactgagcccctcccctgccctctccctgaaataaagaacagcttgacagaaagaaattgaaaaaataaagataatgataataaaaacgctcggcggcctctatattgtcgggggcggggaaaaagggggtgtttttagaagtggcgcccttgtggcccatataggtggtttccctggacccagtttttttgtgtccaaaggtgggaaaaatctggcgcgggccccccatatatggggggccggatattaaatttggaaaaacccggggttacccggggttaaga

SEQ ID NO: 279049 - DNA, 565 bp, Homo sapiens
  misc_feature (433)..(433): n is a, c, g, or t
  misc_feature (435)..(436): n is a, c, g, or t
gctggtaccgggccggagtgtagggatcgtctctggagagcagcagccatggccctacgctaccctatggccgtgggcctcaacaagggccacaaagtgaccaagaacgtgagcaagcccaggcacagccgacgccgcgggcgtctgaccaaacacaccaagttcgtgcgggacatgattcgggaggtgtgtggctttgccccgtacgagcggcgcgccatggagttactgaaggtctccaaggacaaacgggccctcaaatttatcaagaaaagggtggggacgcacatccgcgccaagaggaagcgggaggagctgagcaacgtactggccgccatgaggaaagctgctgccaagaaagactgagcccctcccctgccctctccctgaaataaagaacagcttgacagaaaaaaaaaaaaaaaaaaatttntnnctctctcttttcttttaattcacccctcttcccattttcccttccccttcaatttccctcttcttttctttttctccctttttcccaacaactctatatcaactctttttcatccccccaattttcccc

SEQ ID NO: 279050 - DNA, 1080 bp, Homo sapiens
  misc_feature (949)..(949): n is a, c, g, or t
  misc_feature (952)..(952): n is a, c, g, or t
  misc_feature (962)..(962): n is a, c, g, or t
  misc_feature (967)..(967): n is a, c, g, or t
  misc_feature (969)..(969): n is a, c, g, or t
  misc_feature (1027)..(1027): n is a, c, g, or t
  misc_feature (1039)..(1039): n is a, c, g, or t
  misc_feature (1069)..(1069): n is a, c, g, or t
agtcgtggtgtcttgcggctctgagactccagagaagggctgcggtctcgcagcggagggccgctgggaaatggacgctttaaggcccgggccgccgcaaggctgtctgggaaatgtagtcagcacggcgctgtttgcacctggccgcggagcctcctgggaaatgtagttcggcccggccctggcaccgtgaggggaaagaggcgtcaggtgcctggctgaagcctgaaggtgacccgaaaacaagtcagagcccgagagatccacccgcgcccgcgcgggggaccaagggcccggatttaagaagagtgtgcctacaaggcggttgtcacggcaacgagagggcgggattgttcgagcgctgcggccccctcacgtgatcgattcggaggcggggcgtccgcccagtgggcggggccgggcccctgctgggaggcgaagaccaggcgggcactgttgcccggcgacgctccggcgctgggtccccgaggcccggcccctccccgggaggaggtgggcttcgagtcacgtgacccgtgccctacgggagggggtgcggtcggggacccggcaggaggcggccgagaagagaggaccgtgggggcgttcgcgtggctcccagcccgggaccccacccccgctggacagtgggggaaactgaggcctgagcggagtgaccaccccggctatggccagccagcctccagggagcgcgagtgctgctgacaggggccaacgctggtgttggtgaggagctggcctatcactacgcgcgtctgggctcccacctggtgctcactgcccacactgaggctctcctgcagaaggggtggtagggaactgccggaagctgggcgcccccaaggtcttctacatcgcggcggacatggcctcccctgaggcgcccgagagcgtggtgcagtttgcgctggacaagctgggctggacngcntggcgggctngactncncgtgctgaccacattcacgcgctatggccgcacgcgagcacgcagccctagccactcnctgctcatgcangtaactttgtgagctcttgcactgacttcncgcctcttgcc

SEQ ID NO: 279051 - DNA, 1490 bp, Homo sapiens
agtcgtggtgtcttgcggctctgagactccagagaagggctgcggtctcgcagcggagggccgctgggaaatggacgctttaaggcccgggccgccgcaaggctgtctgggaaatgtagtcagcacggcgctgtttgcacctggccgcggagcctcctgggaaatgtagttcggcccggccctggcaccgtgaggggaaagaggcgtcaggtgcctggctgaagcctgaaggtgacccgaaaacaagtcagagcccgagagatccacccgcgcccgcgcgggggaccaagggcccggatttaagaagagtgtgcctacaaggcggttgtcacggcaacgagagggcgggattgttcgagcgctgcggccccctcacgtgatcgattcggaggcggggcgtccgcccagtgggcggggccgggcccctgctgggaggcgaagaccaggcgggcactgttgcccggcgacgctccggcgctgggtccccgaggcccggcccctccccgggaggaggtgggcttcgagtcacgtgacccgtgccctacgggagggggtgcggtcggggacccggcaggaggcggccgagaagagaggaccgtgggggcgttcgcgtggctcccagcccgggaccccacccccgctggacagtgggggaaactgaggcctgagcggagtgaccaccccggctatggccagccagcctccagggagcgcgagtgctgctgacaggggccaacgctggtgttggtgaggagctggcctatcactacgcgcgtctgggctcccacctggtgctcactgcccacactgaggctctcctgcagaagggtcggcccgaaataggcggagttgggattcgaactcatttcacaggcagagggaggagagcagccatagccacctccactggttccgactccagctcccgggctcgcaggagtaaacgcgcatgctcagggagctcggtcgcgcatgctcagcgcaacggcggggaagactccagccgccagggggagcgcgtgccgttcttgcctctctggcctgcgcctcctgagccgagtagatatcccggagttccgcgcggcgccagcccttccgccacggccgtctctggagagcagcagccatggccctacgctaccctatggccgtgggcctcaacaagggccacaaagtgaccaagaacgtgagcaagcccaggcacagccgacgccgcgggcgtctgaccaaacacaccaagttcgtgcgggacatgattcgggaggtgtgtggctttgccccgtacgagcggcgcgccatggagttactgaaggtctccaaggacaaacgggccctcaaatttatcaagaaaagggtggggacgcacatccgcgccaagaggaagcgggaggagctgagcaacgtactggccgccatgaggaaagctgctgccaagaaagactgagcccctcccctgccctctccctgaaataaagaacagcttgacagaa

SEQ ID NO: 279052 - DNA, 1954 bp, Homo sapiens
  misc_feature (1565)..(1565): n is a, c, g, or t
  misc_feature (1584)..(1584): n is a, c, g, or t
  misc_feature (1586)..(1586): n is a, c, g, or t
  misc_feature (1603)..(1603): n is a, c, g, or t
  misc_feature (1605)..(1605): n is a, c, g, or t
  misc_feature (1610)..(1610): n is a, c, g, or t
  misc_feature (1622)..(1623): n is a, c, g, or t
  misc_feature (1638)..(1638): n is a, c, g, or t
  misc_feature (1640)..(1640): n is a, c, g, or t
  misc_feature (1644)..(1644): n is a, c, g, or t
  misc_feature (1651)..(1651): n is a, c, g, or t
  misc_feature (1659)..(1659): n is a, c, g, or t
  misc_feature (1661)..(1661): n is a, c, g, or t
  misc_feature (1667)..(1667): n is a, c, g, or t
  misc_feature (1669)..(1670): n is a, c, g, or t
  misc_feature (1674)..(1674): n is a, c, g, or t
  misc_feature (1688)..(1688): n is a, c, g, or t
  misc_feature (1694)..(1694): n is a, c, g, or t
agtcgtggtgtcttgcggctctgagactccagagaagggctgcggtctcgcagcggagggccgctgggaaatggacgctttaaggcccgggccgccgcaaggctgtctgggaaatgtagtcagcacggcgctgtttgcacctggccgcggagcctcctgggaaatgtagttcggcccggccctggcaccgtgaggggaaagaggcgtcaggtgcctggctgaagcctgaaggtgacccgaaaacaagtcagagcccgagagatccacccgcgcccgcgcgggggaccaagggcccggatttaagaagagtgtgcctacaaggcggttgtcacggcaacgagagggcgggattgttcgagcgctgcggccccctcacgtgatcgattcggaggcggggcgtccgcccagtgggcggggccgggcccctgctgggaggcgaagaccaggcgggcactgttgcccggcgacgctccggcgctgggtccccgaggcccggcccctccccgggaggaggtgggcttcgagtcacgtgacccgtgccctacgggagggggtgcggtcggggacccggcaggaggcggccgagaagagaggaccgtgggggcgttcgcgtggctcccagcccgggaccccacccccgctggacagtgggggaaactgaggcctgagcggagtgaccaccccggctatggccagccagcctccagggagcgcgagtgctgctgacaggggccaacgctggtgttggtgaggagctggcctatcactacgcgcgtctgggctcccacctggtgctcactgcccacactgaggctctcctgcagaagggtcggcccgaaataggcggagttgggattcgaactcatttcacaggcagagggaggagagcagccatagccacctccactggttccgactccagctcccgggctcgcaggagtaaacgcgcatgctcagggagctcggtcgcgcatgctcagcgcaacggcggggaagactccagccgccagggggagcgcgtgccgttcttgcctctctggcctgcgcctcctgagccgagtagatatcccggagttccgcgcggcgccagcccttccgccacggccgtctctggagagcagcagccatggccctacgctaccctatggccgtgggcctcaacaagggccacaaagtgaccaagaacgtgagcaagcccaggcacagccgacgccgcgggcgtctgaccaaacacaccaagttcgtgcgggacatgattcgggaggtgtgtggctttgccccgtacgagcggcgcgccatggagttactgaaggtctccaaggacaaacgggccctcaaatttatcaagaaaagggtggggacgcacatccgcgccaagaggaagcgggaggagctgagcaacgtactggccgccatgaggaaagctgctgccaagaaagactgagcccctcccctgccctctccctgaaataaagaacagcttgacagaaaaaaaaaaaaaaaaaaaaaaaaaaaaaaaaaaaaaaaaaaaaaaaaaaaaaaaaaaaaaaaaaaaaaaaaaaccnttgtgggccgcttgggccnantcaattttaaattgggnangtttntgcttgcggccnnatttggggctaattngnccanttcgccntatagggngnggtttnannattnattgcccgggtttnacacgnggggactgggaaaacccttggggttaccaaatttattggccttgggaaaaattccccttttcccagttggtgaaaagcaaaaaggccgaccggatcgccctcccaaaagttggccacctaatgggaatggaaatttaagcgtaatattttgtaaaaaccggttaaatttttggaaaaagctctttttataccaaagggcggaattggaaaatccttttaaattaaagataaaccggggtgggggttttccatttggctcc

SEQ ID NO: 279053 - DNA, 1786 bp, Homo sapiens
  misc_feature (1565)..(1565): n is a, c, g, or t
  misc_feature (1584)..(1584): n is a, c, g, or t
  misc_feature (1586)..(1586): n is a, c, g, or t
  misc_feature (1603)..(1603): n is a, c, g, or t
  misc_feature (1605)..(1605): n is a, c, g, or t
  misc_feature (1610)..(1610): n is a, c, g, or t
  misc_feature (1622)..(1623): n is a, c, g, or t
  misc_feature (1638)..(1638): n is a, c, g, or t
  misc_feature (1640)..(1640): n is a, c, g, or t
  misc_feature (1644)..(1644): n is a, c, g, or t
  misc_feature (1651)..(1651): n is a, c, g, or t
  misc_feature (1659)..(1659): n is a, c, g, or t
  misc_feature (1661)..(1661): n is a, c, g, or t
  misc_feature (1667)..(1667): n is a, c, g, or t
  misc_feature (1669)..(1670): n is a, c, g, or t
  misc_feature (1674)..(1674): n is a, c, g, or t
  misc_feature (1688)..(1688): n is a, c, g, or t
  misc_feature (1694)..(1694): n is a, c, g, or t
  misc_feature (1757)..(1757): n is a, c, g, or t
agtcgtggtgtcttgcggctctgagactccagagaagggctgcggtctcgcagcggagggccgctgggaaatggacgctttaaggcccgggccgccgcaaggctgtctgggaaatgtagtcagcacggcgctgtttgcacctggccgcggagcctcctgggaaatgtagttcggcccggccctggcaccgtgaggggaaagaggcgtcaggtgcctggctgaagcctgaaggtgacccgaaaacaagtcagagcccgagagatccacccgcgcccgcgcgggggaccaagggcccggatttaagaagagtgtgcctacaaggcggttgtcacggcaacgagagggcgggattgttcgagcgctgcggccccctcacgtgatcgattcggaggcggggcgtccgcccagtgggcggggccgggcccctgctgggaggcgaagaccaggcgggcactgttgcccggcgacgctccggcgctgggtccccgaggcccggcccctccccgggaggaggtgggcttcgagtcacgtgacccgtgccctacgggagggggtgcggtcggggacccggcaggaggcggccgagaagagaggaccgtgggggcgttcgcgtggctcccagcccgggaccccacccccgctggacagtgggggaaactgaggcctgagcggagtgaccaccccggctatggccagccagcctccagggagcgcgagtgctgctgacaggggccaacgctggtgttggtgaggagctggcctatcactacgcgcgtctgggctcccacctggtgctcactgcccacactgaggctctcctgcagaagggtcggcccgaaataggcggagttgggattcgaactcatttcacaggcagagggaggagagcagccatagccacctccactggttccgactccagctcccgggctcgcaggagtaaacgcgcatgctcagggagctcggtcgcgcatgctcagcgcaacggcggggaagactccagccgccagggggagcgcgtgccgttcttgcctctctggcctgcgcctcctgagccgagtagatatcccggagttccgcgcggcgccagcccttccgccacggccgtctctggagagcagcagccatggccctacgctaccctatggccgtgggcctcaacaagggccacaaagtgaccaagaacgtgagcaagcccaggcacagccgacgccgcgggcgtctgaccaaacacaccaagttcgtgcgggacatgattcgggaggtgtgtggctttgccccgtacgagcggcgcgccatggagttactgaaggtctccaaggacaaacgggccctcaaatttatcaagaaaagggtggggacgcacatccgcgccaagaggaagcgggaggagctgagcaacgtactggccgccatgaggaaagctgctgccaagaaagactgagcccctcccctgccctctccctgaaataaagaacagcttgacagaaaaaaaaaaaaaaaaaaaaaaaaaaaaaaaaaaaaaaaaaaaaaaaaaaaaaaaaaaaaaaaaaaaaaaaaaaccnttgtgggccgcttgggccnantcaattttaaattgggnangtttntgcttgcggccnnatttggggctaattngnccanttcgccntatagggngnggtttnannattnattgcccgggtttnacacgnggggactggagttggggtattaccgaagaggcccgaacggttcgcctttccaacatttgcccnccttaatggcaaatggaattttaggcttt

SEQ ID NO: 279054 - DNA, 1770 bp, Homo sapiens
agtcgtggtgtcttgcggctctgagactccagagaagggctgcggtctcgcagcggagggccgctgggaaatggacgctttaaggcccgggccgccgcaaggctgtctgggaaatgtagtcagcacggcgctgtttgcacctggccgcggagcctcctgggaaatgtagttcggcccggccctggcaccgtgaggggaaagaggcgtcaggtgcctggctgaagcctgaaggtgacccgaaaacaagtcagagcccgagagatccacccgcgcccgcgcgggggaccaagggcccggatttaagaagagtgtgcctacaaggcggttgtcacggcaacgagagggcgggattgttcgagcgctgcggccccctcacgtgatcgattcggaggcggggcgtccgcccagtgggcggggccgggcccctgctgggaggcgaagaccaggcgggcactgttgcccggcgacgctccggcgctgggtccccgaggcccggcccctccccgggaggaggtgggcttcgagtcacgtgacccgtgccctacgggagggggtgcggtcggggacccggcaggaggcggccgagaagagaggaccgtgggggcgttcgcgtggctcccagcccgggaccccacccccgctggacagtgggggaaactgaggcctgagcggggcctgtgccggccacctctgtcccctgtccctctgcaggcccacacaggaccatgaaggtgcttctcctcacagggctgggggccctgttcttcgcctattattgggatgacaacttcgacccagccagcctccagggagcgcgagtgctgctgacaggggccaacgctggtgttggtgaggagctggcctatcactacgcgcgtctgggctcccacctggtgctcactgcccacactgaggctctcctgcagaagggtcggcccgaaataggcggagttgggattcgaactcatttcacaggcagagggaggagagcagccatagccacctccactggttccgactccagctcccgggctcgcaggagtaaacgcgcatgctcagggagctcggtcgcgcatgctcagcgcaacggcggggaagactccagccgccagggggagcgcgtgccgttcttgcctctctggcctgcgcctcctgagccgagtagatatcccggagttccgcgcggcgccagcccttccgccacggccgtctctggagagcagcaggtaagtggtttcccgcactgccggtatccgccgccatccggactcccgggtcctctgtgcaggttggaggatggttggttgtggcgagcgaggctgaaggagccgggacgcggggctctgggcctcgggaactgagccggtactcacctccgccccttctccccgtcgctgtccgcagccatggccctacgctaccctatggccgtgggcctcaacaagggccacaaagtgaccaagaacgtgagcaagcccaggcacagccgacgccgcgggcgtctgaccaaacacaccaagttcgtgcgggacatgattcgggaggtgtgtggctttgccccgtacgagcggcgcgccatggagttactgaaggtctccaaggacaaacgggccctcaaatttatcaagaaaagggtggggacgcacatccgcgccaagaggaagcgggaggagctgagcaacgtactggccgccatgaggaaagctgctgccaagaaagactgagcccctcccctgccctctccctgaaataaagaacagcttgacagaa

SEQ ID NO: 279055 - DNA, 874 bp, Homo sapiens
  misc_feature (485)..(485): n is a, c, g, or t
  misc_feature (504)..(504): n is a, c, g, or t
  misc_feature (506)..(506): n is a, c, g, or t
  misc_feature (523)..(523): n is a, c, g, or t
  misc_feature (525)..(525): n is a, c, g, or t
  misc_feature (530)..(530): n is a, c, g, or t
  misc_feature (542)..(543): n is a, c, g, or t
  misc_feature (558)..(558): n is a, c, g, or t
  misc_feature (560)..(560): n is a, c, g, or t
  misc_feature (564)..(564): n is a, c, g, or t
  misc_feature (571)..(571): n is a, c, g, or t
  misc_feature (579)..(579): n is a, c, g, or t
  misc_feature (581)..(581): n is a, c, g, or t
  misc_feature (587)..(587): n is a, c, g, or t
  misc_feature (589)..(590): n is a, c, g, or t
  misc_feature (594)..(594): n is a, c, g, or t
  misc_feature (608)..(608): n is a, c, g, or t
  misc_feature (614)..(614): n is a, c, g, or t
gtgcctggtaccggcccgggagtttatgggatggagagcagcagccatggccctacgctaccctatggccgtgggcctcaacaagggccacaaagtgaccaagaacgtgagcaagcccaggcacagccgacgccgcgggcgtctgaccaaacacaccaagttcgtgcgggacatgattcgggaggtgtgtggctttgccccgtacgagcggcgcgccatggagttactgaaggtctccaaggacaaacgggccctcaaatttatcaagaaaagggtggggacgcacatccgcgccaagaggaagcgggaggagctgagcaacgtactggccgccatgaggaaagctgctgccaagaaagactgagcccctcccctgccctctccctgaaataaagaacagcttgacagaaaaaaaaaaaaaaaaaaaaaaaaaaaaaaaaaaaaaaaaaaaaaaaaaaaaaaaaaaaaaaaaaaaaaaaaaaccnttgtgggccgcttgggccnantcaattttaaattgggnangtttntgcttgcggccnnatttggggctaattngnccanttcgccntatagggngnggtttnannattnattgcccgggtttnacacgnggggactgggaaaacccttggggttaccaaatttattggccttgggaaaaattccccttttcccagttggtgaaaagcaaaaaggccgaccggatcgccctcccaaaagttggccacctaatgggaatggaaatttaagcgtaatattttgtaaaaaccggttaaatttttggaaaaagctctttttataccaaagggcggaattggaaaatccttttaaattaaagataaaccggggtgggggttttccatttggctcc

SEQ ID NO: 279056 - DNA, 1551 bp, Homo sapiens
agtcgtggtgtcttgcggctctgagactccagagaagggctgcggtctcgcagcggagggccgctgggaaatggacgctttaaggcccgggccgccgcaaggctgtctgggaaatgtagtcagcacggcgctgtttgcacctggccgcggagcctcctgggaaatgtagttcggcccggccctggcaccgtgaggggaaagaggcgtcaggtgcctggctgaagcctgaaggtgacccgaaaacaagtcagagcccgagagatccacccgcgcccgcgcgggggaccaagggcccggatttaagaagagtgtgcctacaaggcggttgtcacggcaacgagagggcgggattgttcgagcgctgcggccccctcacgtgatcgattcggaggcggggcgtccgcccagtgggcggggccgggcccctgctgggaggcgaagaccaggcgggcactgttgcccggcgacgctccggcgctgggtccccgaggcccggcccctccccgggaggaggtgggcttcgagtcacgtgacccgtgccctacgggagggggtgcggtcggggacccggcaggaggcggccgagaagagaggaccgtgggggcgttcgcgtggctcccagcccgggaccccacccccgctggacagtgggggaaactgaggcctgagcggagtgaccaccccggctatggccagccagcctccagggagcgcgagtgctgctgacaggggccaacgctggtgttggtgaggagctggcctatcactacgcgcgtctgggctcccacctggtgctcactgcccacactgaggctctcctgcagaagggtcggcccgaaataggcggagttgggattcgaactcatttcacaggcagagggaggagagcagccatagccacctccactggttccgactccagctcccgggctcgcaggagtaaacgcgcatgctcagggagctcggtcgcgcatgctcagcgcaacggcggggaagactccagccgccagggggagcgcgtgccgttcttgcctctctggcctgcgcctcctgagccgagtagatatcccggagttccgcgcggcgccagcccttccgccacggccgtctctggagagcagcagccatggccctacgctaccctatggccgtgggcctcaacaagggccacaaagtgaccaagaacgtgagcaagcccaggcacagccgacgccgcgggcgtctgaccaaacacaccaagttcgtgcgggacatgattcgggaggtgtgtggctttgccccgtacgagcggcgcgccatggagttactgaaggtctccaaggacaaacgggccctcaaatttatcaagaaaagggtggggacgcacatccgcgccaagaggaagcgggaggagctgagcaacgtactggccgccatgaggaaagctgctgccaagaaagactgagcccctcccctgccctctccctgaaataaagaacagcttgacagaaaaaaaaaaaagtcgacgcggccgcgaatttagtagtagtagtagtagtagtaggcggccgc

SEQ ID NO: 279057 - DNA, 1842 bp, Homo sapiens
  misc_feature (1787)..(1788): n is a, c, g, or t
  misc_feature (1792)..(1792): n is a, c, g, or t
  misc_feature (1796)..(1796): n is a, c, g, or t
agtcgtggtgtcttgcggctctgagactccagagaagggctgcggtctcgcagcggagggccgctgggaaatggacgctttaaggcccgggccgccgcaaggctgtctgggaaatgtagtcagcacggcgctgtttgcacctggccgcggagcctcctgggaaatgtagttcggcccggccctggcaccgtgaggggaaagaggcgtcaggtgcctggctgaagcctgaaggtgacccgaaaacaagtcagagcccgagagatccacccgcgcccgcgcgggggaccaagggcccggatttaagaagagtgtgcctacaaggcggttgtcacggcaacgagagggcgggattgttcgagcgctgcggccccctcacgtgatcgattcggaggcggggcgtccgcccagtgggcggggccgggcccctgctgggaggcgaagaccaggcgggcactgttgcccggcgacgctccggcgctgggtccccgaggcccggcccctccccgggaggaggtgggcttcgagtcacgtgacccgtgccctacgggagggggtgcggtcggggacccggcaggaggcggccgagaagagaggaccgtgggggcgttcgcgtggctcccagcccgggaccccacccccgctggacagtgggggaaactgaggcctgagcggggcctgtgccggccacctctgtcccctgtccctctgcaggcccacacaggaccatgaaggtgcttctcctcacagggctgggggccctgttcttcgcctattattgggatgacaacttcgacccagccagcctccagggagcgcgagtgctgctgacaggggccaacgctggtgttggtgaggagctggcctatcactacgcgcgtctgggctcccacctggtgctcactgcccacactgaggctctcctgcagaagggtcggcccgaaataggcggagttgggattcgaactcatttcacaggcagagggaggagagcagccatagccacctccactggttccgactccagctcccgggctcgcaggagtaaacgcgcatgctcagggagctcggtcgcgcatgctcagcgcaacggcggggaagactccagccgccagggggagcgcgtgccgttcttgcctctctggcctgcgcctcctgagccgagtagatatcccggagttccgcgcggcgccagcccttccgccacggccgtctctggagagcagcaggtaagtggtttcccgcactgccggtatccgccgccatccggactcccgggtcctctgtgcaggttggaggatggttggttgtggcgagcgaggctgaaggagccgggacgcggggctctgggcctcgggaactgagccggtactcacctccgccccttctccccgtcgctgtccgcagccatggccctacgctaccctatggccgtgggcctcaacaagggccacaaagtgaccaagaacgtgagcaagcccaggcacagccgacgccgcgggcgtctgaccaaacacaccaagttcgtgcgggacatgattcgggaggtgtgtggctttgccccgtacgagcggcgcgccatggagttactgaaggtctccaaggacaaacgggccctcaaatttatcaagaaaagggtggggacgcacatccgcgccaagaggaagcgggaggagctgagcaacgtactggccgccatgaggaaagctgctgccaagaaagactgagcccctcccctgccctctccctgaaataaagaacagcttgacagaacaacaacacacacccanncacnacancacctctttcccggccccccggcccccgacacagttcaacaccatg

SEQ ID NO: 279058 - DNA, 357 bp, Homo sapiens
tgcgcgctctagactgatgtacccggtgcagaattcgcacgagccaagtacacgtgagcaagcccaggcacagccgacgccgcgggcgtctgaccaaacacaccaagttcgtgcgggacatgattcgggaggtgtgtggctttgccccgtacgagcggcgcgccatggagttactgaaggtctccaaggacaaacgggccctcaaatttatcaagaaaagggtggggacgcacatccgcgccaagaggaagcgggaggagctgagcaacgtactggccgccatgaggaaagctgctgccaagaaagactgagcccctcccctgccctctccctgaaataaagaacagcttgacagaa

SEQ ID NO: 279059 - DNA, 2165 bp, Homo sapiens
agtcgtggtgtcttgcggctctgagactccagagaagggctgcggtctcgcagcggagggccgctgggaaatggacgctttaaggcccgggccgccgcaaggctgtctgggaaatgtagtcagcacggcgctgtttgcacctggccgcggagcctcctgggaaatgtagttcggcccggccctggcaccgtgaggggaaagaggcgtcaggtgcctggctgaagcctgaaggtgacccgaaaacaagtcagagcccgagagatccacccgcgcccgcgcgggggaccaagggcccggatttaagaagagtgtgcctacaaggcggttgtcacggcaacgagagggcgggattgttcgagcgctgcggccccctcacgtgatcgattcggaggcggggcgtccgcccagtgggcggggccgggcccctgctgggaggcgaagaccaggcgggcactgttgcccggcgacgctccggcgctgggtccccgaggcccggcccctccccgggaggaggtgggcttcgagtcacgtgacccgtgccctacgggagggggtgcggtcggggacccggcaggaggcggccgagaagagaggaccgtgggggcgttcgcgtggctcccagcccgggaccccacccccgctggacagtgggggaaactgaggcctgagcggggcctgtgccggccacctctgtcccctgtccctctgcaggcccacacaggaccatgaaggtgcttctcctcacagggctgggggccctgttcttcgcctattattgggatgacaacttcgacccagccagcctccagggagcgcgagtgctgctgacaggggccaacgctggtgttggtgaggagctggcctatcactacgcgcgtctgggctcccacctggtgctcactgcccacactgaggctctcctgcagaaggggtggtagggaactgccggaagctgggcgcccccaaggtcttctacatcgcggcggacatggcctcccctgaggcgcccgagagcgtggtgcagtttgcgctggacaagctgggcgggctggactacctcgtgctgaaccacatcggcggcgccccggccggcacgcgagcccgcagcccccaggcaactcgctggctcatgcaggtaaactttgtgagctacgtgcaactgacgtcgcgggcgctgcccagcctgacggacagcaagggctccctggtggtggtgtcctcgctgctcggccgcgtgcccacgtcgttctccactccctactcggcggccaagtttgcgctggacggcttcttcggctccctgcggcgggagctggacgtgcaggacgtgaacgtggccatcaccatgtgcgtcctgggcctccgagatcgcgcctccgccgccgaggcagtcaggggagtcacgagggtcaaggcggccccggggcccaaggcagccctggccgtgatccgcggcggcgccacgcgcgcggccggcgtcttctacccgtggcgtttccgcctgctgtgcttgctccggcgctggctaccgcgcccgcgggcctggtttatccgccaggagctcaacgtcacggccgcggcagcctgagcaccggggggtgcccctccagtcccagacggcaatgttcctccctccaactgtccctggagccagaacactcacagagacacccctgagagggtggccacagcccaagatgaagtcatcaagacagaaaagcaaaaccgagaaaaacgacgggcacctggaaccagtcacggcttgggaggtgcaggtgccccgtgttaggcgcctttgtcggggacttgcaaggcctcacctgtttggccatgattgatgacgtgactgcttccattttgcagatgaggaaactaaggctcagagaggccacgccacccttgagccacccatggacccctctccatctcctgcctgcgcctttaagtccctgatttattctttccattcattccatctgggaggaacccccccaactcctgccagcttcccctagctggggtctctggtactcttcacacctgcaggggcgtctacactgttcgtctacctggtggcagggtctgagcgggaggaggagggaaagagtgtgttctgagctggacccagcctcttgttcgagaataaaaactcttcttctcttgca

SEQ ID NO: 279060 - DNA, 1876 bp, Homo sapiens
agtcgtggtgtcttgcggctctgagactccagagaagggctgcggtctcgcagcggagggccgctgggaaatggacgctttaaggcccgggccgccgcaaggctgtctgggaaatgtagtcagcacggcgctgtttgcacctggccgcggagcctcctgggaaatgtagttcggcccggccctggcaccgtgaggggaaagaggcgtcaggtgcctggctgaagcctgaaggtgacccgaaaacaagtcagagcccgagagatccacccgcgcccgcgcgggggaccaagggcccggatttaagaagagtgtgcctacaaggcggttgtcacggcaacgagagggcgggattgttcgagcgctgcggccccctcacgtgatcgattcggaggcggggcgtccgcccagtgggcggggccgggcccctgctgggaggcgaagaccaggcgggcactgttgcccggcgacgctccggcgctgggtccccgaggcccggcccctccccgggaggaggtgggcttcgagtcacgtgacccgtgccctacgggagggggtgcggtcggggacccggcaggaggcggccgagaagagaggaccgtgggggcgttcgcgtggctcccagcccgggaccccacccccgctggacagtgggggaaactgaggcctgagcgggcccacacaggaccatgaaggtgcttctcctcacagggctgggggccctgttcttcgcctattattgggatgacaacttcgaccgggctggactacctcgtgctgaaccacatcggcggcgccccggccggcacgcgagcccgcagcccccaggcaactcgctggctcatgcaggtaaactttgtgagctacgtgcaactgacgtcgcgggcgctgcccagcctgacggacagcaagggctccctggtggtggtgtcctcgctgctcggccgcgtgcccacgtcgttctccactccctactcggcggccaagtttgcgctggacggcttcttcggctccctgcggcgggagctggacgtgcaggacgtgaacgtggccatcaccatgtgcgtcctgggcctccgagatcgcgcctccgccgccgaggcagtcaggggagtcacgagggtcaaggcggccccggggcccaaggcagccctggccgtgatccgcggcggcgccacgcgcgcggccggcgtcttctacccgtggcgtttccgcctgctgtgcttgctccggcgctggctaccgcgcccgcgggcctggtttatccgccaggagctcaacgtcacggccgcggcagcctgagcaccggggggtgcccctccagtcccagacggcaatgttcctccctccaactgtccctggagccagaacactcacagagacacccctgagagggtggccacagcccaagatgaagtcatcaagacagaaaagcaaaaccgagaaaaacgacgggcacctggaaccagtcacggcttgggaggtgcaggtgccccgtgttaggcgcctttgtcggggacttgcaaggcctcacctgtttggccatgattgatgacgtgactgcttccattttgcagatgaggaaactaaggctcagagaggccacgccacccttgagccacccatggacccctctccatctcctgcctgcgcctttaagtccctgatttattctttccattcattccatctgggaggaacccccccaactcctgccagcttcccctagctggggtctctggtactcttcacacctgcaggggcgtctacactgttcgtctacctggtggcagggtctgagcgggaggaggagggaaagagtgtgttctgagctggacccagcctcttgttcgagaataaaaactcttcttctcttgca

SEQ ID NO: 279061 - DNA, 2292 bp, Homo sapiens
agtcgtggtgtcttgcggctctgagactccagagaagggctgcggtctcgcagcggagggccgctgggaaatggacgctttaaggcccgggccgccgcaaggctgtctgggaaatgtagtcagcacggcgctgtttgcacctggccgcggagcctcctgggaaatgtagttcggcccggccctggcaccgtgaggggaaagaggcgtcaggtgcctggctgaagcctgaaggtgacccgaaaacaagtcagagcccgagagatccacccgcgcccgcgcgggggaccaagggcccggatttaagaagagtgtgcctacaaggcggttgtcacggcaacgagagggcgggattgttcgagcgctgcggccccctcacgtgatcgattcggaggcggggcgtccgcccagtgggcggggccgggcccctgctgggaggcgaagaccaggcgggcactgttgcccggcgacgctccggcgctgggtccccgaggcccggcccctccccgggaggaggtgggcttcgagtcacgtgacccgtgccctacgggagggggtgcggtcggggacccggcaggaggcggccgagaagagaggaccgtgggggcgttcgcgtggctcccagcccgggaccccacccccgctggacagtgggggaaactgaggcctgagcggggcctgtgccggccacctctgtcccctgtccctctgcaggcccacacaggaccatgaaggtgcttctcctcacagggctgggggccctgttcttcgcctattattgggatgacaacttcgacccagccagcctccagggagcgcgagtgctgctgacaggggccaacgctggtgttggtgaggagctggcctatcactacgcgcgtctgggctcccacctggtgctcactgcccacactgaggctctcctgcagaaggggtggtagggaactgccggaagctgggcgcccccaaggtcttctacatcgcggcggacatggcctcccctgaggcgcccgagagcgtggtgcagtttgcgctggacaagctgggcgggctggactacctcgtgctgaaccacatcggcggcgccccggccggcacgcgagcccgcagcccccaggcaactcgctggctcatgcaggtaaactttgtgagctacgtgcaactgacgtcgcgggcgctgcccagcctgacggacagcaagggctccctggtggtggtgtcctcgctgctcggtgcgtgcacccggccccggctctgcgggacggggagtggggagctcgatgcgggtgagcctggagggtctgggcaggcttcccggacgagggggagccactcagccgctgccgtccgcgcccccaggccgcgtgcccacgtcgttctccactccctactcggcggccaagtttgcgctggacggcttcttcggctccctgcggcgggagctggacgtgcaggacgtgaacgtggccatcaccatgtgcgtcctgggcctccgagatcgcgcctccgccgccgaggcagtcaggggagtcacgagggtcaaggcggccccggggcccaaggcagccctggccgtgatccgcggcggcgccacgcgcgcggccggcgtcttctacccgtggcgtttccgcctgctgtgcttgctccggcgctggctaccgcgcccgcgggcctggtttatccgccaggagctcaacgtcacggccgcggcagcctgagcaccggggggtgcccctccagtcccagacggcaatgttcctccctccaactgtccctggagccagaacactcacagagacacccctgagagggtggccacagcccaagatgaagtcatcaagacagaaaagcaaaaccgagaaaaacgacgggcacctggaaccagtcacggcttgggaggtgcaggtgccccgtgttaggcgcctttgtcggggacttgcaaggcctcacctgtttggccatgattgatgacgtgactgcttccattttgcagatgaggaaactaaggctcagagaggccacgccacccttgagccacccatggacccctctccatctcctgcctgcgcctttaagtccctgatttattctttccattcattccatctgggaggaacccccccaactcctgccagcttcccctagctggggtctctggtactcttcacacctgcaggggcgtctacactgttcgtctacctggtggcagggtctgagcgggaggaggagggaaagagtgtgttctgagctggacccagcctcttgttcgagaataaaaactcttcttctcttgca

SEQ ID NO: 279062 - DNA, 2096 bp, Homo sapiens
agtcgtggtgtcttgcggctctgagactccagagaagggctgcggtctcgcagcggagggccgctgggaaatggacgctttaaggcccgggccgccgcaaggctgtctgggaaatgtagtcagcacggcgctgtttgcacctggccgcggagcctcctgggaaatgtagttcggcccggccctggcaccgtgaggggaaagaggcgtcaggtgcctggctgaagcctgaaggtgacccgaaaacaagtcagagcccgagagatccacccgcgcccgcgcgggggaccaagggcccggatttaagaagagtgtgcctacaaggcggttgtcacggcaacgagagggcgggattgttcgagcgctgcggccccctcacgtgatcgattcggaggcggggcgtccgcccagtgggcggggccgggcccctgctgggaggcgaagaccaggcgggcactgttgcccggcgacgctccggcgctgggtccccgaggcccggcccctccccgggaggaggtgggcttcgagtcacgtgacccgtgccctacgggagggggtgcggtcggggacccggcaggaggcggccgagaagagaggaccgtgggggcgttcgcgtggctcccagcccgggaccccacccccgctggacagtgggggaaactgaggcctgagcgggcccacacaggaccatgaaggtgcttctcctcacagggctgggggccctgttcttcgcctattattgggatgacaacttcgacccagccagcctccagggagcgcgagtgctgctgacaggggccaacgctggtgttggtgaggagctggcctatcactacgcgcgtctgggctcccacctggtgctcactgcccacactgaggctctcctgcagaaggcgggctggactacctcgtgctgaaccacatcggcggcgccccggccggcacgcgagcccgcagcccccaggcaactcgctggctcatgcaggtaaactttgtgagctacgtgcaactgacgtcgcgggcgctgcccagcctgacggacagcaagggctccctggtggtggtgtcctcgctgctcggccgcgtgcccacgtcgttctccactccctactcggcggccaagtttgcgctggacggcttcttcggctccctgcggcgggagctggacgtgcaggacgtgaacgtggccatcaccatgtgcgtcctgggcctccgagatcgcgcctccgccgccgaggcagtcaggtgaggcccggacaagctgggggctgggctgggggccatggcccagccccagccgcagtccccaccgtgccctcctgtccccaggggagtcacgagggtcaaggcggccccggggcccaaggcagccctggccgtgatccgcggcggcgccacgcgcgcggccggcgtcttctacccgtggcgtttccgcctgctgtgcttgctccggcgctggctaccgcgcccgcgggcctggtttatccgccaggagctcaacgtcacggccgcggcagcctgagcaccggggggtgcccctccagtcccagacggcaatgttcctccctccaactgtccctggagccagaacactcacagagacacccctgagagggtggccacagcccaagatgaagtcatcaagacagaaaagcaaaaccgagaaaaacgacgggcacctggaaccagtcacggcttgggaggtgcaggtgccccgtgttaggcgcctttgtcggggacttgcaaggcctcacctgtttggccatgattgatgacgtgactgcttccattttgcagatgaggaaactaaggctcagagaggccacgccacccttgagccacccatggacccctctccatctcctgcctgcgcctttaagtccctgatttattctttccattcattccatctgggaggaacccccccaactcctgccagcttcccctagctggggtctctggtactcttcacacctgcaggggcgtctacactgttcgtctacctggtggcagggtctgagcgggaggaggagggaaagagtgtgttctgagctggacccagcctcttgttcgagaataaaaactcttcttctcttgca

SEQ ID NO: 279063 - DNA, 1720 bp, Homo sapiens
  misc_feature (1720)..(1720): n is a, c, g, or t
agtcgtggtgtcttgcggctctgagactccagagaagggctgcggtctcgcagcggagggccgctgggaaatggacgctttaaggcccgggccgccgcaaggctgtctgggaaatgtagtcagcacggcgctgtttgcacctggccgcggagcctcctgggaaatgtagttcggcccggccctggcaccgtgaggggaaagaggcgtcaggtgcctggctgaagcctgaaggtgacccgaaaacaagtcagagcccgagagatccacccgcgcccgcgcgggggaccaagggcccggatttaagaagagtgtgcctacaaggcggttgtcacggcaacgagagggcgggattgttcgagcgctgcggccccctcacgtgatcgattcggaggcggggcgtccgcccagtgggcggggccgggcccctgctgggaggcgaagaccaggcgggcactgttgcccggcgacgctccggcgctgggtccccgaggcccggcccctccccgggaggaggtgggcttcgagtcacgtgacccgtgccctacgggagggggtgcggtcggggacccggcaggaggcggccgagaagagaggaccgtgggggcgttcgcgtggctcccagcccgggaccccacccccgctggacagtgggggaaactgaggcctgagcgggcccacacaggaccatgaaggtgcttctcctcacagggctgggggccctgttcttcgcctattattgggatgacaacttcgacccagccagcctccagggagcgcgagtgctgctgacaggggccaacgctggtgttggtgaggagctggcctatcactacgcgcgtctgggctcccacctggtgctcactgcccacactgaggctctcctgcagaaggcgggctggactacctcgtgctgaaccacatcggcggcgccccggccggcacgcgagcccgcagcccccaggcaactcgctggctcatgcaggtaaactttgtgagctacgtgcaactgacgtcgcgggcgctgcccagcctgacggacagcaagggctccctggtggtggtgtcctcgctgctcggccgcgtgcccacgtcgttctccactccctactcggcggccaagtttgcgctggacggcttcttcggctccctgcggcgggagctggacgtgcaggacgtgaacgtggccatcaccatgtgcgtcctgggcctccgagatcgcgcctccgccgccgaggcagtcaggtgaggcccggacaagctgggggctgggctgggggccatggcccagccccagccgcagtccccaccgtgccctcctgtccccaggggagtcacgagggtcaaggcggccccggggcccaaggcagccctggccgtgatccgcggcggcgccacgcgcgcggccggcgtcttctacccgtggcgtttccgcctgctgtgcttgctccggcgctggctaccgcgcccgcgggcctggtttatccgccaggagctcaacgtcacggccgcggcagcctgagcaccggggggtgcccctccagtcccagacggcaatgttcctccctccaactgtccctggagccagaacactcacagagacacccctgagagggtggccacagcccaagatgaagtcatcaagacagagcccgagattaggcgcctttgtcggggacttgcggcctcacctgtttggccatgattgatgacgtgctgcttn

SEQ ID NO: 279064 - DNA, 389 bp, Homo sapiens
ggaagagagcctgggtttaatccctgcaatgatccaggcttcccgtgtgaccttgggcaagtcgcctaacctctctgagcctctcagtttcctcatttgcaaaacggggacaataaaaccactttctggccaggcacggtggctcacgcttgtagtcagcactttgggaggccgaggaaagtggatcacctgaggtcaggagttcaagaccagcctggccaacatggcgaaacctggtctctactaagaagacaaaaattaggccaggcatggtggctcatgcctgtaatcctagcactttgggaggccaaggcggatggatcacttgaggtcaggagttcaaaaccagcctggccaacatggtgaaaccctgtctctactaaaaatac

SEQ ID NO: 279065 - DNA, 407 bp, Homo sapiens
ctgcttaactagaatgcagggatccccctaccctgacggccgcccctttcccccctagcgtctgaccaaacacaccaagttcgtgcgggacatgattcgggaggtgtgtggctttgccccgtacgagcggcgcgccatggagttactgaaggtctccaaggacaaacgggccctcaaatttatcaagaaaagggtaggtgggcgctgccggccgaggggcggggtgggatgggagtcagggccgggctgacggcggcctcgtccctggcaggtggggacgcacatccgcgccaagaggaagcgggaggagctgagcaacgtactggccgccatgaggaaagctgctgccaagaaagactgagcccctcccctgccctctccctgaaataaagaacagcttgacagaa

SEQ ID NO: 279066 - DNA, 516 bp, Homo sapiens
actacgttcggctaggtagcgaggcgtgggtggcgatttcccttagttggttgtggcgagcgaggctgaaggagccgggacgcggggctctgggcctcgggaactgagccggtactcacctccgccccttctccccgtcgctgtccgcagccatggccctacgctaccctatggccgtgggcctcaacaagggccacaaagtgaccaagaacgtgagcaagcccaggcacagccgacgccgcgggcgtctgaccaaacacaccaagttcgtgcgggacatgattcgggaggtgtgtggctttgccccgtacgagcggcgcgccatggagttactgaaggtctccaaggacaaacgggccctcaaatttatcaagaaaagggtggggacgcacatccgcgccaagaggaagcgggaggagctgagcaacgtactggccgccatgaggaaagctgctgccaagaaagactgagcccctcccctgccctctccctgaaataaagaacagcttgacagaa

SEQ ID NO: 279067 - DNA, 938 bp, Homo sapiens
ctctagagcggccgcctactactactaaattcgcggccgctcgacggcgtctctggagagcagcagccatggccctacgctaccctatggccgtgggcctcaacaagggccacaaagtgaccaagaacgtgagcaagcccaggcacagccgacgccgcgggcgtctgaccaaacacaccaagttcgtgcgggacatgattcgggaggtgtgtggctttgccccgtacgagcggcgcgccatggagttactgaaggtctccaaggacaaacgggccctcaaatttatcaagaaaagggtggggacgcacatccgcgccaagaggaagcgggaggagctgagcaacgtactggccgccatgaggaaagctgctgccaagaaagactgagcccctcccctgccctctccctgaaataaagaacagcttgacagaaaaaaaaaaaaaaaaaaaaaaaaaaaaaaaaaaaaaaaaaaaaaaaaaaaaaaaaaaaaaaaaaaaaaaaaaaaaaaaggggaaaaaaaaaaaaaaaaaaaaaggggaaaaaaaaaaaaaaaaaaaaaaaaaatcctttgggggccccttggcccaagagatttttaatttggagaagttttttttttggggccaaattgaagctcatttggccaatttccccttaaggggggtgtataaaaaaaaaaggggcggggttttaaaaggggggggtggggaaaaccctggggttcccccaattaaaggccttggaaaaaatcccctttttcccagtggtggaaaataagaaaaaggggccgacccaatccccccttccaaacaagtggccaaccctaaatagggaaaggaaaatttaagccttaattttttggaaaaatccggggaaaaatttttgaaaaaaaccttttttttaaccaaaaggccgaaatggggaatcccttttaaaaa

SEQ ID NO: 279068 - DNA, 500 bp, Homo sapiens
aagcagtgctatcaacgcagagtgcccattacggccggggccttccgccacggccgtctctggagagcagcagccatggccctacgctaccctatggccgtgggcctcaacaagggccacaaagtgaccaagaacgtgagcaagcccaggcacagccgacgccgcgggcgtctgaccaaacacaccaagttcgtgcgggacatgattcgggaggtgtgtggctttgccccgtacgagcggcgcgccatggagttactgaaggtctccaaggacaaacgggccctcaaatttatcaagaaaagggtggggacgcacatccgcgccaagaggaagcgggaggagctgagcaacgtactggccgccatgaggaaagctgctgccaagaaagactgagcccctcccctgccctctccctgaaataaagaacagcttgacagaaaaaaaaaaaagtcgacgcggccgcgaatttagtagtagtagtagtagtagtaggcggccgc

SEQ ID NO: 279069 - DNA, 634 bp, Homo sapiens
  misc_feature (425)..(425): n is a, c, g, or t
  misc_feature (471)..(471): n is a, c, g, or t
cccccccccccccagccttccgccacggccgtctctggagagcagcagccatggccctacgctaccctatggccgtgggcctcaacaagggccacaaagtgaccaagaacgtgagcaagcccaggcacagccgacgccgcgggcgtctgaccaaacacaccaagttcgtgcgggacatgattcgggaggtgtgtggctttgccccgtacgagcggcgcgccatggagttactgaaggtctccaaggacaaacgggccctcaaatttatcaagaaaagggtggggacgcacatccgcgccaagaggaagcgggaggagctgagcaacgtactggccgccatgaggaaagctgctgccaagaaagactgagcccctcccctgccctctccctgaaataaagaacagcttgacagaaaaaaaaaaaanaaaaaaaaaaaaaaacaaaaccatacaaaaaaacaacaaaccaaanaaaaaaaaaaacacaataaacaaaccccaaacaaaaaaaaaaaaaaaaattgggcccgaatttggagctatttgggcaaattgcccttaggggggggcggtttcaaaataaatgggcgggtgttaaaacgggtggttgggcccctgggttccccctttggttt

SEQ ID NO: 279070 - DNA, 1180 bp, Homo sapiens
agtcgtggtgtcttgcggctctgagactccagagaagggctgcggtctcgcagcggagggccgctgggaaatggacgctttaaggcccgggccgccgcaaggctgtctgggaaatgtagtcagcacggcgctgtttgcacctggccgcggagcctcctgggaaatgtagttcggcccggccctggcaccgtgaggggaaagaggcgtcaggtgcctggctgaagcctgaaggtgacccgaaaacaagtcagagcccgagagatccacccgcgcccgcgcgggggaccaagggcccggatttaagaagagtgtgcctacaaggcggttgtcacggcaacgagagggcgggattgttcgagcgctgcggccccctcacgtgatcgattcggaggcggggcgtccgcccagtgggcggggccgggcccctgctgggaggcgaagaccaggcgggcactgttgcccggcgacgctccggcgctgggtccccgaggcccggcccctccccgggaggaggtgggcttcgagtcacgtgacccgtgccctacgggagggggtgcggtcggggacccggcaggaggcggccgagaagagaggaccgtgggggcgttcgcgtggctcccagcccgggaccccacccccgctggacagtgggggaaactgaggcctgagcgggcccacacaggaccatgaaggtgcttctcctcacagggctgggggccctgttcttcgcctattattgggatgacaacttcgacccagccagcctccagggagcgcgagtgctgctgacaggggccaacgctggtgttggtgaggagctggcctatcactacgcgcgtctgggctcccacctggtgctcactgcccacactgaggctctcctgcagaaggaggcacggtggctcacgcttgtagtcagcactttgggaggccgaggaaagtggatcacctgaggtcaggagttcaagaccagcctggccaacatggcgaaacctggtctctactaagaagacaaaaattaggccaggcatggtggctcatgcctgtaatcctagcactttgggaggccaaggcggatggatcacttgaggtcaggagttcaaaaccagcctggccaacatggtgaaaccctgtctctactaaaaatacaaaaaataaaaataaaataaataaataaaaa

SEQ ID NO: 279071 - DNA, 363 bp, Homo sapiens
  misc_feature (1)..(1): n is a, c, g, or t
  misc_feature (6)..(7): n is a, c, g, or t
  misc_feature (10)..(13): n is a, c, g, or t
  misc_feature (16)..(16): n is a, c, g, or t
ngggcnncannnnttnggcacgagggccgtctctggagagcagcagccatggccctacgctaccctatggccgtgggcctcaacaagggccacaaagtgaccaagaacgtgagcaagcccaggcacagccgacgccgcgggcgtctgaccaaacacaccaagttcgtgcgggacatgattcgggaggtgtgtggctttgccccgtacgagcggcgcgccatggagttactgaaggtctccaaggacaaacgggccctcaaatttatcaagaaaaggtactggccgccatgaggaaagctgctgccaagaaagactgagcccctcccctgccctctccctgaaataaagaacagcttgacagaa

SEQ ID NO: 279072 - DNA, 1592 bp, Homo sapiens
agtcgtggtgtcttgcggctctgagactccagagaagggctgcggtctcgcagcggagggccgctgggaaatggacgctttaaggcccgggccgccgcaaggctgtctgggaaatgtagtcagcacggcgctgtttgcacctggccgcggagcctcctgggaaatgtagttcggcccggccctggcaccgtgaggggaaagaggcgtcaggtgcctggctgaagcctgaaggtgacccgaaaacaagtcagagcccgagagatccacccgcgcccgcgcgggggaccaagggcccggatttaagaagagtgtgcctacaaggcggttgtcacggcaacgagagggcgggattgttcgagcgctgcggccccctcacgtgatcgattcggaggcggggcgtccgcccagtgggcggggccgggcccctgctgggaggcgaagaccaggcgggcactgttgcccggcgacgctccggcgctgggtccccgaggcccggcccctccccgggaggaggtgggcttcgagtcacgtgacccgtgccctacgggagggggtgcggtcggggacccggcaggaggcggccgagaagagaggaccgtgggggcgttcgcgtggctcccagcccgggaccccacccccgctggacagtgggggaaactgaggcctgagcggggcctgtgccggccacctctgtcccctgtccctctgcaggcccacacaggaccatgaaggtgcttctcctcacagggctgggggccctgttcttcgcctattattgggatgacaacttcgacccagccagcctccagggagcgcgagtgctgctgacaggggccaacgctggtgttggtgaggagctggcctatcactacgcgcgtctgggctcccacctggtgctcactgcccacactgaggctctcctgcagaagggtcggcccgaaataggcggagttgggattcgaactcatttcacaggcagagggaggagagcagccatagccacctccactggttccgactccagctcccgggctcgcaggagtaaacgcgcatgctcagggagctcggtcgcgcatgctcagcgcaacggcggggaagactccagccgccagggggagcgcgtgccgttcttgcctctctggcctgcgcctcctgagccgagtagatatcccggagttccgcgcggcgccagcccttccgccacggccgtctctggagagcagcagccatggccctacgctaccctatggccgtgggcctcaacaagggccacaaagtgaccaagaacgtgagcaagcccaggcacagccgacgccgcgggcgtctgaccaaacacaccaagttcgtgcgggacatgattcgggaggtgtgtggctttgccccgtacgagcggcgcgccatggagttactgaaggtctccaaggacaaacgggccctcaaatttatcaagaaaagggtggggacgcacatccgcgccaagaggaagcgggaggagctgagcaacgtactggccgccatgaggaaagctgctgccaagaaagactgagcccctcccctgccctctccctgaaataaagaacagcttgacagaa

SEQ ID NO: 279073 - DNA, 1996 bp, Homo sapiens
agtcgtggtgtcttgcggctctgagactccagagaagggctgcggtctcgcagcggagggccgctgggaaatggacgctttaaggcccgggccgccgcaaggctgtctgggaaatgtagtcagcacggcgctgtttgcacctggccgcggagcctcctgggaaatgtagttcggcccggccctggcaccgtgaggggaaagaggcgtcaggtgcctggctgaagcctgaaggtgacccgaaaacaagtcagagcccgagagatccacccgcgcccgcgcgggggaccaagggcccggatttaagaagagtgtgcctacaaggcggttgtcacggcaacgagagggcgggattgttcgagcgctgcggccccctcacgtgatcgattcggaggcggggcgtccgcccagtgggcggggccgggcccctgctgggaggcgaagaccaggcgggcactgttgcccggcgacgctccggcgctgggtccccgaggcccggcccctccccgggaggaggtgggcttcgagtcacgtgacccgtgccctacgggagggggtgcggtcggggacccggcaggaggcggccgagaagagaggaccgtgggggcgttcgcgtggctcccagcccgggaccccacccccgctggacagtgggggaaactgaggcctgagcggagtgaccaccccggctatggccagccagcctccagggagcgcgagtgctgctgacaggggccaacgctggtgttggtgaggagctggcctatcactacgcgcgtctgggctcccacctggtgctcactgcccacactgaggctctcctgcagaagggtcggcccgaaataggcggagttgggattcgaactcatttcacaggcagagggaggagagcagccatagccacctccactggttccgactccagctcccgggctcgcaggagtaaacgcgcatgctcagggagctcggtcgcgcatgctcagcgcaacggcggggaagactccagccgccagggggagcgcgtgccgttcttgcctctctggcctgcgcctcctgagccgagtagatatcccggagttccgcgcggcgccagcccttccgccacggccgtctctggagagcagcagccatggccctacgctaccctatggccgtgggcctcaacaagggccacaaagtgaccaagaacgtgagcaagcccaggcacagccgacgccgcgggcgtctgaccaaacacaccaagttcgtgcgggacatgattcgggaggtgtgtggctttgccccgtacgagcggcgcgccatggagttactgaaggtctccaaggacaaacgggccctcaaatttatcaagaaaagggtggggacgcacatccgcgccaagaggaagcgggaggagctgagcaacgtactggccgccatgaggaaagctgctgccaagaaagactgagcccctcccctgccctctccctgaaataaagaacagcttgacagaaaaaaaaaaaaaaaaaaaaaaaaaaaaaaaaaaaaaaaaaaaaaaaaaaaaaaaaaaaaaaaaaaaaaaaaaaaaaaaggggaaaaaaaaaaaaaaaaaaaaaggggaaaaaaaaaaaaaaaaaaaaaaaaaatcctttgggggccccttggcccaagagatttttaatttggagaagttttttttttggggccaaattgaagctcatttggccaatttccccttaaggggggtgtataaaaaaaaaaggggcggggttttaaaaggggggggtggggaaaaccctggggttcccccaattaaaggccttggaaaaaatcccctttttcccagtggtggaaaataagaaaaaggggccgacccaatccccccttccaaacaagtggccaaccctaaatagggaaaggaaaatttaagccttaattttttggaaaaatccggggaaaaatttttgaaaaaaaccttttttttaaccaaaaggccgaaatggggaatcccttttaaaaa

SEQ ID NO: 279074 - DNA, 2234 bp, Homo sapiens
  misc_feature (1845)..(1845): n is a, c, g, or t
  misc_feature (1864)..(1864): n is a, c, g, or t
  misc_feature (1866)..(1866): n is a, c, g, or t
  misc_feature (1883)..(1883): n is a, c, g, or t
  misc_feature (1885)..(1885): n is a, c, g, or t
  misc_feature (1890)..(1890): n is a, c, g, or t
  misc_feature (1902)..(1903): n is a, c, g, or t
  misc_feature (1918)..(1918): n is a, c, g, or t
  misc_feature (1920)..(1920): n is a, c, g, or t
  misc_feature (1924)..(1924): n is a, c, g, or t
  misc_feature (1931)..(1931): n is a, c, g, or t
  misc_feature (1939)..(1939): n is a, c, g, or t
  misc_feature (1941)..(1941): n is a, c, g, or t
  misc_feature (1947)..(1947): n is a, c, g, or t
  misc_feature (1949)..(1950): n is a, c, g, or t
  misc_feature (1954)..(1954): n is a, c, g, or t
  misc_feature (1968)..(1968): n is a, c, g, or t
  misc_feature (1974)..(1974): n is a, c, g, or t
agtcgtggtgtcttgcggctctgagactccagagaagggctgcggtctcgcagcggagggccgctgggaaatggacgctttaaggcccgggccgccgcaaggctgtctgggaaatgtagtcagcacggcgctgtttgcacctggccgcggagcctcctgggaaatgtagttcggcccggccctggcaccgtgaggggaaagaggcgtcaggtgcctggctgaagcctgaaggtgacccgaaaacaagtcagagcccgagagatccacccgcgcccgcgcgggggaccaagggcccggatttaagaagagtgtgcctacaaggcggttgtcacggcaacgagagggcgggattgttcgagcgctgcggccccctcacgtgatcgattcggaggcggggcgtccgcccagtgggcggggccgggcccctgctgggaggcgaagaccaggcgggcactgttgcccggcgacgctccggcgctgggtccccgaggcccggcccctccccgggaggaggtgggcttcgagtcacgtgacccgtgccctacgggagggggtgcggtcggggacccggcaggaggcggccgagaagagaggaccgtgggggcgttcgcgtggctcccagcccgggaccccacccccgctggacagtgggggaaactgaggcctgagcggggcctgtgccggccacctctgtcccctgtccctctgcaggcccacacaggaccatgaaggtgcttctcctcacagggctgggggccctgttcttcgcctattattgggatgacaacttcgacccagccagcctccagggagcgcgagtgctgctgacaggggccaacgctggtgttggtgaggagctggcctatcactacgcgcgtctgggctcccacctggtgctcactgcccacactgaggctctcctgcagaagggtcggcccgaaataggcggagttgggattcgaactcatttcacaggcagagggaggagagcagccatagccacctccactggttccgactccagctcccgggctcgcaggagtaaacgcgcatgctcagggagctcggtcgcgcatgctcagcgcaacggcggggaagactccagccgccagggggagcgcgtgccgttcttgcctctctggcctgcgcctcctgagccgagtagatatcccggagttccgcgcggcgccagcccttccgccacggccgtctctggagagcagcaggtaagtggtttcccgcactgccggtatccgccgccatccggactcccgggtcctctgtgcaggttggaggatggttggttgtggcgagcgaggctgaaggagccgggacgcggggctctgggcctcgggaactgagccggtactcacctccgccccttctccccgtcgctgtccgcagccatggccctacgctaccctatggccgtgggcctcaacaagggccacaaagtgaccaagaacgtgagcaagcccaggcacagccgacgccgcgggcgtctgaccaaacacaccaagttcgtgcgggacatgattcgggaggtgtgtggctttgccccgtacgagcggcgcgccatggagttactgaaggtctccaaggacaaacgggccctcaaatttatcaagaaaagggtggggacgcacatccgcgccaagaggaagcgggaggagctgagcaacgtactggccgccatgaggaaagctgctgccaagaaagactgagcccctcccctgccctctccctgaaataaagaacagcttgacagaaaaaaaaaaaaaaaaaaaaaaaaaaaaaaaaaaaaaaaaaaaaaaaaaaaaaaaaaaaaaaaaaaaaaaaaaaccnttgtgggccgcttgggccnantcaattttaaattgggnangtttntgcttgcggccnnatttggggctaattngnccanttcgccntatagggngnggtttnannattnattgcccgggtttnacacgnggggactgggaaaacccttggggttaccaaatttattggccttgggaaaaattccccttttcccagttggtgaaaagcaaaaaggccgaccggatcgccctcccaaaagttggccacctaatgggaatggaaatttaagcgtaatattttgtaaaaaccggttaaatttttggaaaaagctctttttataccaaagggcggaattggaaaatccttttaaattaaagataaaccggggtgggggttttccatttggctcc

SEQ ID NO: 279075 - DNA, 1696 bp, Homo sapiens
agtcgtggtgtcttgcggctctgagactccagagaagggctgcggtctcgcagcggagggccgctgggaaatggacgctttaaggcccgggccgccgcaaggctgtctgggaaatgtagtcagcacggcgctgtttgcacctggccgcggagcctcctgggaaatgtagttcggcccggccctggcaccgtgaggggaaagaggcgtcaggtgcctggctgaagcctgaaggtgacccgaaaacaagtcagagcccgagagatccacccgcgcccgcgcgggggaccaagggcccggatttaagaagagtgtgcctacaaggcggttgtcacggcaacgagagggcgggattgttcgagcgctgcggccccctcacgtgatcgattcggaggcggggcgtccgcccagtgggcggggccgggcccctgctgggaggcgaagaccaggcgggcactgttgcccggcgacgctccggcgctgggtccccgaggcccggcccctccccgggaggaggtgggcttcgagtcacgtgacccgtgccctacgggagggggtgcggtcggggacccggcaggaggcggccgagaagagaggaccgtgggggcgttcgcgtggctcccagcccgggaccccacccccgctggacagtgggggaaactgaggcctgagcggagtgaccaccccggctatggccagccagcctccagggagcgcgagtgctgctgacaggggccaacgctggtgttggtgaggagctggcctatcactacgcgcgtctgggctcccacctggtgctcactgcccacactgaggctctcctgcagaagggtcggcccgaaataggcggagttgggattcgaactcatttcacaggcagagggaggagagcagccatagccacctccactggttccgactccagctcccgggctcgcaggagtaaacgcgcatgctcagggagctcggtcgcgcatgctcagcgcaacggcggggaagactccagccgccagggggagcgcgtgccgttcttgcctctctggcctgcgcctcctgagccgagtagatatcccggagttccgcgcggcgccagcccttccgccacggccgtctctggagagcagcagccatggccctacgctaccctatggccgtgggcctcaacaagggccacaaagtgaccaagaacgtgagcaagcccaggcacagccgacgccgcgggcgtctgaccaaacacaccaagttcgtgcgggacatgattcgggaggtgtgtggctttgccccgtacgagcggcgcgccatggagttactgaaggtctccaaggacaaacgggccctcaaatttatcaagaaaagggtggggacgcacatccgcgccaagaggaagcgggaggagctgagcaacgtactggccgccatgaggaaagctgctgccaagaaagactgagcccctcccctgccctctccctgaaataaagaacagcttgacagaagccctggctctcctgctgtccgtgggtgggtgtgggtgtgtcgggggcccgcagtcccctgtctggtgcccgctctgagccacaccctctccgggtgctgcctggtcgtgaatcaaaagccgtggcccgcccacccttcccggggcagcaggtgaggaagccgccgtactgcaaatgactttaatcattaaatagcttctatgcca

SEQ ID NO: 279076 - DNA, 1949 bp, Homo sapiens
agtcgtggtgtcttgcggctctgagactccagagaagggctgcggtctcgcagcggagggccgctgggaaatggacgctttaaggcccgggccgccgcaaggctgtctgggaaatgtagtcagcacggcgctgtttgcacctggccgcggagcctcctgggaaatgtagttcggcccggccctggcaccgtgaggggaaagaggcgtcaggtgcctggctgaagcctgaaggtgacccgaaaacaagtcagagcccgagagatccacccgcgcccgcgcgggggaccaagggcccggatttaagaagagtgtgcctacaaggcggttgtcacggcaacgagagggcgggattgttcgagcgctgcggccccctcacgtgatcgattcggaggcggggcgtccgcccagtgggcggggccgggcccctgctgggaggcgaagaccaggcgggcactgttgcccggcgacgctccggcgctgggtccccgaggcccggcccctccccgggaggaggtgggcttcgagtcacgtgacccgtgccctacgggagggggtgcggtcggggacccggcaggaggcggccgagaagagaggaccgtgggggcgttcgcgtggctcccagcccgggaccccacccccgctggacagtgggggaaactgaggcctgagcggagtgaccaccccggctatggccagccagcctccagggagcgcgagtgctgctgacaggggccaacgctggtgttggtgaggagctggcctatcactacgcgcgtctgggctcccacctggtgctcactgcccacactgaggctctcctgcagaaggcgggctggactacctcgtgctgaaccacatcggcggcgccccggccggcacgcgagcccgcagcccccaggcaactcgctggctcatgcaggtaaactttgtgagctacgtgcaactgacgtcgcgggcgctgcccagcctgacggacagcaagggctccctggtggtggtgtcctcgctgctcggccgcgtgcccacgtcgttctccactccctactcggcggccaagtttgcgctggacggcttcttcggctccctgcggcgggagctggacgtgcaggacgtgaacgtggccatcaccatgtgcgtcctgggcctccgagatcgcgcctccgccgccgaggcagtcaggggagtcacgagggtcaaggcggccccggggcccaaggcagccctggccgtgatccgcggcggcgccacgcgcgcggccggcgtcttctacccgtggcgtttccgcctgctgtgcttgctccggcgctggctaccgcgcccgcgggcctggtttatccgccaggagctcaacgtcacggccgcggcagcctgagcaccggggggtgcccctccagtcccagacggcaatgttcctccctccaactgtccctggagccagaacactcacagagacacccctgagagggtggccacagcccaagatgaagtcatcaagacagaaaagcaaaaccgagaaaaacgacgggcacctggaaccagtcacggcttgggaggtgcaggtgccccgtgttaggcgcctttgtcggggacttgcaaggcctcacctgtttggccatgattgatgacgtgactgcttccattttgcagatgaggaaactaaggctcagagaggccacgccacccttgagccacccatggacccctctccatctcctgcctgcgcctttaagtccctgatttattctttccattcattccatctgggaggaacccccccaactcctgccagcttcccctagctggggtctctggtactcttcacacctgcaggggcgtctacactgttcgtctacctggtggcagggtctgagcgggaggaggagggaaagagtgtgttctgagctggacccagcctcttgttcgagaataaaaactcttcttctcttgca

SEQ ID NO: 279077 - DNA, 2012 bp, Homo sapiens
agtcgtggtgtcttgcggctctgagactccagagaagggctgcggtctcgcagcggagggccgctgggaaatggacgctttaaggcccgggccgccgcaaggctgtctgggaaatgtagtcagcacggcgctgtttgcacctggccgcggagcctcctgggaaatgtagttcggcccggccctggcaccgtgaggggaaagaggcgtcaggtgcctggctgaagcctgaaggtgacccgaaaacaagtcagagcccgagagatccacccgcgcccgcgcgggggaccaagggcccggatttaagaagagtgtgcctacaaggcggttgtcacggcaacgagagggcgggattgttcgagcgctgcggccccctcacgtgatcgattcggaggcggggcgtccgcccagtgggcggggccgggcccctgctgggaggcgaagaccaggcgggcactgttgcccggcgacgctccggcgctgggtccccgaggcccggcccctccccgggaggaggtgggcttcgagtcacgtgacccgtgccctacgggagggggtgcggtcggggacccggcaggaggcggccgagaagagaggaccgtgggggcgttcgcgtggctcccagcccgggaccccacccccgctggacagtgggggaaactgaggcctgagcgggcccacacaggaccatgaaggtgcttctcctcacagggctgggggccctgttcttcgcctattattgggatgacaacttcgacccagccagcctccagggagcgcgagtgctgctgacaggggccaacgctggtgttggtgaggagctggcctatcactacgcgcgtctgggctcccacctggtgctcactgcccacactgaggctctcctgcagaaggcgggctggactacctcgtgctgaaccacatcggcggcgccccggccggcacgcgagcccgcagcccccaggcaactcgctggctcatgcaggtaaactttgtgagctacgtgcaactgacgtcgcgggcgctgcccagcctgacggacagcaagggctccctggtggtggtgtcctcgctgctcggccgcgtgcccacgtcgttctccactccctactcggcggccaagtttgcgctggacggcttcttcggctccctgcggcgggagctggacgtgcaggacgtgaacgtggccatcaccatgtgcgtcctgggcctccgagatcgcgcctccgccgccgaggcagtcaggggagtcacgagggtcaaggcggccccggggcccaaggcagccctggccgtgatccgcggcggcgccacgcgcgcggccggcgtcttctacccgtggcgtttccgcctgctgtgcttgctccggcgctggctaccgcgcccgcgggcctggtttatccgccaggagctcaacgtcacggccgcggcagcctgagcaccggggggtgcccctccagtcccagacggcaatgttcctccctccaactgtccctggagccagaacactcacagagacacccctgagagggtggccacagcccaagatgaagtcatcaagacagaaaagcaaaaccgagaaaaacgacgggcacctggaaccagtcacggcttgggaggtgcaggtgccccgtgttaggcgcctttgtcggggacttgcaaggcctcacctgtttggccatgattgatgacgtgactgcttccattttgcagatgaggaaactaaggctcagagaggccacgccacccttgagccacccatggacccctctccatctcctgcctgcgcctttaagtccctgatttattctttccattcattccatctgggaggaacccccccaactcctgccagcttcccctagctggggtctctggtactcttcacacctgcaggggcgtctacactgttcgtctacctggtggcagggtctgagcgggaggaggagggaaagagtgtgttctgagctggacccagcctcttgttcgagaataaaaactcttcttctcttgca

SEQ ID NO: 279078 - DNA, 1990 bp, Homo sapiens
agtcgtggtgtcttgcggctctgagactccagagaagggctgcggtctcgcagcggagggccgctgggaaatggacgctttaaggcccgggccgccgcaaggctgtctgggaaatgtagtcagcacggcgctgtttgcacctggccgcggagcctcctgggaaatgtagttcggcccggccctggcaccgtgaggggaaagaggcgtcaggtgcctggctgaagcctgaaggtgacccgaaaacaagtcagagcccgagagatccacccgcgcccgcgcgggggaccaagggcccggatttaagaagagtgtgcctacaaggcggttgtcacggcaacgagagggcgggattgttcgagcgctgcggccccctcacgtgatcgattcggaggcggggcgtccgcccagtgggcggggccgggcccctgctgggaggcgaagaccaggcgggcactgttgcccggcgacgctccggcgctgggtccccgaggcccggcccctccccgggaggaggtgggcttcgagtcacgtgacccgtgccctacgggagggggtgcggtcggggacccggcaggaggcggccgagaagagaggaccgtgggggcgttcgcgtggctcccagcccgggaccccacccccgctggacagtgggggaaactgaggcctgagcgggcccacacaggaccatgaaggtgcttctcctcacagggctgggggccctgttcttcgcctattattgggatgacaacttcgacggtggtagggaactgccggaagctgggcgcccccaaggtcttctacatcgcggcggacatggcctcccctgaggcgcccgagagcgtggtgcagtttgcgctggacaagctgggcgggctggactacctcgtgctgaaccacatcggcggcgccccggccggcacgcgagcccgcagcccccaggcaactcgctggctcatgcaggtaaactttgtgagctacgtgcaactgacgtcgcgggcgctgcccagcctgacggacagcaagggctccctggtggtggtgtcctcgctgctcggccgcgtgcccacgtcgttctccactccctactcggcggccaagtttgcgctggacggcttcttcggctccctgcggcgggagctggacgtgcaggacgtgaacgtggccatcaccatgtgcgtcctgggcctccgagatcgcgcctccgccgccgaggcagtcaggggagtcacgagggtcaaggcggccccggggcccaaggcagccctggccgtgatccgcggcggcgccacgcgcgcggccggcgtcttctacccgtggcgtttccgcctgctgtgcttgctccggcgctggctaccgcgcccgcgggcctggtttatccgccaggagctcaacgtcacggccgcggcagcctgagcaccggggggtgcccctccagtcccagacggcaatgttcctccctccaactgtccctggagccagaacactcacagagacacccctgagagggtggccacagcccaagatgaagtcatcaagacagaaaagcaaaaccgagaaaaacgacgggcacctggaaccagtcacggcttgggaggtgcaggtgccccgtgttaggcgcctttgtcggggacttgcaaggcctcacctgtttggccatgattgatgacgtgactgcttccattttgcagatgaggaaactaaggctcagagaggccacgccacccttgagccacccatggacccctctccatctcctgcctgcgcctttaagtccctgatttattctttccattcattccatctgggaggaacccccccaactcctgccagcttcccctagctggggtctctggtactcttcacacctgcaggggcgtctacactgttcgtctacctggtggcagggtctgagcgggaggaggagggaaagagtgtgttctgagctggacccagcctcttgttcgagaataaaaactcttcttctcttgca

SEQ ID NO: 279079 - DNA, 1959 bp, Homo sapiens
agtcgtggtgtcttgcggctctgagactccagagaagggctgcggtctcgcagcggagggccgctgggaaatggacgctttaaggcccgggccgccgcaaggctgtctgggaaatgtagtcagcacggcgctgtttgcacctggccgcggagcctcctgggaaatgtagttcggcccggccctggcaccgtgaggggaaagaggcgtcaggtgcctggctgaagcctgaaggtgacccgaaaacaagtcagagcccgagagatccacccgcgcccgcgcgggggaccaagggcccggatttaagaagagtgtgcctacaaggcggttgtcacggcaacgagagggcgggattgttcgagcgctgcggccccctcacgtgatcgattcggaggcggggcgtccgcccagtgggcggggccgggcccctgctgggaggcgaagaccaggcgggcactgttgcccggcgacgctccggcgctgggtccccgaggcccggcccctccccgggaggaggtgggcttcgagtcacgtgacccgtgccctacgggagggggtgcggtcggggacccggcaggaggcggccgagaagagaggaccgtgggggcgttcgcgtggctcccagcccgggaccccacccccgctggacagtgggggaaactgaggcctgagcgggcccacacaggaccatgaaggtgcttctcctcacagggctgggggccctgttcttcgcctattattgggatgacaacttcgacccagccagcctccagggagcgcgagtgctgctgacaggggccaacgctggtgttggtgaggagctggcctatcactacgcgcgtctgggctcccacctggtgctcactgcccacactgaggctctcctgcagaaggggtggtagggaactgccggaagctgggcgcccccaaggtcttctacatcgcggcggacatggcctcccctgaggcgcccgagagcgtggtgcagtttgcgctggacaagctgggcgggctggactacctcgtgctgaaccacatcggcggcgccccggccggcacgcgagcccgcagcccccaggcaactcgctggctcatgcaggtaaactttgtgagctacgtgcaactgacgtcgcgggcgctgcccagcctgacggacagcaagggctccctggtggtggtgtcctcgctgctcggccgcgtgcccacgtcgttctccactccctactcggcggccaagtttgcgctggacggcttcttcggctccctgcggcgggagctggacgtgcaggacgtgaacgtggccatcaccatgtgcgtcctgggcctccgagatcgcgcctccgccgccgaggcagtagctcaacgtcacggccgcggcagcctgagcaccggggggtgcccctccagtcccagacggcaatgttcctccctccaactgtccctggagccagaacactcacagagacacccctgagagggtggccacagcccaagatgaagtcatcaagacagaaaagcaaaaccgagaaaaacgacgggcacctggaaccagtcacggcttgggaggtgcaggtgccccgtgttaggcgcctttgtcggggacttgcaaggcctcacctgtttggccatgattgatgacgtgactgcttccattttgcagatgaggaaactaaggctcagagaggccacgccacccttgagccacccatggacccctctccatctcctgcctgcgcctttaagtccctgatttattctttccattcattccatctgggaggaacccccccaactcctgccagcttcccctagctggggtctctggtactcttcacacctgcaggggcgtctacactgttcgtctacctggtggcagggtctgagcgggaggaggagggaaagagtgtgttctgagctggacccagcctcttgttcgagaataaaaactcttcttctcttgca

SEQ ID NO: 279080 - DNA, 1219 bp, Homo sapiens
agtcgtggtgtcttgcggctctgagactccagagaagggctgcggtctcgcagcggagggccgctgggaaatggacgctttaaggcccgggccgccgcaaggctgtctgggaaatgtagtcagcacggcgctgtttgcacctggccgcggagcctcctgggaaatgtagttcggcccggccctggcaccgtgaggggaaagaggcgtcaggtgcctggctgaagcctgaaggtgacccgaaaacaagtcagagcccgagagatccacccgcgcccgcgcgggggaccaagggcccggatttaagaagagtgtgcctacaaggcggttgtcacggcaacgagagggcgggattgttcgagcgctgcggccccctcacgtgatcgattcggaggcggggcgtccgcccagtgggcggggccgggcccctgctgggaggcgaagaccaggcgggcactgttgcccggcgacgctccggcgctgggtccccgaggcccggcccctccccgggaggaggtgggcttcgagtcacgtgacccgtgccctacgggagggggtgcggtcggggacccggcaggaggcggccgagaagagaggaccgtgggggcgttcgcgtggctcccagcccgggaccccacccccgctggacagtgggggaaactgaggcctgagcggggcctgtgccggccacctctgtcccctgtccctctgcaggcccacacaggaccatgaaggtgcttctcctcacagggctgggggccctgttcttcgcctattattgggatgacaacttcgacccagccagcctccagggagcgcgagtgctgctgacaggggccaacgctggtgttggtgaggagctggcctatcactacgcgcgtctgggctcccacctggtgctcactgcccacactgaggctctcctgcagaaggaggcacggtggctcacgcttgtagtcagcactttgggaggccgaggaaagtggatcacctgaggtcaggagttcaagaccagcctggccaacatggcgaaacctggtctctactaagaagacaaaaattaggccaggcatggtggctcatgcctgtaatcctagcactttgggaggccaaggcggatggatcacttgaggtcaggagttcaaaaccagcctggccaacatggtgaaaccctgtctctactaaaaatacaaaaaataaaaataaaataaataaataaaaa

SEQ ID NO: 279081 - DNA, 702 bp, Homo sapiens
aaaaaaaattgtccccatgtagacagcatgatattatgaagtgtttttggaaaagtgcttcatagctaaagagcagagtgtaagagttcgttagtgtttcttaaggaaagcaatggcaagttctcttacaaatggacaaaataatcttgtatgtctgaagtgatagtgtacagtacaggaaatgtagctgttactgagctataatgggggcttggttctaccatatctctactttgtgtttatgtttgtgtatgcatgtactccaaagtctttctaatgttgctttaatttccaaaaatgtatgcattgctttaacaatacatgtgatgtgtcatattacagatggggtcacagtggttataaagagttataccctgaagaatttgaaacagacaggtaaggaaaataggcttactgaaagaaactaagatggtacaaaatctgtattataaattgatttcttaacttttacgaagaatatacttgccatcaaaaatgtagctagagaaacaataggtgatttagttaggaggtgatccctgttttcccattctctggttgatgtttggcatgtctgtaagcattttggtttttatatatagtattccatacagtaactcagtatggcagcttagaatttttaccttcattttaaagatgaggaaacaaaaactcaatgagaatattaaagtgttaaagtat

SEQ ID NO: 279082 - DNA, 3695 bp, Homo sapiens
ttctcccaaaccacttcttcccccctaccccccgccacgcgaggctgcggcgcacggtatgggtgtgtttgtgtgtatttgtgtggggagggcgtttggagggaaggttaccgggagctccgaggccgctggggaacagggatcccggtgacaaagatggggatatttcctctgtcttccacttggaaacctcaacccccgcttcaggctccctagatactttctggggcccaaccgaaggccgtagccatccaaagcgttcccagcctttctggggagtgaaacttacccccggggttcgtcctagaggagcgtgagcggggaatgcccaggtcaaccgggctgtccgaattccgccccggctcagcctccggcctcagtccgggagagagatctgcctgtcggtctgggctgggggaaacgcggcagtggcctgggccacaggtgagggcagagtaaccagtgggaaggctgcgttttcacgaaggactcgggtgaagctgcagagctgcctttgagccctgactccttggcttcctgggtcggaggagatcttgtaatggagtggttcttcgtctcactagcaagatgcctgatttcctcaggatcaagggattgaagaatgtcccggattccactggggaaggtcctcctgaggaatgtcatccggcacacagatgctcacaataagattcaggaggaatcagatatgtggaaaataagagaactggaaaaacagatggaagatgcttaccgggggaccaaaaggaaaatgctacccagcagttcaagccggatgcgcagtgatggttttgatgaagaaagtcaaagatactattggaggccaaagaatgaaatttctgggacactggaagatgattttcttaaggctaaatcctggaataaaaagttctatgattatgaagcaaacatgccagacagatggggtcacagtggttataaagagttataccctgaagaatttgaaacagacagtagtgatcagcaagatattaccaacgggaagaaaacatctccccaggtaaagtcatctacccatgaatcccgcaaacacaagaagtcaaagaaatcccacaaaaaaaagcagaaaaaaaggtcacacaaaaaacagaagaaaagcaaaaaggaagccacagatataacagcagattcctcgagtgagttctcagaagaaactggggcttctggtacaaggaaagggaaacaaccacataaacgcaagaaaaaatccaggaaaaagtctctcaaaaaacctgctttattcttagaggcagaaagtaacacttcacattcagatgattcagcatccagcagttctgaggaaagtgaggaaagagacactaagaaaaccaaaaggaaaaagagagagaaaaaagcccatacctctgtagccaacaatgaaatacaggagaggacaaacaaacgcacaaattggaaagtagctacagatgaaaggtctgctgagagctcagaggatgactaaatgggaaacacttttgttttccacatgactgtggatatttacagttcttactccttgtggttttgccagtgactcttgttcagcacggggcctgaggtcagagctgtcttgtgccatctgtatgttctgacagacgtcttgtcttctattttggcgttaagcttgatccccttttcttgttaaaagggaatctggtattttgttatgaaggtttcttgaagagattatttttttttgcaattaattacgtttagtgtagagtgcatatacagcaaattaaaggacccagaaagctggatccaatagtgacctgggtacaccaatcggaatattgaatttggggaagtcaagggctgggatcaagaggtggattggaactaatgccatgtaggatggtatgacaaggcaacactgtattgctctctgtttatatagcaggtgtcacaactaacttgtctttagccttggtgctttgatccttctatattttgaccccacaggtgtggtccggtttacttaatcaggacatgggcctaagaacaaaccttttcccttcatgataacatccatagacaacttattagaagggactagagtttttgcaaatttccctgctggatggggcctatagctatacttagtatatgcctaaacatggtaattggatagtaaatggttttctagttccattgctgtatatttgcctaaatggacttgtgttcaaattatttcttcaattgtcatagataatcctgtaccaaatggggaagaattaggaaataatcatgttgtctaatggtactctggattcagggcagcaactgccatttaaatgttgtcttgttcatttctaaatctgttcatgaagtttaggttttccctgaaactaagttgaattatttccaaaatgaaacaggcttctcagggacatatccacttcttcccagtctgcctttggattaaagcaccaagcagagaccacattaattccctttgctatactgtgatccttagtatgttaattcttaagaaaccaacatatcactgaaagaaggctggcagaacgcaagtgcattttttcactgtgggaagaaagatcaagtgacgtattattttttcctggttgtcacttaatgggctgagtaaaaagcttgaaaactcagactttcggtcttggttctgccactcattggttatgaggaggcccagagcaggtaagttcaccttcctggccttactttcctgatgtgtaatacggaattacttcacagtagcatgacagtataagacaccagcagtagatacaactatgatgacattccatgagttggtatttttagttctaactgctaaatttgttctctttacgggacagatttctaataaagtgcttggtcttaaaatacatggttggacagaggtgccctatcccttaactatgagcaggtgctaccttttgggatatttattttaaattttaatactttggtactcaattgtcagtgttccatggtgtgtatttttatttttgggattagtgggggtctaaagggagaagaatagtctctaattactacctcttaacctaaagcaattattttgttcctggagcaagttaaatctttgttggaaggagctttggccatatattttttagcatgcattgtttctgtgccctgaaagtacctgaaaggttttaagcacagactcaggaaaatgtgccagtagaacaggccatctccaggaaattggctctatttgggtcctgaccttcccttcctcccaagttagcaggcttgttcttttgcaaggaatacacatcttgccttttttttttttttttttttgccatgttttccttttcttggtcatgtataagcaataaagctgttttttgttcttcatctttcttaaccccaaattttcttctatgccttaggcttcgatggttcttccaacccccttaatatggcttagggtggtttttcaaaacctacaatcccccatttgcactactggccatggaacatttatttctagtgttcctgccaatcagagatctctatattaaattctaaaatgggattaaaagaagagttggagaattcacacttattgagtaactgatgtcatacaacctggaatttctgaattccaaataaataaatttcactctttgaaaaaaacatct

SEQ ID NO: 279083 - DNA, 3167 bp, Homo sapiens
ttctcccaaaccacttcttcccccctaccccccgccacgcgaggctgcggcgcacgcaagatgcctgatttcctcaggatcaagggattgaagaatgtcccggattccactggggaaggtcctcctgaggaatgtcatccggcacacagatgctcacaataagattcaggaggaatcagatatgtggaaaataagagaactggaaaaacagatggaagatgcttaccgggggaccaaaaggaaaatgctacccagcagttcaagccggatgcgcagtgatggttttgatgaagaaagtcaaagatactattggaggccaaagaatgaaatttctgggacactggaagatgattttcttaaggctaaatcctggaataaaaagttctatgattatgaagcaaacatgccagacagatggggtcacagtggttataaagagttataccctgaagaatttgaaacagacagtagtgatcagcaagatattaccaacgggaagaaaacatctccccaggtaaagtcatctacccatgaatcccgcaaacacaagaagtcaaagaaatcccacaaaaaaaagcagaaaaaaaggtcacacaaaaaacagaagaaaagcaaaaaggaagccacagatataacagcagattcctcgagtgagttctcagaagaaactggggcttctggtacaaggaaagggaaacaaccacataaacgcaagaaaaaatccaggaaaaagtctctcaaaaaacctgctttattcttagaggcagaaagtaacacttcacattcagatgattcagcatccagcagttctgaggaaagtgaggaaagagacactaagaaaaccaaaaggaaaaagagagagaaaaaagcccatacctctgtagccaacaatgaaatacaggagaggacaaacaaacgcacaaattggaaagtagctacagatgaaaggtctgctgagagctcagaggatgactaaatgggaaacacttttgttttccacatgactgtggatatttacagttcttactccttgtggttttgccagtgactcttgttcagcacggggcctgaggtcagagctgtcttgtgccatctgtatgttctgacagacgtcttgtcttctattttggcgttaagcttgatccccttttcttgttaaaagggaatctggtattttgttatgaaggtttcttgaagagattatttttttttgcaattaattacgtttagtgtagagtgcatatacagcaaattaaaggacccagaaagctggatccaatagtgacctgggtacaccaatcggaatattgaatttggggaagtcaagggctgggatcaagaggtggattggaactaatgccatgtaggatggtatgacaaggcaacactgtattgctctctgtttatatagcaggtgtcacaactaacttgtctttagccttggtgctttgatccttctatattttgaccccacaggtgtggtccggtttacttaatcaggacatgggcctaagaacaaaccttttcccttcatgataacatccatagacaacttattagaagggactagagtttttgcaaatttccctgctggatggggcctatagctatacttagtatatgcctaaacatggtaattggatagtaaatggttttctagttccattgctgtatatttgcctaaatggacttgtgttcaaattatttcttcaattgtcatagataatcctgtaccaaatggggaagaattaggaaataatcatgttgtctaatggtactctggattcagggcagcaactgccatttaaatgttgtcttgttcatttctaaatctgttcatgaagtttaggttttccctgaaactaagttgaattatttccaaaatgaaacaggcttctcagggacatatccacttcttcccagtctgcctttggattaaagcaccaagcagagaccacattaattccctttgctatactgtgatccttagtatgttaattcttaagaaaccaacatatcactgaaagaaggctggcagaacgcaagtgcattttttcactgtgggaagaaagatcaagtgacgtattattttttcctggttgtcacttaatgggctgagtaaaaagcttgaaaactcagactttcggtcttggttctgccactcattggttatgaggaggcccagagcaggtaagttcaccttcctggccttactttcctgatgtgtaatacggaattacttcacagtagcatgacagtataagacaccagcagtagatacaactatgatgacattccatgagttggtatttttagttctaactgctaaatttgttctctttacgggacagatttctaataaagtgcttggtcttaaaatacatggttggacagaggtgccctatcccttaactatgagcaggtgctaccttttgggatatttattttaaattttaatactttggtactcaattgtcagtgttccatggtgtgtatttttatttttgggattagtgggggtctaaagggagaagaatagtctctaattactacctcttaacctaaagcaattattttgttcctggagcaagttaaatctttgttggaaggagctttggccatatattttttagcatgcattgtttctgtgccctgaaagtacctgaaaggttttaagcacagactcaggaaaatgtgccagtagaacaggccatctccaggaaattggctctatttgggtcctgaccttcccttcctcccaagttagcaggcttgttcttttgcaaggaatacacatcttgccttttttttttttttttttttgccatgttttccttttcttggtcatgtataagcaataaagctgttttttgttcttcatctttcttaaccccaaattttcttctatgccttaggcttcgatggttcttccaacccccttaatatggcttagggtggtttttcaaaacctacaatcccccatttgcactactggccatggaacatttatttctagtgttcctgccaatcagagatctctatattaaattctaaaatgggattaaaagaagagttggagaattcacacttattgagtaactgatgtcatacaacctggaatttctgaattccaaataaataaatttcactctttgaaaaaaacatct

SEQ ID NO: 279084 - DNA, 2911 bp, Homo sapiens
ttctcccaaaccacttcttcccccctaccccccgccacgcgaggctgcggcgcacggtatgggtgtgtttgtgtgtatttgtgtggggagggcgtttggagggaaggttaccgggagctccgaggccgctggggaacagggatcccggtgacaaagatggggatatttcctctgtcttccacttggaaacctcaacccccgcttcaggctccctagatactttctggggcccaaccgaaggccgtagccatccaaagcgttcccagcctttctggggagtgaaacttacccccggggttcgtcctagaggagcgtgagcggggaatgcccaggtcaaccgggctgtccgaattccgccccggctcagcctccggcctcagtccgggagagagatctgcctgtcggtctgggctgggggaaacgcggcagtggcctgggccacaggtgagggcagagtaaccagtgggaaggctgcgttttcacgaaggactcgggtgaagctgcagagctgcctttgagccctgactccttggcttcctgggtcggaggagatcttgtaatggagtggttcttcgtctcactagcaagatgcctgatttcctcaggatcaagggattgaagaatgtcccggattccactggggaaggtcctcctgaggaatgtcatccggcacacagatgctcacaataagattcaggaggaatcagatatgtggaaaataagagaactggaaaaacagatggaagatgcttaccgggggaccaaaaggaaaatgctacccagcagttcaagccggatgcgcagtgatggttttgatgaagaaagtcaaagatactattggaggccaaagaatgaaatttctgggacactggaagatgattttcttaaggctaaatcctggaataaaaagttctatgattatgaagcaaacatgccagacagatggggtcacagtggttataaagagttataccctgaagaatttgaaacagacagtagtgatcagcaagatattaccaacgggaagaaaacatctccccaggtaaagtcatctacccatgaatcccgcaaacacaagaagtcaaagaaatcccacaaaaaaaagcagaaaaaaaggtcacacaaaaaacagaagaaaagcaaaaaggaagccacagatataacagcagattcctcgagtgagttctcagaagaaactggggcttctggtacaaggaaagggaaacaaccacataaacgcaagaaaaaatccaggaaaaagtctctcaaaaaacctgctttattcttagaggcagaaagtaacacttcacattcagatgattcagcatccagcagttctgaggaaagtgaggaaagagacactaagaaaaccaaaaggaaaaagagagagaaaaaagcccatacctctgtagccaacaatgaaatacaggagaggacaaacaaacgcacaaattggaaagtagctacagatgaaaggtctgctgagagctcagaggatgactaaatgggaaacacttttgttttccacatgactgtggatatttacagttcttactccttgtggttttgccagtgactcttgttcagcacggggcctgaggtcagagctgtcttgtgccatctgtatgttctgacagacgtcttgtcttctattttggcgttaagcttgatccccttttcttgttaaaagggaatctggtattttgttatgaaggtttcttgaagagattatttttttttgcaattaattacgtttagtgtagagtgcatatacagcaaattaaaggacccagaaagctggatccaatagtgacctgggtacaccaatcggaatattgaatttggggaagtcaagggctgggatcaagaggtggattggaactaatgccatgtaggatggtatgacaaggcaacactgtattgctctctgtttatatagcaggtgtcacaactaacttgtctttagccttggtgctttgatccttctatattttgaccccacaggtgtggtccggtttacttaatcaggacatgggcctaagaacaaaccttttcccttcatgataacatccatagacaacttattagaagggactagagtttttgcaaatttccctgctggatggggcctatagctatacttagtatatgcctaaacatggtaattggatagtaaatggttttctagttccattgctgtatatttgcctaaatggacttgtgttcaaattatttcttcaattgtcatagataatcctgtaccaaatggggaagaattaggaaataatcatgttgtctaatggtactctggattcagggcagcaactgccatttaaatgttgtcttgttcatttctaaatctgttcatgaagtttaggttttccctgaaactaagttgaattatttccaaaatgaaacaggcttctcagggacatatccacttcttcccagtctgcctttggattaaagcaccaagcagagaccacattaattccctttgctatactgtgatccttagtatgttaattcttaagaaaccaacatatcactgaaagaaggctggcagaacgcaagtgcattttttcactgtgggaagaaagatcaagtgacgtattattttttcctggttgtcacttaatgggctgagtaaaaagcttgaaaactcagactttcggtcttggttctgccactcattggttatgaggaggcccagagcaggtaagttcaccttcctggccttactttcctgatgtgtaatacggaattacttcacagtagcatgacagtataagacaccagcagtagatacaactatgatgacattccatgagttggtatttttagttctaactgctaaatttgttctctttacgggacagatttctaataaagtgcttggtcttaaaataca

SEQ ID NO: 279085 - DNA, 3095 bp, Homo sapiens
aaaaaaaattgtccccatgtagacagcatgatattatgaagtgtttttggaaaagtgcttcatagctaaagagcagagtgtaagagttcgttagtgtttcttaaggaaagcaatggcaagttctcttacaaatggacaaaataatcttgtatgtctgaagtgatagtgtacagtacaggaaatgtagctgttactgagctataatgggggcttggttctaccatatctctactttgtgtttatgtttgtgtatgcatgtactccaaagtctttctaatgttgctttaatttccaaaaatgtatgcattgctttaacaatacatgtgatgtgtcatattacagatggggtcacagtggttataaagagttataccctgaagaatttgaaacagacagtagtgatcagcaagatattaccaacgggaagaaaacatctccccaggtaaagtcatctacccatgaatcccgcaaacacaagaagtcaaagaaatcccacaaaaaaaagcagaaaaaaaggtcacacaaaaaacagaagaaaagcaaaaaggaagccacagatataacagcagattcctcgagtgagttctcagaagaaactggggcttctggtacaaggaaagggaaacaaccacataaacgcaagaaaaaatccaggaaaaagtctctcaaaaaacctgctttattcttagaggcagaaagtaacacttcacattcagatgattcagcatccagcagttctgaggaaagtgaggaaagagacactaagaaaaccaaaaggaaaaagagagagaaaaaagcccatacctctgtagccaacaatgaaatacaggagaggacaaacaaacgcacaaattggaaagtagctacagatgaaaggtctgctgagagctcagaggatgactaaatgggaaacacttttgttttccacatgactgtggatatttacagttcttactccttgtggttttgccagtgactcttgttcagcacggggcctgaggtcagagctgtcttgtgccatctgtatgttctgacagacgtcttgtcttctattttggcgttaagcttgatccccttttcttgttaaaagggaatctggtattttgttatgaaggtttcttgaagagattatttttttttgcaattaattacgtttagtgtagagtgcatatacagcaaattaaaggacccagaaagctggatccaatagtgacctgggtacaccaatcggaatattgaatttggggaagtcaagggctgggatcaagaggtggattggaactaatgccatgtaggatggtatgacaaggcaacactgtattgctctctgtttatatagcaggtgtcacaactaacttgtctttagccttggtgctttgatccttctatattttgaccccacaggtgtggtccggtttacttaatcaggacatgggcctaagaacaaaccttttcccttcatgataacatccatagacaacttattagaagggactagagtttttgcaaatttccctgctggatggggcctatagctatacttagtatatgcctaaacatggtaattggatagtaaatggttttctagttccattgctgtatatttgcctaaatggacttgtgttcaaattatttcttcaattgtcatagataatcctgtaccaaatggggaagaattaggaaataatcatgttgtctaatggtactctggattcagggcagcaactgccatttaaatgttgtcttgttcatttctaaatctgttcatgaagtttaggttttccctgaaactaagttgaattatttccaaaatgaaacaggcttctcagggacatatccacttcttcccagtctgcctttggattaaagcaccaagcagagaccacattaattccctttgctatactgtgatccttagtatgttaattcttaagaaaccaacatatcactgaaagaaggctggcagaacgcaagtgcattttttcactgtgggaagaaagatcaagtgacgtattattttttcctggttgtcacttaatgggctgagtaaaaagcttgaaaactcagactttcggtcttggttctgccactcattggttatgaggaggcccagagcaggtaagttcaccttcctggccttactttcctgatgtgtaatacggaattacttcacagtagcatgacagtataagacaccagcagtagatacaactatgatgacattccatgagttggtatttttagttctaactgctaaatttgttctctttacgggacagatttctaataaagtgcttggtcttaaaatacatggttggacagaggtgccctatcccttaactatgagcaggtgctaccttttgggatatttattttaaattttaatactttggtactcaattgtcagtgttccatggtgtgtatttttatttttgggattagtgggggtctaaagggagaagaatagtctctaattactacctcttaacctaaagcaattattttgttcctggagcaagttaaatctttgttggaaggagctttggccatatattttttagcatgcattgtttctgtgccctgaaagtacctgaaaggttttaagcacagactcaggaaaatgtgccagtagaacaggccatctccaggaaattggctctatttgggtcctgaccttcccttcctcccaagttagcaggcttgttcttttgcaaggaatacacatcttgccttttttttttttttttttttgccatgttttccttttcttggtcatgtataagcaataaagctgttttttgttcttcatctttcttaaccccaaattttcttctatgccttaggcttcgatggttcttccaacccccttaatatggcttagggtggtttttcaaaacctacaatcccccatttgcactactggccatggaacatttatttctagtgttcctgccaatcagagatctctatattaaattctaaaatgggattaaaagaagagttggagaattcacacttattgagtaactgatgtcatacaacctggaatttctgaattccaaataaataaatttcactctttgaaaaaaacatct

SEQ ID NO: 279086 - DNA, 3137 bp, Homo sapiens
ttctcccaaaccacttcttcccccctaccccccgccacgcgaggctgcggcgcacgattgaagaatgtcccggattccactggggaaggtcctcctgaggaatgtcatccggcacacagatgctcacaataagattcaggaggaatcagatatgtggaaaataagagaactggaaaaacagatggaagatgcttaccgggggaccaaaaggaaaatgctacccagcagttcaagccggatgcgcagtgatggttttgatgaagaaagtcaaagatactattggaggccaaagaatgaaatttctgggacactggaagatgattttcttaaggctaaatcctggaataaaaagttctatgattatgaagcaaacatgccagacagatggggtcacagtggttataaagagttataccctgaagaatttgaaacagacagtagtgatcagcaagatattaccaacgggaagaaaacatctccccaggtaaagtcatctacccatgaatcccgcaaacacaagaagtcaaagaaatcccacaaaaaaaagcagaaaaaaaggtcacacaaaaaacagaagaaaagcaaaaaggaagccacagatataacagcagattcctcgagtgagttctcagaagaaactggggcttctggtacaaggaaagggaaacaaccacataaacgcaagaaaaaatccaggaaaaagtctctcaaaaaacctgctttattcttagaggcagaaagtaacacttcacattcagatgattcagcatccagcagttctgaggaaagtgaggaaagagacactaagaaaaccaaaaggaaaaagagagagaaaaaagcccatacctctgtagccaacaatgaaatacaggagaggacaaacaaacgcacaaattggaaagtagctacagatgaaaggtctgctgagagctcagaggatgactaaatgggaaacacttttgttttccacatgactgtggatatttacagttcttactccttgtggttttgccagtgactcttgttcagcacggggcctgaggtcagagctgtcttgtgccatctgtatgttctgacagacgtcttgtcttctattttggcgttaagcttgatccccttttcttgttaaaagggaatctggtattttgttatgaaggtttcttgaagagattatttttttttgcaattaattacgtttagtgtagagtgcatatacagcaaattaaaggacccagaaagctggatccaatagtgacctgggtacaccaatcggaatattgaatttggggaagtcaagggctgggatcaagaggtggattggaactaatgccatgtaggatggtatgacaaggcaacactgtattgctctctgtttatatagcaggtgtcacaactaacttgtctttagccttggtgctttgatccttctatattttgaccccacaggtgtggtccggtttacttaatcaggacatgggcctaagaacaaaccttttcccttcatgataacatccatagacaacttattagaagggactagagtttttgcaaatttccctgctggatggggcctatagctatacttagtatatgcctaaacatggtaattggatagtaaatggttttctagttccattgctgtatatttgcctaaatggacttgtgttcaaattatttcttcaattgtcatagataatcctgtaccaaatggggaagaattaggaaataatcatgttgtctaatggtactctggattcagggcagcaactgccatttaaatgttgtcttgttcatttctaaatctgttcatgaagtttaggttttccctgaaactaagttgaattatttccaaaatgaaacaggcttctcagggacatatccacttcttcccagtctgcctttggattaaagcaccaagcagagaccacattaattccctttgctatactgtgatccttagtatgttaattcttaagaaaccaacatatcactgaaagaaggctggcagaacgcaagtgcattttttcactgtgggaagaaagatcaagtgacgtattattttttcctggttgtcacttaatgggctgagtaaaaagcttgaaaactcagactttcggtcttggttctgccactcattggttatgaggaggcccagagcaggtaagttcaccttcctggccttactttcctgatgtgtaatacggaattacttcacagtagcatgacagtataagacaccagcagtagatacaactatgatgacattccatgagttggtatttttagttctaactgctaaatttgttctctttacgggacagatttctaataaagtgcttggtcttaaaatacatggttggacagaggtgccctatcccttaactatgagcaggtgctaccttttgggatatttattttaaattttaatactttggtactcaattgtcagtgttccatggtgtgtatttttatttttgggattagtgggggtctaaagggagaagaatagtctctaattactacctcttaacctaaagcaattattttgttcctggagcaagttaaatctttgttggaaggagctttggccatatattttttagcatgcattgtttctgtgccctgaaagtacctgaaaggttttaagcacagactcaggaaaatgtgccagtagaacaggccatctccaggaaattggctctatttgggtcctgaccttcccttcctcccaagttagcaggcttgttcttttgcaaggaatacacatcttgccttttttttttttttttttttgccatgttttccttttcttggtcatgtataagcaataaagctgttttttgttcttcatctttcttaaccccaaattttcttctatgccttaggcttcgatggttcttccaacccccttaatatggcttagggtggtttttcaaaacctacaatcccccatttgcactactggccatggaacatttatttctagtgttcctgccaatcagagatctctatattaaattctaaaatgggattaaaagaagagttggagaattcacacttattgagtaactgatgtcatacaacctggaatttctgaattccaaataaataaatttcactctttgaaaaaaacatct

SEQ ID NO: 279087 - DNA, 3746 bp, Homo sapiens
ttctcccaaaccacttcttcccccctaccccccgccacgcgaggctgcggcgcacggtatgggtgtgtttgtgtgtatttgtgtggggagggcgtttggagggaaggttaccgggagctccgaggccgctggggaacagggatcccggtgacaaagatggggatatttcctctgtcttccacttggaaacctcaacccccgcttcaggctccctagatactttctggggcccaaccgaaggccgtagccatccaaagcgttcccagcctttctggggagtgaaacttacccccggggttcgtcctagaggagcgtgagcggggaatgcccaggtcaaccgggctgtccgaattccgccccggctcagcctccggcctcagtccgggagagagatctgcctgtcggtctgggctgggggaaacgcggcagtggcctgggccacaggtgagggcagagtaaccagtgggaaggctgcgttttcacgaaggactcgggtgaagctgcagagctgcctttgagccctgactccttggcttcctgggtcggaggagatcttgtaatggagtggttcttcgtctcactagcaagatgcctgatttcctcaggatcaagggattgaagaatgtcccggattccactggggaaggtcctcctgaggaatgtcatccggcacacagatgctcacaataagattcaggaggaatcagatatgtggaaaataagagaactggaaaaacagatggaagatgcttaccgggggaccaaaaggaaaatgctacccagcagttcaagccggatgcgcagtgatggttttgatgaagaaagtcaaagatactattggaggccaaagaatgaaatttctgggacactggaagatgattttcttaaggctaaatcctggaataaaaagttctatgattatgaagcaaacatgccagacagatggggtcacagtggttataaagagttataccctgaagaatttgaaacagacagtagtgatcagcaagatattaccaacgggaagaaaacatctccccaggtaaagtcatctacccatgaatcccgcaaacacaagaagtcaaagaaatcccacaaaaaaaagcagaaaaaaaggtcacacaaaaaacagaagaaaagcaaaaaggaagccacagatataacagcagattcctcgagtgagttctcagaagaaactggggcttctggtacaaggaaagggaaacaaccacataaacgcaagaaaaaatccaggaaaaagtctctcaaaaaacctgctttattcttagaggcagaaagtaacacttcacattcagatgattcagcatccagcagttctgaggaaagtgaggaaagagacactaagaaaaccaaaaggaaaaagagagagaaaaaagcccatacctctgtagccaacaatgaaatacaggagaggacaaacaaacgcacaaattggaaagtagctacagatgaaaggtctgctgagagctcagaggatgactaaatgggaaacacttttgttttccacatgactgtggatatttacagttcttactccttgtggttttgccagtgactcttgttcagcacggggcctgaggtcagagctgtcttgtgccatctgtatgttctgacagacgtcttgtcttctattttggcgttaagcttgatccccttttcttgttaaaagggaatctggtattttgttatgaaggtttcttgaagagattatttttttttgcaattaattacgtttagtgtagagtgcatatacagcaaattaaaggacccagaaagctggatccaatagtgacctgggtacaccaatcggaatattgaatttggggaagtcaagggctgggatcaagaggtggattggaactaatgccatgtaggatggtatgacaaggcaacactgtattgctctctgtttatatagcaggtgtcacaactaacttgtctttagccttggtgctttgatccttctatattttgaccccacaggtgtggtccggtttacttaatcaggacatgggcctaagaacaaaccttttcccttcatgataacatccatagacaacttattagaagggactagagtttttgcaaatttccctgctggatggggcctatagctatacttagtatatgcctaaacatggtaattggatagtaaatggttttctagttccattgctgtatatttgcctaaatggacttgtgttcaaattatttcttcaattgtcatagataatcctgtaccaaatggggaagaattaggaaataatcatgttgtctaatggtactctggattcagggcagcaactgccatttaaatgttgtcttgttcatttctaaatctgttcatgaagtttaggttttccctgaaactaagttgaattatttccaaaatgaaacaggcttctcagggacatatccacttcttcccagtctgcctttggattaaagcaccaagcagagaccacattaattccctttgctatactgtgatccttagtatgttaattcttaagaaaccaacatatcactgaaagaaggctggcagaacgcaagtgcattttttcactgtgggaagaaagatcaagtgacgtattattttttcctggttgtcacttaatgggctgagtaaaaagcttgaaaactcagactttcggtcttggttctgccactcattggttatgaggaggcccagagcaggtaagttcaccttcctggccttactttcctgatgtgtaatacggaattacttcacagtagcatgacagtataagacaccagcagtagatacaactatgatgacattccatgagttggtatttttagttctaactgctaaatttgttctctttacgggacagatttctaataaagtgcttggtcttaaaatacatggttggacagaggtgccctatcccttaactatgagcaggtgctaccttttgggatatttattttaaattttaatactttggtactcaattgtcagtgttccatggtgtgtatttttatttttgggattagtgggggtctaaagggagaagaatagtctctaattactacctcttaacctaaagcaattattttgttcctggagcaagttaaatctttgttggaaggagctttggccatatattttttagcatgcattgtttctgtgccctgaaagtacctgaaaggttttaagcacagactcaggaaaatgtgccagtagaacaggccatctccaggaaattggctctatttgggtcctgaccttcccttcctcccaagttagcaggcttgttcttttgcaaggaatacacatcttgccttttttttttttttttttttgccatgttttccttttcttggtcatgtataagcaataaagctgttttttgttcttcatctttcttaaccccaaattttcttctatgccttaggcttcgatggttcttccaacccccttaatatggcttagggtggtttttcaaaacctacaatcccccatttgcactactggccatggaacatttatttctagtgttcctgccaatcagagatctctatattaaattctaaaatgggattaaaagaagagttggagaattcacacttattgagtaactgatgtcatactaagggggttggaagaaccatcgaagcctaaggcatagaagaaaatttggggttaagaaagatgaagaacaaaaaacagctttattgcttatacatgaccaagaaaa

SEQ ID NO: 279088 - DNA, 1405 bp, Homo sapiens
ttctcccaaaccacttcttcccccctaccccccgccacgcgaggctgcggcgcacggtatgggtgtgtttgtgtgtatttgtgtggggagggcgtttggagggaaggttaccgggagctccgaggccgctggggaacagggatcccggtgacaaagatggggatatttcctctgtcttccacttggaaacctcaacccccgcttcaggctccctagatactttctggggcccaaccgaaggccgtagccatccaaagcgttcccagcctttctggggagtgaaacttacccccggggttcgtcctagaggagcgtgagcggggaatgcccaggtcaaccgggctgtccgaattccgccccggctcagcctccggcctcagtccgggagagagatctgcctgtcggtctgggctgggggaaacgcggcagtggcctgggccacaggtgagggcagagtaaccagtgggaaggctgcgttttcacgaaggactcgggtgaagctgcagagctgcctttgagccctgactccttggcttcctgggtcggaggagatcttgtaatggagtggttcttcgtctcactagcaagatgcctgatttcctcaggatcaagggattgaagaatgtcccggattccactggggaaggtcctcctgaggaatgtcatccggcacacagatgctcacaataagattcaggaggaatcagatatgtggaaaataagagaactggaaaaacagatggaagatgcttaccgggggaccaaaaggaaaatgctacccagcagttcaagccggatgcgcagtgatggttttgatgaagaaagtcaaagatactattggaggccaaagaatgaaatttctgggacactggaagatgattttcttaaggctaaatcctggaataaaaagttctatgattatgaagcaaacatgccagacagatggggtcacagtggttataaagagttataccctgaagaatttgaaacagacagtagtgatcagcaagatattaccaacgggaagaaaacatctccccaggtaaagtcatctacccatgaatcccgcaaacacaagaagtcaaagaaatcccacaaaaaaaagcagaaaaaaaggtcacacaaaaaacagaagaaaagcaaaaaggaagccacagatataacagcagattcctcgagtgagttctcagaagaaactggggcttctggtacaaggaaagggaaacaaccacataaacgcaagaacagaatgaagaaagtcagggggactgcaaaggccaatgttggtgctggcaaaaagtgagctggagattggatcccagccgaaggagtaaaggtgctgcaatgatgttagctgtggcccctgtggatttttcgcaagaacattaataaactaaaaacttca

SEQ ID NO: 279089 - DNA, 785 bp, Homo sapiens
  misc_feature (579)..(579): n is a, c, g, or t
aatcaattcatgttaactataatcaccctattgatctattgaagaacaccaggttttatttcttctatctaactgtatatctgaatgcttcgtcaatctctctttatccctcctctctcaatgtgcagtttcttctagaaccccccacaccaagcttcccttttagcgtcggagaaagctcaagtgaaaaagtgaagcaaagcagttggcaaagagggagacagatgccaccccgaaaggtgccccattaggtgccactctgccatcctgccctctgtcccctcagtcaatgcctggaatggggagatgaggctaaaatttgagagtttgttttaacacaacatcaaagcaatatgagtggaaatctcccttcaaaacatcaggaggaaaatcattgtgtgataggtggatatgaccaaccagcttgaaagttgagatcctaccacatgccaggatgttgtgtcatattttagagggtggaatggaggacaaccagtatctacagctatctaatgtgccatgacacagaaggactttgaaatgtaactgattcatggcgggaaatacctccaatacacntctcgacacttatccccacgaaacgctctcacaggaacacggctggggacgcggcacacatgccactactctggtctcacacgtccgatggacgctcgcgacaagcctaacctggcttcgccttgacagggtcccacgaaatccccaactcgattcgacctgtgcttcacttgttaagcaagtgttgaaactttcgctgtgacctg

SEQ ID NO: 279090 - DNA, 325 bp, Homo sapiens
ctctgcagacgcttggagctgggtcagtccgccgctcaccccgcggcgcaccttcccgccttctagtgacaaccacgaacttgagtgtgtggtccttgcccaggatctcctcgttgcataaaatgtccagctgggggataaggaggtttgattagcagcggagaggtgctcaacccacactgacatggccaccttgatgctggccccatcacaccctgtctaccacacctgccgtactgagcaacgggaagaggtggtttgcagccccatgagcagccctgacagctccggaatcgggcaccctggttccccaggtggcacaggt

SEQ ID NO: 279091 - DNA, 628 bp, Homo sapiens
tttcactcttgttgcccaggctggagtgtaatggcactagacctcggctcactgcaatctccacctcccaggttcaagcgattctcctgcctcagactcctgagtagctgggattacaggcatgcaccaccatgcccggctaattttgtatttttagtagaaacagggtttctccatgttggtcaggctgatctcaaactcccaacctcaggtgatccgcccgcctcggcctcccaaagtgttgggattataggtatgcgccaccatgctaggctaatttttgtattttttgtaaagacaggattttgccatgttacccaggctggtttcaaactcctgggctcaagtgatccacctgcctcggcctcgcaaactgctgggattacaagtgttggcaactgcacccggctccatcttggttattcatagagtttcttgcccatgagctttctcatgttgaataaggaaagtatcataactggaagcttttccacatttgttaacattcacagggcttctctccagtatgaattctctgctgcctagtaagttgacaccgttggctaaaggctttctcgcaatggtcacattcatagggtttgcctccagtgtgtgtcctctcgtgttt

SEQ ID NO: 279092 - DNA, 938 bp, Homo sapiens
cgcgctgcattctgggagttgcagttcccgctgtggccccccgcccccttataaacagccagtctacaagaggcgctagttgcaaagcttccggttctgggggaaggcgtggcttccgcgctctttgaaatgtccggcgccggaatgtctgggtgctttggttggagagggtcccatttccagtcattcttcagcctggtgattcccgcgctcccctgaggagcatatgaagtacgtcggttctgccaggttggaacgcgctgctggacactcggccgtaaggcggatcccggatcccctcccactccgacccttccctccagaagggccggttcccaaacggcccctttagacacatccaagcggttgccgacggccctcacgatgaaaactgctgtccgttggtgaaggcagcctcttctgtgctcctcgccgctgacttcctgaggcggacctacctgtggaggcataccaggaaccagacgatgaccccctccaaaagttgggtctttgaggagagctactaacttgggttcctggtacaccctctacatgcagtggtgaagcttatctaacagtcattcatagaatcagtttgggaaggggaattttcactgaactctcatagagaaactgtgttttagataacagaaagttctgcacggttaaaatggaacagaaatttttttgcacagaaattaggattaccgaaaatactgaagaaagactacctctgattggactcttctcaaggaattaataattcaagaactaaggaaagaaaaaagtgattatatgaaaatactgaagttgatcgtagcagctgaaggctgatcctgtgtgggtaaatgtaaacgctgaattcccacattccaatgtgcgacctgggattaaggcagcaattgagcagggtaatgttactgaggagagcgaacaga

SEQ ID NO: 279093 - DNA, 546 bp, Homo sapiens
cgcgctgcattctgggagttgcagttcccgctgtggccccccgcccccttataaacagccagtctacaagaggcgctagttgcaaagcttccggttctgggggaaggcgtggcttccgcgctctttgaaatgtccggcgccggaatgtctgggtgctttggttggagagggtcccatttccagtcattcttcagcctggtgattcccgcgctcccctgaggagcatatgaagtacgtcggttctgccaggttggaacgcgctgctggacactcggccgtaaggcggatcccggatcccctcccactccgacccttccctccagaagggccggttcccaaacggcccctttagacacatccaagcggttgccgacggccctcacgatgaaaactgctgtccgttggtgaaggcagcctcttctgtgctcctcgccgctgacttcctgaggcaggaggatcctttgagtccagcagtttgaggccagcctggacaccacagcaagaccaccaataaataaataaataaatggaacatgtttccctgtc

SEQ ID NO: 279094 - DNA, 1412 bp, Homo sapiens
cgcgctgcattctgggagttgcagttcccgctgtggccccccgcccccttataaacagccagtctacaagaggcgctagttgcaaagcttccggttctgggggaaggcgtggcttccgcgctctttgaaatgtccggcgccggaatgtctgggtgctttggttggagagggtcccatttccagtcattcttcagcctggtgattcccgcgctcccctgaggagcatatgaagtacgtcggttctgccaggttggaacgcgctgctggacactcggccgtaaggcggatcccggatcccctcccactccgacccttccctccagaagggccggttcccaaacggcccctttagacacatccaagcggttgccgacggccctcacgatgaaaactgctgtccgttggtgaaggcagcctcttctgtgctcctcgccgctgacttcctgaggcggacctacctgtggaggcataccaggaaccagacgatgaccccctccaaaagttgggtctttgaggagagctactaacttgggttcctggtacaccctctacatgcagtggtgaagcttatctaacagtcattcatagaatcagtttgggaaggggaattttcactgaactctcatagagaaactgtgttttagataacagaaagttctgcacggttaaaatggaacagaaatttttttgcacagaaattaggattaccgaaaatactgaagaaagactacctctgattggactcttctcaaggaattaataattcaagaactaaggaaagaaaaaagtgattatatgaaaatactgaagttgatcgtagcagctgaaggctgatcctgtgtgggctgaagtacattggtgcaatcttggctcactgcatctccaccccaggttcaagcgattctcctgcctcagcctcccaagcagctgggattacagaatgtcacataaatggaatcatactgtgtccggaattggtgggttcttggtctcactgacttcaagaatgacgccatggaccctcgcggtgagtgttacagctcttaaggtgggcgcgtctgggagtttgttccttctgatgttcggatgtgttcggagtttcttccttctggtgggttcgtggtctcgctggctcaggagtgaagctgcagactttcgcgatttcatctctctctctgctatggacacagatggcttcactccatcctgtattcttcggaccatgataaaattccagactctcggtagtttttgcgttccaagaagtagagcctagagtggtggcctataattacagttactcaggaggctgaggcaggaggatcctttgagtccagcagtttgaggccagcctggacaccacagcaagaccaccaataaataaataaataaatggaacatgtttccctgtc

SEQ ID NO: 279095 - DNA, 1585 bp, Homo sapiens
cgcgctgcattctgggagttgcagttcccgctgtggccccccgcccccttataaacagccagtctacaagaggcgctagttgcaaagcttccggttctgggggaaggcgtggcttccgcgctctttgaaatgtccggcgccggaatgtctgggtgctttggttggagagggtcccatttccagtcattcttcagcctggtgattcccgcgctcccctgaggagcatatgaagtacgtcggttctgccaggttggaacgcgctgctggacactcggccgtaaggcggatcccggatcccctcccactccgacccttccctccagaagggccggttcccaaacggcccctttagacacatccaagcggttgccgacggccctcacgatgaaaactgctgtccgttggtgaaggcagcctcttctgtgctcctcgccgctgacttcctgaggcggacctacctgtggaggcataccaggaaccagacgatgaccccctccaaaagttgggtctttgaggagagctactaacttgggttcctggtacaccctctacatgcagtggtgaagcttatctaacagtcattcatagaatcagtttgggaaggggaattttcactgaactctcatagagaaactgtgttttagataacagaaagttctgcacggttaaaatggaacagaaatttttttgcacagaaattaggattaccgaaaatactgaagaaagactacctctgattggactcttctcaaggaattaataattcaagaactaaggaaagaaaaaagtgattatatgaaaatactgaagttgatcgtagcagctgaaggctgatcctgtgtgggctgaagtacattggtgcaatcttggctcactgcatctccaccccaggttcaagcgattctcctgcctcagcctcccaagcagctgggattacagaatgtcacataaatggaatcatactgtgtccggaattggtgggttcttggtctcactgacttcaagaatgacgccatggaccctcgcggtgagtgttacagctcttaaggtgggcgcgtctgggagtttgttccttctgatgttcggatgtgttcggagtttcttccttctggtgggttcgtggtctcgctggctcaggagtgaagctgcagactttcgcgatacatcagacagatggtatacatctcttcgtgactcaatctgctgaacgatgcaactgtcacagtattcaacagggtcttactctgtcacctggcctggagtacagtggcacaatcacgcttcgctgcggcctcaacctccctggctcgggcgatcttcctgcctcaggcttccaagtagttgggacagatggtcttactctgttgcccaggctgaggtgcagtggcacgatcttggctcactataacctttgcctcccggattcaagcaattctcctgcctcggcctcccaagtagctgggactacaggccgactaatattccgctgcatcttgctgggcacagtggctcatgcctgaaatccaagcacttcgggagcttgaggtgggtgaatcacttgaggtcaggagtttgagaccagcct

SEQ ID NO: 279096 - DNA, 396 bp, Homo sapiens
gccagcccagaaaggggctcccacagtgcagtggtgggctgaagggctcctcaagtgccgccaaactgggagcccaggcagaggaggtgccgagagcaagcgagggctctgaggactgccagcacgctgtcacctctcaatacaatttcatctctctctctgctatggacacagatggcttcactccatcctgtattcttcggaccatgataaaattccagactctcggtagtttttgcgttccaagaagtagagcctagagtggtggcctataattacagttactcaggaggctgaggcaggaggatcctttgagtccagcagtttgaggccagcctggacaccacagcaagaccaccaataaataaataaataaatggaacatgtttccctgtc

SEQ ID NO: 279097 - DNA, 983 bp, Homo sapiens
ctttagggacagatgacccagcacccctgccttgcacagcctccaccagcctggctgtcctcactgtatcacggtcatcccatcaggagatggggtttcatcatgttggccaggctggtctcgaactcctgaactcaagtgatccacccaccttggcctcccaaagtactgggattacaggcgtgagccaccgcgcctggcgagaaggtgaatttgagctgggtcttggagaatgggggctggaggctccacttccctggagggccagatcccaggaggaactgtggggtggaaaaaacggaggggggggaacagccccagatccacctgccccccaggtctccagccaccggcaccaggtgcaccaggctgtcctcgcaagactggaagtctgtgtccgtgagggcgtcgggtggcatcagcaactcctcatcttgggatgaggatgatgggggctcatcccctgagctcccaggagccccatccccatccccgtccacctctgagtcctgcagcacctgagcgatgtatttctgaaggaggagaggaaatgggggcaaggtgctacagactggccccagcctctcccaggccccttgcctgccacccccagccatgcggcttctcctgtggcctgctctggctggaatccactctgctcgccaccccccgttccctgggtagggatccctcacccgtgcgcatggtggaaaagaagagcagccagaagaggcagaggatgggcgcggccaccacctggttcacagcccccgagtggatcttcttgtccagcttggccggcaggttgttctggtcctgagagtgctgaagggttggccccctcctcctgcccgggccccaggacgggatagtgccccgtgccccagcgtgatcacagaacttcagcttcctccgctacaacccctcattctactctcctcatcaggaattctactattggaaatctagtcatttgaatcaac

SEQ ID NO: 279098 - DNA, 1910 bp, Homo sapiens
aacagctgctgctggctcttcctcttgcggccttttcctgaaacggattcttctttcggggaacagaaagcgccagccatgcagccttggcacggaaaggccatgcagagagcttccgaggccggagccactgcccccaaggcttccgcacggaatgccaggggcgccccgatggatcccaacgagtctccggctgcccccgaggccgccctgcctaaggcgggaaagttcggccccgccaggaagtcgggatcccggcagaaaaagagcgccccggacacccaggagaggccgcccgtccgcgcaactggggcccgcgccaaaaaggcccctcagcgcgcccaggacacgcagccgtctgacgccaccagcgcccctggggcagaggggctggagcctcctgcggctcgggagccggctctttccagggctggttcttgccgccagaggggcgcgcgctgctccacgaagccaagacccccgcccgggccctgggacgtgcccagccccggcctgccggtctcggcccccattctcgtacggagggatgcggcgcctggggcctcgaagctccgggcggttttggagaagttgaagctcagccgcgatgatatctccacggcggcggggatggtgaaaggggttgtggaccacctgctgctcagactgaagtgcgactccgcgttcagaggcgtcgggctgctgaacaccgggagctactatgagcacgtgaagatttctgcacctaatgaatttgatgtcatgtttaaactggaagtccccagaattcaactagaagaatattccaacactcgtgcatattactttgtgaaatttaaaagaaatccgaaagaaaatcctctgagtcagtttttagaaggtgaaatattatcagcttctaagatgctgtcaaagtttaggaaaatcattaaggaagaaattaacgacattaaagatacagatgtcatcatgaagaggaaaagaggagggagccctgctgtaacacttcttattagtgaaaaaatatctgtggatataaccctggctttggaatcaaaaagtagctggcctgctagcacccaagaaggcctgcgcattcaaaactggctttcagcaaaagttaggaagcaactacgactaaagccattttaccttgtacccaagcatgcaaaggaaggaaatggtttccaagaagaaacatggcggctatccttctctcacatcgaaaaggaaattttgaacaatcatggaaaatctaaaacgtgctgtgaaaacaaagaagagaaatgttgcaggaaagattgtttaaaactaatgaaataccttttagaacagctgaaagaaaggtttaaagacaaaaaacatctggataaattctcttcttatcatgtgaaaactgccttctttcacagactctactgatatatttccaagtattaggtcacttgataagtgatccgcactgaagcaaaagataaactcagcattcttaggtgcttattctaatgccaccagttttacttctgttagcaaaaatctaaagtaacataacagacttatcacccccatttggaattagtatacaaatagaaatgatcctaatcaatttaattaattataatggacacacaagaaaaaatacctacacagcttttcgagaaacgaagacaatgactttgtctgtggatgacatactctgtagaaaagtttgcatgtgactccatttctcttcctcggtggttacaattatattttgcttcactgaacttacagcctaaaggattcaaagaacatagttcatcaaggtcatcatgattgagggtgagaccgcatacatcagctcaaaatgcatcttctctctcattggttaatgtttttaataaactgctaagcaaaatggcagacgtcct

SEQ ID NO: 279099 - DNA, 2404 bp, Homo sapiens
aacagctgctgctggctcttcctcttgcggccttttcctgaaacggattcttctttcggggaacagaaagcgccagccatgcagccttggcacggaaaggccatgcagagagcttccgaggccggagccactgcccccaaggcttccgcacggaatgccaggggcgccccgatggatcccaacgagtctccggctgcccccgaggccgccctgcctaaggcgggaaagttcggccccgccaggaagtcgggatcccggcagaaaaagagcgccccggacacccaggagaggccgcccgtccgcgcaactggggcccgcgccaaaaaggcccctcagcgcgcccaggacacgcagccgtctgacgccaccagcgcccctggggcagaggggctggagcctcctgcggctcgggagccggctctttccagggctggttcttgccgccagaggggcgcgcgctgctccacgaagccaagacccccgcccgggccctgggacgtgcccagccccggcctgccggtctcggcccccattctcgtacggagggatgcggcgcctggggcctcgaagctccgggcggttttggagaagttgaagctcagccgcgatgatatctccacggcggcggggatggtgaaaggggttgtggaccacctgctgctcagactgaagtgcgactccgcgttcagaggcgtcgggctgctgaacaccgggagctactatgagcacgtgaagatttctgcacctaatgaatttgatgtcatgtttaaactggaagtccccagaattcaactagaagaatattccaacactcgtgcatattactttgtgaaatttaaaagaaatccgaaagaaaatcctctgagtcagtttttagaaggtgaaatattatcagcttctaagatgctgtcaaagtttaggaaaatcattaaggaagaaattaacgacattaaagatacagatgtcatcatgaagaggaaaagaggagggagccctgctgtaacacttcttattagtgaaaaaatatctgtggatataaccctggctttggaatcaaaaagtagctggcctgctagcacccaagaaggcctgcgcattcaaaactggctttcagcaaaagttaggaagcaactacgactaaagccattttaccttgtacccaagcatgcaaaggaaggaaatggtttccaagaagaaacatggcggctatccttctctcacatcgaaaaggaaattttgaacaatcatggaaaatctaaaacgtgctgtgaaaacaaagaagagaaatgttgcaggaaagattgtttaaaactaatgaaataccttttagaacagctgaaagaaaggtttaaagacaaaaaacatctggataaattctcttcttatcatgtgaaaactgccttctttcacgtatgtacccagaaccctcaagacagtcagtgggaccgcaaagacctgggcctctgctttgataactgcgtgacatactttcttcagtgcctcaggacagaaaaacttgagaattattttattcctgaattcaatctattctctagcaacttaattgacaaaagaagtaaggaatttctgacaaagcaaattgaatatgaaagaaacaatgagtttccagtttttgatgaattttgagattgtatttttagaaagatctaagaactagagtcaccctaaatcctggagaatacaagaaaaatttgaaaaggggccagacgctgtggctcacacctgtagatcccagctctttggaggccgaggcaggcggatcacttgaggtcaggagtttgagaccagcctgaccaacatggtgaaactccatctctgctaaaaatataaaaattagccgggcatggtgatgcatgcctgtaatcccagctactcgggaggcttagacatgagaatcacttgaacccaggaggtggaggttgcagtgagtcaagatggcaccactgcactccatcctgggtgacagagcaagacttcctctcaaaaaataaataaataaataagaaaaataaattaggaaattattaaaataattttttagaaaagcaacaaaataacaaaaattagtgactgtaataattggaatgtttgaaatttgtcacagcaataattgactaaaatgaatgtaaataattattcagttttcagtttgttgtaataaactctaatcagtataaaggattgactatcctaggaaaaagattagtcaaggaataagaagcaaaagtagtatttgaaatctaaaaacattaccatgtttgctttatcatgcaggcaaataaataaataaatgacatttttaggttggaataaaaaaagataaagtacatattgccttaattaaattcatcaagttcttactgaaaaacagctctccgccgtg

SEQ ID NO: 279100 - DNA, 1584 bp, Homo sapiens
aacagctgctgctggctcttcctcttgcggccttttcctgaaacggattcttctttcggggaacagaaagcgccagccatgcagccttggcacggaaaggccatgcagagagcttccgaggccggagccactgcccccaaggcttccgcacggaatgccaggggcgccccgatggatcccaacgagtctccggctgcccccgaggccgccctgcctaaggcgggaaagttcggccccgccaggaagtcgggatcccggcagaaaaagagcgccccggacacccaggagaggccgcccgtccgcgcaactggggcccgcgccaaaaaggcccctcagcgcgcccaggacacgcagccgtctgacgccaccagcgcccctggggcagaggggctggagcctcctgcggctcgggagccggctctttccagggctggttcttgccgccagaggggcgcgcgctgctccacgaagccaagacccccgcccgggccctgggacgtgcccagccccggcctgccggtctcggcccccattctcgtacggagggatgcggcgcctggggcctcgaagctccgggcggttttggagaagttgaagctcagccgcgatgatatctccacggcggcggggatggtgaaaggggttgtggaccacctgctgctcagactgaagtgcgactccgcgttcagaggcgtcgggctgctgaacaccgggagctactatgagcacgtgaagatttctgcacctaatgaatttgatgtcatgtttaaactggaagtccccagaattcaactagaagaatattccaacactcgtgcatattactttgtgaaatttaaaagaaatccgaaagaaaatcctctgagtcagtttttagaaggtgaaatattatcagcttctaagatgctgtcaaagtttaggaaaatcattaaggaagaaattaacgacattaaagatacagatgtcatcatgaagaggaaaagaggagggagccctgctgtaacacttcttattagtgaaaaaatatctgtggatataaccctggctttggaatcaaaaagtagctggcctgctagcacccaagaaggcctgcgcattcaaaactggctttcagcaaaagttaggaagcaactacgactaaagccattttaccttgtacccaagcatgcaaaggaaggaaatggtttccaaggtattttaaatattaaagttaacttaaagaagtaaaagagttgttaatgttatatgttcaggcagtaaaagatcaacagccaaccaatgctgttgtcatttcaagagccatcaggcaaaataggttataagatgggagtctggtgacagacagaattgaaaagggcaaagttgtagtattaatatcaaatactcagctttaaaatgtctagcaatccatatttgaattttattttatttttttcggtaaagaaaagcagtattggccttggagtcagactgccctggttctgaatcctgaggctccttctactagttgtgtgaattcgagctagttatgatgctttctaaacccatttgctcatccgtacactgtgttaaccaaaagtactt

SEQ ID NO: 279101 - DNA, 797 bp, Homo sapiens
agctttggaacctaagaaaccaaggaaggcttaagatgcagaaccttgcttctctctgaggactgccttttaggaggccatttggaaagtaattttgaaacactgctcctttgccagtatctgaaaggtgctggatggtgtcagctggaagatgaggggcaacctgaggtagctgaaaaaactttggattaggtgtcaaaagggtgccaggtctcatctccaggcctttcctctaggccaggcagtgtggaaggaagcatttgctgggacgcggtatgaccaggacccagaagggaaagacctttctcccccattgcttctatcagtcactgcccccacgactgggatggggcatgattttaaactactcaaaattgaaaggcaaggaggagtgtgcctctgtctccagtgtgcctatggtcttcttcagctcacagtaccgtctacaccgcaagagccaatatttgaaaatggctgctgcaaaccttaccttctctcaggaggtggtgtggcagcgaggcctgcccagcattccttatagccagtacagctttgaccacctctacaataccaatgacatcatccatactccccagatcaggaaggcccggcctcagaaacctgttagcttcaagttcctgggttcctcaagtcccttaacaggagacacctccctggctgtgaagacagaaagctctgccaatcccgaaaagaagctgaagaaatcaaagccagccagcaccgtccgggaagcaccccgccctctcatccatcatccctgcatgcatccagatatg

SEQ ID NO: 279102 - DNA, 3247 bp, Homo sapiens
ggcgtctccgccattttgtgagtctataactcggagccgttgggtcggttcctgctattccggcgcctccactccgtcccccgcgggtctgctctgtgtgccatggacggcattgtcccagatatagccgttggtacaaagcggggatctgacgagcttttctctacttgtgtcactaacggaccgtttatcatgagcagcaactcggcttctgcagcaaacggaaatgacagcaagaagttcaaaggtgacagccgaagtgcaggcgtcccctctagagtgatccacatccggaagctccccatcgacgtcacggagggggaagtcatctccctggggctgccctttgggaaggtcaccaacctcctgatgctgaaggggaaaaaccaggccttcatcgagatgaacacggaggaggctgccaacaccatggtgaactactacacctcggtgacccctgtgctgcgcggccagcccatctacatccagttctccaaccacaaggagctgaagaccgacagctctcccaaccaggcgcgggcccaggcggccctgcaggcggtgaactcggtccagtcggggaacctggccttggctgcctcggcggcggccgtggacgcagggatggcgatggccgggcagagccccgtgctcaggatcatcgtggagaacctcttctaccctgtgaccctggatgtgctgcaccagattttctccaagttcggcacagtgttgaagatcatcaccttcaccaagaacaaccagttccaggccctgctgcagtatgcggaccccgtgagcgcccagcacgccaagctgtcgctggacgggcagaacatctacaacgcctgctgcacgctgcgcatcgacttttccaagctcaccagcctcaacgtcaagtacaacaatgacaagagccgtgactacacacgcccagacctgccttccggggacagccagccctcgctggaccagaccatggccgcggccttcgcctctccgtatgcaggagctggtttccctcccacctttgccattcctcaagctgcaggcaggcctttccgttccgaacgtccacggcgccctggcccccctggccatcccctcggcggcggcggcagctgcggcggcaggtcggatcgccatcccgggcctggcgggggcaggaaattctgtattgctggtcagcaacctcaacccagagagagtcacaccccaaagcctctttattcttttcggcgtctacggtgacgtgcagcgcgtgaagatcctgttcaataagaaggagaacgccctagtgcagatggcggacggcaaccaggcccagctggccatgagccacctgaacgggcacaagctgcacgggaagcccatccgcatcacgctctcgaagcaccagaacgtgcagctgccccgcgagggccaggaggaccagggcctgaccaaggactacggcaactcacccctgcaccgcttcaagaagccgggctccaagaacttccagaacatattcccgccctcggccacgctgcacctctccaacatcccgccctcagtctccgaggaggatctcaaggtcctgttttccagcaatgggggcgtcgtcaaaggattcaagttcttccagaaggaccgcaagatggcactgatccagatgggctccgtggaggaggcggtccaggccctcattgacctgcacaaccacgacctcggggagaaccaccacctgcgggtctccttctccaagtccaccatctaggggcacaggcccccacggccgggccccctggcgacaacttccatcattccagagaaaagccactttaaaaacagctgaagtgaccttagcagaccagagattttatttttttaaagagaaatcagtttacctgtttttaaaaaaattaaatctagttcaccttgctcaccctgcggtgacagggacagctcaggctcttggtgactgtggcagcgggagttcccggccctccacacccggggccagaccctcggggccatgccttggtggggcctgtgtcgggcgtggggcctgcaggtgggcgccccgaccacgacttggcttccttgtgccttaaaaaacctgccttcctgcagccacacacccacccggggtgtcctggggacccaaggggtgggggggtcacaccagagagaggcagggggcctggccggctcctgcaggatcatgcagctggggcgcggcggccgcggctgcgacaccccaaccccagccctctaatcaagtcacgtgattctcccttcaccccgcccccagggccttcccttctgcccccaggcgggctccccgctgctccagctgcggagctggtcgacataatctctgtattatatactttgcagttgcagacgtctgtgcctagcaatatttccagttgaccaaatattctaatcttttttcatttatatgcaaaagaaatagttttaagtaactttttatagcaagatgatacaatggtatgagtgtaatctaaacttccttgtggtattaccttgtatgctgttacttttattttattccttgtaattaagtcacaggcaggacccagtttccagagagcaggcggggccgcccagtgggtcaggcacagggagccccggtcctatcttagagcccctgagcttcagggaaggggcgggcgtgtcgccgcctctggcatcgcctccggttgccttacaccacgccttcacctgcagtcgcctagaaaacttgctctcaaacttcagggttttttcttccttcaaattttggaccaaagtctcatttctgtgttttgcctgcctctgatgctgggacccggaaggcgggcgctcctcctgtcttctctgtgctctttctaccgcccccgcgtcctgtcccgggggctctcctaggatcccctttccgtaaaagcgtgtaacaagggtgtaaatatttataattttttatacctgttgtgagacccgaggggcggcggcgcggttttttatggtgacacaaatgtatattttgctaacagcaattccaggctcagtattgtgaccgcggagccacaggggaccccacgcacattccgttgccttacccgatggcttgtgacgcggagagaaccgattaaaaccgtttgagaaactcctcccttgtctagccctgtgttcgctgtggacgctgtagaggcaggttggccagtctgtacctggacttcgaataaatcttctgtatcctcgc

SEQ ID NO: 279103 - DNA, 3264 bp, Homo sapiens
ggcgtctccgccattttgtgagtctataactcggagccgttgggtcggttcctgctattccggcgcctccactccgtcccccgcgggtctgctctgtgtgccatggacggcattgtcccagatatagccgttggtacaaagcggggatctgacgagcttttctctacttgtgtcactaacggaccgtttatcatgagcagcaactcggcttctgcagcaaacggaaatgacagcaagaagttcaaaggtgacagccgaagtgcaggcgtcccctctagagtgatccacatccggaagctccccatcgacgtcacggagggggaagtcatctccctggggctgccctttgggaaggtcaccaacctcctgatgctgaaggggaaaaaccaggccttcatcgagatgaacacggaggaggctgccaacaccatggtgaactactacacctcggtgacccctgtgctgcgcggccagcccatctacatccagttctccaaccacaaggagctgaagaccgacagctctcccaaccaggcgcgggcccaggcggccctgcaggcggtgaactcggtccagtcggggaacctggccttggctgcctcggcggcggccgtggacgcagggatggcgatggccgggcagagccccgtgctcaggatcatcgtggagaacctcttctaccctgtgaccctggatgtgctgcaccagattttctccaagttcggcacagtgttgaagatcatcaccttcaccaagaacaaccagttccaggccctgctgcagtatgcggaccccgtgagcgcccagcacgccaagctgtcgctggacgggcagaacatctacaacgcctgctgcacgctgcgcatcgacttttccaagctcaccagcctcaacgtcaagtacaacaatgacaagagccgtgactacacacgcccagacctgccttccggggacagccagccctcgctggaccagaccatggccgcggccttcggtgcacctggtataatctcagcctctccgtatgcaggagctggtttccctcccacctttgccattcctcaagctgcaggcctttccgttccgaacgtccacggcgccctggcccccctggccatcccctcggcggcggcggcagctgcggcggcaggtcggatcgccatcccgggcctggcgggggcaggaaattctgtattgctggtcagcaacctcaacccagagagagtcacaccccaaagcctctttattcttttcggcgtctacggtgacgtgcagcgcgtgaagatcctgttcaataagaaggagaacgccctagtgcagatggcggacggcaaccaggcccagctggccatgagccacctgaacgggcacaagctgcacgggaagcccatccgcatcacgctctcgaagcaccagaacgtgcagctgccccgcgagggccaggaggaccagggcctgaccaaggactacggcaactcacccctgcaccgcttcaagaagccgggctccaagaacttccagaacatattcccgccctcggccacgctgcacctctccaacatcccgccctcagtctccgaggaggatctcaaggtcctgttttccagcaatgggggcgtcgtcaaaggattcaagttcttccagaaggaccgcaagatggcactgatccagatgggctccgtggaggaggcggtccaggccctcattgacctgcacaaccacgacctcggggagaaccaccacctgcgggtctccttctccaagtccaccatctaggggcacaggcccccacggccgggccccctggcgacaacttccatcattccagagaaaagccactttaaaaacagctgaagtgaccttagcagaccagagattttatttttttaaagagaaatcagtttacctgtttttaaaaaaattaaatctagttcaccttgctcaccctgcggtgacagggacagctcaggctcttggtgactgtggcagcgggagttcccggccctccacacccggggccagaccctcggggccatgccttggtggggcctgtgtcgggcgtggggcctgcaggtgggcgccccgaccacgacttggcttccttgtgccttaaaaaacctgccttcctgcagccacacacccacccggggtgtcctggggacccaaggggtgggggggtcacaccagagagaggcagggggcctggccggctcctgcaggatcatgcagctggggcgcggcggccgcggctgcgacaccccaaccccagccctctaatcaagtcacgtgattctcccttcaccccgcccccagggccttcccttctgcccccaggcgggctccccgctgctccagctgcggagctggtcgacataatctctgtattatatactttgcagttgcagacgtctgtgcctagcaatatttccagttgaccaaatattctaatcttttttcatttatatgcaaaagaaatagttttaagtaactttttatagcaagatgatacaatggtatgagtgtaatctaaacttccttgtggtattaccttgtatgctgttacttttattttattccttgtaattaagtcacaggcaggacccagtttccagagagcaggcggggccgcccagtgggtcaggcacagggagccccggtcctatcttagagcccctgagcttcagggaaggggcgggcgtgtcgccgcctctggcatcgcctccggttgccttacaccacgccttcacctgcagtcgcctagaaaacttgctctcaaacttcagggttttttcttccttcaaattttggaccaaagtctcatttctgtgttttgcctgcctctgatgctgggacccggaaggcgggcgctcctcctgtcttctctgtgctctttctaccgcccccgcgtcctgtcccgggggctctcctaggatcccctttccgtaaaagcgtgtaacaagggtgtaaatatttataattttttatacctgttgtgagacccgaggggcggcggcgcggttttttatggtgacacaaatgtatattttgctaacagcaattccaggctcagtattgtgaccgcggagccacaggggaccccacgcacattccgttgccttacccgatggcttgtgacgcggagagaaccgattaaaaccgtttgagaaactcctcccttgtctagccctgtgttcgctgtggacgctgtagaggcaggttggccagtctgtacctggacttcgaataaatcttctgtatcctcgc

SEQ ID NO: 279104 - DNA, 265 bp, Homo sapiens
actagtaatattactagtgaattcactagtgacacaaatgtatattttgctaacagcaattccaggctcagtattgtgaccgcggagccacaggggaccccacgcacattccgttgccttacccgatggcttgtgacgcggagagaaccgattaaaaccgtttgagaaactcctcccttgtctagccctgtgttcgctgtggacgctgtagaggcaggttggccagtctgtacctggacttcgaataaatcttctgtatcctcgc

SEQ ID NO: 279105 - DNA, 357 bp, Homo sapiens
tctcaaacttcagggttttttcttcctatcttagagcccctgagcttcagggaaggggcgggcgtgtcgccgcctctttctaccgcccccgcgtcctgtcccgggggctctcctaggatcccctttccgtaaaagcgtgtaacaagggtgtaaatatttataattttttatacctgttgtgagacccgaggggcggcggcgcggttttttatggtgacacaaatgtatattttgctaacagcaattccaggctcagtattgtgaccgcggagccacaggggaccccacgcacattccgttgccttacccgatggcttgtgacgcggagagaaccgattaaaaccgtttgagaaactc

SEQ ID NO: 279106 - DNA, 3164 bp, Homo sapiens
agcgacacgaaaaaaacttaggctaggtacgaggctgggtgttgccactccgtcccccgcgggtctgctctgtgtgccatggacggcattgtcccagatatagccgttggtacaaagcggggatctgacgagcttttctctacttgtgtcactaacggaccgtttatcatgagcagcaactcggcttctgcagcaaacggaaatgacagcaagaagttcaaaggtgacagccgaagtgcaggcgtcccctctagagtgatccacatccggaagctccccatcgacgtcacggagggggaagtcatctccctggggctgccctttgggaaggtcaccaacctcctgatgctgaaggggaaaaaccaggccttcatcgagatgaacacggaggaggctgccaacaccatggtgaactactacacctcggtgacccctgtgctgcgcggccagcccatctacatccagttctccaaccacaaggagctgaagaccgacagctctcccaaccaggcgcgggcccaggcggccctgcaggcggtgaactcggtccagtcggggaacctggccttggctgcctcggcggcggccgtggacgcagggatggcgatggccgggcagagccccgtgctcaggatcatcgtggagaacctcttctaccctgtgaccctggatgtgctgcaccagattttctccaagttcggcacagtgttgaagatcatcaccttcaccaagaacaaccagttccaggccctgctgcagtatgcggaccccgtgagcgcccagcacgccaagctgtcgctggacgggcagaacatctacaacgcctgctgcacgctgcgcatcgacttttccaagctcaccagcctcaacgtcaagtacaacaatgacaagagccgtgactacacacgcccagacctgccttccggggacagccagccctcgctggaccagaccatggccgcggccttccaggcctttccgttccgaacgtccacggcgccctggcccccctggccatcccctcggcggcggcggcagctgcggcggcaggtcggatcgccatcccgggcctggcgggggcaggaaattctgtattgctggtcagcaacctcaacccagagagagtcacaccccaaagcctctttattcttttcggcgtctacggtgacgtgcagcgcgtgaagatcctgttcaataagaaggagaacgccctagtgcagatggcggacggcaaccaggcccagctggccatgagccacctgaacgggcacaagctgcacgggaagcccatccgcatcacgctctcgaagcaccagaacgtgcagctgccccgcgagggccaggaggaccagggcctgaccaaggactacggcaactcacccctgcaccgcttcaagaagccgggctccaagaacttccagaacatattcccgccctcggccacgctgcacctctccaacatcccgccctcagtctccgaggaggatctcaaggtcctgttttccagcaatgggggcgtcgtcaaaggattcaagttcttccagaaggaccgcaagatggcactgatccagatgggctccgtggaggaggcggtccaggccctcattgacctgcacaaccacgacctcggggagaaccaccacctgcgggtctccttctccaagtccaccatctaggggcacaggcccccacggccgggccccctggcgacaacttccatcattccagagaaaagccactttaaaaacagctgaagtgaccttagcagaccagagattttatttttttaaagagaaatcagtttacctgtttttaaaaaaattaaatctagttcaccttgctcaccctgcggtgacagggacagctcaggctcttggtgactgtggcagcgggagttcccggccctccacacccggggccagaccctcggggccatgccttggtggggcctgtgtcgggcgtggggcctgcaggtgggcgccccgaccacgacttggcttccttgtgccttaaaaaacctgccttcctgcagccacacacccacccggggtgtcctggggacccaaggggtgggggggtcacaccagagagaggcagggggcctggccggctcctgcaggatcatgcagctggggcgcggcggccgcggctgcgacaccccaaccccagccctctaatcaagtcacgtgattctcccttcaccccgcccccagggccttcccttctgcccccaggcgggctccccgctgctccagctgcggagctggtcgacataatctctgtattatatactttgcagttgcagacgtctgtgcctagcaatatttccagttgaccaaatattctaatcttttttcatttatatgcaaaagaaatagttttaagtaactttttatagcaagatgatacaatggtatgagtgtaatctaaacttccttgtggtattaccttgtatgctgttacttttattttattccttgtaattaagtcacaggcaggacccagtttccagagagcaggcggggccgcccagtgggtcaggcacagggagccccggtcctatcttagagcccctgagcttcagggaaggggcgggcgtgtcgccgcctctggcatcgcctccggttgccttacaccacgccttcacctgcagtcgcctagaaaacttgctctcaaacttcagggttttttcttccttcaaattttggaccaaagtctcatttctgtgttttgcctgcctctgatgctgggacccggaaggcgggcgctcctcctgtcttctctgtgctctttctaccgcccccgcgtcctgtcccgggggctctcctaggatcccctttccgtaaaagcgtgtaacaagggtgtaaatatttataattttttatacctgttgtgagacccgaggggcggcggcgcggttttttatggtgacacaaatgtatattttgctaacagcaattccaggctcagtattgtgaccgcggagccacaggggaccccacgcacattccgttgccttacccgatggcttgtgacgcggagagaaccgattaaaaccgtttgagaaactcctcccttgtctagccctgtgttcgctgtggacgctgtagaggcaggttggccagtctgtacctggacttcgaataaatcttctgtatcctcgc

SEQ ID NO: 279107 - DNA, 4078 bp, Homo sapiens
agcgacacgaaaaaaacttaggctaggtacgaggctgggtgttgccactccgtcccccgcgggtctgctctgtgtgccatggacggcattgtcccagatatagccgttggtacaaagcggggatctgacgagcttttctctacttgtgtcactaacggaccgtttatcatgagcagcaactcggcttctgcagcaaacggaaatgacagcaagaagttcaaaggtgacagccgaagtgcaggcgtcccctctagagtgatccacatccggaagctccccatcgacgtcacggagggggaagtcatctccctggggctgccctttgggaaggtcaccaacctcctgatgctgaaggggaaaaaccaggccttcatcgagatgaacacggaggaggctgccaacaccatggtgaactactacacctcggtgacccctgtgctgcgcggccagcccatctacatccagttctccaaccacaaggagctgaagaccgacagctctcccaaccaggcgcgggcccaggcggccctgcaggcggtgaactcggtccagtcggggaacctggccttggctgcctcggcggcggccgtggacgcagggatggcgatggccgggcagagccccgtgctcaggatcatcgtggagaacctcttctaccctgtgaccctggatgtgctgcaccagattttctccaagttcggcacagtgttgaagatcatcaccttcaccaagaacaaccagttccaggccctgctgcagtatgcggaccccgtgagcgcccagcacgccaagctgtcgctggacgggcagaacatctacaacgcctgctgcacgctgcgcatcgacttttccaagctcaccagcctcaacgtcaagtacaacaatgacaagagccgtgactacacacgcccagacctgccttccggggacagccagccctcgctggaccagaccatggccgcggccttcggtgcacctggtataatctcagcctctccgtatgcaggagctggtttccctcccacctttgccattcctcaagctgcaggtattcaaacgcttggtcttggttccccagcgactgcatgcccacaccaccttcccaggcagctccgcatccacggcggcagcctgggcggactgggcactcgagtgccaggtcaggggcccttcccgggagaggggacgccacgtccacagagcaggcttggccagggcagtggtaggacagggctgtggaggcccacgtgtggacggcgccagccagaagccgctaatcgcacagtctttgtggtctggttcccttcaagcacctccgggcgagcgcgaggaccgccagtggttggagggatgtctctagtagttgaatttgagtggcctggtaagcgcgcggcccgaggctgagcagcatgaccggcggcgggacgtgtgtgcgtggccgtcctcccgcttcccttctgggaccggggcccggccgccccagtgctggccgtggacggagcagcgcgtgccgcccggcggccgcctcgtctgcatggaggcatgggcgcgcatgcgcggtggtcccgggacgggccctgcttgccgagggccccgtgtctgtgctggcggagccggagcttttctgtgctgtgggcggggcgcatgcagatgagcccaggcccggcccggcccgtgctgtgaggagaggcgggcgctggtgcaggagccggcgggtggctgtgcgggggtcgggcgaccccacaggcacccagggtagggccagagccagggccgcctcccgcgcggctcggctcctcggtgcatgaggacggggagcgtcggcctctcccactctgcggtggagtcgggggcgccgccgctcatctcacctcctgcttttccaggcctttccgttccgaacgtccacggcgccctggcccccctggccatcccctcggcggcggcggcagctgcggcggcaggtcggatcgccatcccgggcctggcgggggcaggaaattctgtattgctggtcagcaacctcaacccagagagagtcacaccccaaagcctctttattcttttcggcgtctacggtgacgtgcagcgcgtgaagatcctgttcaataagaaggagaacgccctagtgcagatggcggacggcaaccaggcccagctggccatgagccacctgaacgggcacaagctgcacgggaagcccatccgcatcacgctctcgaagcaccagaacgtgcagctgccccgcgagggccaggaggaccagggcctgaccaaggactacggcaactcacccctgcaccgcttcaagaagccgggctccaagaacttccagaacatattcccgccctcggccacgctgcacctctccaacatcccgccctcagtctccgaggaggatctcaaggtcctgttttccagcaatgggggcgtcgtcaaaggattcaagttcttccagaaggaccgcaagatggcactgatccagatgggctccgtggaggaggcggtccaggccctcattgacctgcacaaccacgacctcggggagaaccaccacctgcgggtctccttctccaagtccaccatctaggggcacaggcccccacggccgggccccctggcgacaacttccatcattccagagaaaagccactttaaaaacagctgaagtgaccttagcagaccagagattttatttttttaaagagaaatcagtttacctgtttttaaaaaaattaaatctagttcaccttgctcaccctgcggtgacagggacagctcaggctcttggtgactgtggcagcgggagttcccggccctccacacccggggccagaccctcggggccatgccttggtggggcctgtgtcgggcgtggggcctgcaggtgggcgccccgaccacgacttggcttccttgtgccttaaaaaacctgccttcctgcagccacacacccacccggggtgtcctggggacccaaggggtgggggggtcacaccagagagaggcagggggcctggccggctcctgcaggatcatgcagctggggcgcggcggccgcggctgcgacaccccaaccccagccctctaatcaagtcacgtgattctcccttcaccccgcccccagggccttcccttctgcccccaggcgggctccccgctgctccagctgcggagctggtcgacataatctctgtattatatactttgcagttgcagacgtctgtgcctagcaatatttccagttgaccaaatattctaatcttttttcatttatatgcaaaagaaatagttttaagtaactttttatagcaagatgatacaatggtatgagtgtaatctaaacttccttgtggtattaccttgtatgctgttacttttattttattccttgtaattaagtcacaggcaggacccagtttccagagagcaggcggggccgcccagtgggtcaggcacagggagccccggtcctatcttagagcccctgagcttcagggaaggggcgggcgtgtcgccgcctctggcatcgcctccggttgccttacaccacgccttcacctgcagtcgcctagaaaacttgctctcaaacttcagggttttttcttccttcaaattttggaccaaagtctcatttctgtgttttgcctgcctctgatgctgggacccggaaggcgggcgctcctcctgtcttctctgtgctctttctaccgcccccgcgtcctgtcccgggggctctcctaggatcccctttccgtaaaagcgtgtaacaagggtgtaaatatttataattttttatacctgttgtgagacccgaggggcggcggcgcggttttttatggtgacacaaatgtatattttgctaacagcaattccaggctcagtattgtgaccgcggagccacaggggaccccacgcacattccgttgccttacccgatggcttgtgacgcggagagaaccgattaaaaccgtttgagaaactcctcccttgtctagccctgtgttcgctgtggacgctgtagaggcaggttggccagtctgtacctggacttcgaataaatcttctgtatcctcgc

SEQ ID NO: 279108 - DNA, 3884 bp, Homo sapiens
agcgacacgaaaaaaacttaggctaggtacgaggctgggtgttgccactccgtcccccgcgggtctgctctgtgtgccatggacggcattgtcccagatatagccgttggtacaaagcggggatctgacgagcttttctctacttgtgtcactaacggaccgtttatcatgagcagcaactcggcttctgcagcaaacggaaatgacagcaagaagttcaaaggtgacagccgaagtgcaggcgtcccctctagagtgatccacatccggaagctccccatcgacgtcacggagggggaagtcatctccctggggctgccctttgggaaggtcaccaacctcctgatgctgaaggggaaaaaccaggccttcatcgagatgaacacggaggaggctgccaacaccatggtgaactactacacctcggtgacccctgtgctgcgcggccagcccatctacatccagttctccaaccacaaggagctgaagaccgacagctctcccaaccaggcgcgggcccaggcggccctgcaggcggtgaactcggtccagtcggggaacctggccttggctgcctcggcggcggccgtggacgcagggatggcgatggccgggcagagccccgtgctcaggatcatcgtggagaacctcttctaccctgtgaccctggatgtgctgcaccagattttctccaagttcggcacagtgttgaagatcatcaccttcaccaagaacaaccagttccaggccctgctgcagtatgcggaccccgtgagcgcccagcacgccaagctgtcgctggacgggcagaacatctacaacgcctgctgcacgctgcgcatcgacttttccaagctcaccagcctcaacgtcaagtacaacaatgacaagagccgtgactacacacgcccagacctgccttccggggacagccagccctcgctggaccagaccatggccgcggccttcggtgcacctggtataatctcagcctctccgtatgcaggagctggtttccctcccacctttgccattcctcaagctgcaggtattcaaacgcttggtcttggttccccagcgactgcatgcccacaccaccttcccaggcagctccgcatccacggcggcagcctgggcggactgggcactcgagtgccaggtcaggggcccttcccgggagaggggacgccacgtccacagagcaggctgagcagcatgaccggcggcgggacgtgtgtgcgtggccgtcctcccgcttcccttctgggaccggggcccggccgccccagtgctggccgtggacggagcagcgcgtgccgcccggcggccgcctcgtctgcatggaggcatgggcgcgcatgcgcggtggtcccgggacgggccctgcttgccgagggccccgtgtctgtgctggcggagccggagcttttctgtgctgtgggcggggcgcatgcagatgagcccaggcccggcccggcccgtgctgtgaggagaggcgggcgctggtgcaggagccggcgggtggctgtgcgggggtcgggcgaccccacaggcacccagggtagggccagagccagggccgcctcccgcgcggctcggctcctcggtgcatgaggacggggagcgtcggcctctcccactctgcggtggagtcgggggcgccgccgctcatctcacctcctgcttttccaggcctttccgttccgaacgtccacggcgccctggcccccctggccatcccctcggcggcggcggcagctgcggcggcaggtcggatcgccatcccgggcctggcgggggcaggaaattctgtattgctggtcagcaacctcaacccagagagagtcacaccccaaagcctctttattcttttcggcgtctacggtgacgtgcagcgcgtgaagatcctgttcaataagaaggagaacgccctagtgcagatggcggacggcaaccaggcccagctggccatgagccacctgaacgggcacaagctgcacgggaagcccatccgcatcacgctctcgaagcaccagaacgtgcagctgccccgcgagggccaggaggaccagggcctgaccaaggactacggcaactcacccctgcaccgcttcaagaagccgggctccaagaacttccagaacatattcccgccctcggccacgctgcacctctccaacatcccgccctcagtctccgaggaggatctcaaggtcctgttttccagcaatgggggcgtcgtcaaaggattcaagttcttccagaaggaccgcaagatggcactgatccagatgggctccgtggaggaggcggtccaggccctcattgacctgcacaaccacgacctcggggagaaccaccacctgcgggtctccttctccaagtccaccatctaggggcacaggcccccacggccgggccccctggcgacaacttccatcattccagagaaaagccactttaaaaacagctgaagtgaccttagcagaccagagattttatttttttaaagagaaatcagtttacctgtttttaaaaaaattaaatctagttcaccttgctcaccctgcggtgacagggacagctcaggctcttggtgactgtggcagcgggagttcccggccctccacacccggggccagaccctcggggccatgccttggtggggcctgtgtcgggcgtggggcctgcaggtgggcgccccgaccacgacttggcttccttgtgccttaaaaaacctgccttcctgcagccacacacccacccggggtgtcctggggacccaaggggtgggggggtcacaccagagagaggcagggggcctggccggctcctgcaggatcatgcagctggggcgcggcggccgcggctgcgacaccccaaccccagccctctaatcaagtcacgtgattctcccttcaccccgcccccagggccttcccttctgcccccaggcgggctccccgctgctccagctgcggagctggtcgacataatctctgtattatatactttgcagttgcagacgtctgtgcctagcaatatttccagttgaccaaatattctaatcttttttcatttatatgcaaaagaaatagttttaagtaactttttatagcaagatgatacaatggtatgagtgtaatctaaacttccttgtggtattaccttgtatgctgttacttttattttattccttgtaattaagtcacaggcaggacccagtttccagagagcaggcggggccgcccagtgggtcaggcacagggagccccggtcctatcttagagcccctgagcttcagggaaggggcgggcgtgtcgccgcctctggcatcgcctccggttgccttacaccacgccttcacctgcagtcgcctagaaaacttgctctcaaacttcagggttttttcttccttcaaattttggaccaaagtctcatttctgtgttttgcctgcctctgatgctgggacccggaaggcgggcgctcctcctgtcttctctgtgctctttctaccgcccccgcgtcctgtcccgggggctctcctaggatcccctttccgtaaaagcgtgtaacaagggtgtaaatatttataattttttatacctgttgtgagacccgaggggcggcggcgcggttttttatggtgacacaaatgtatattttgctaacagcaattccaggctcagtattgtgaccgcggagccacaggggaccccacgcacattccgttgccttacccgatggcttgtgacgcggagagaaccgattaaaaccgtttgagaaactcctcccttgtctagccctgtgttcgctgtggacgctgtagaggcaggttggccagtctgtacctggacttcgaataaatcttctgtatcctcgc

SEQ ID NO: 279109 - DNA, 3375 bp, Homo sapiens
agcgacacgaaaaaaacttaggctaggtacgaggctgggtgttgccactccgtcccccgcgggtctgctctgtgtgccatggacggcattgtcccagatatagccgttggtacaaagcggggatctgacgagcttttctctacttgtgtcactaacggaccgtttatcatgagcagcaactcggcttctgcagcaaacggaaatgacagcaagaagttcaaaggtgacagccgaagtgcaggcgtcccctctagagtgatccacatccggaagctccccatcgacgtcacggagggggaagtcatctccctggggctgccctttgggaaggtcaccaacctcctgatgctgaaggggaaaaaccaggccttcatcgagatgaacacggaggaggctgccaacaccatggtgaactactacacctcggtgacccctgtgctgcgcggccagcccatctacatccagttctccaaccacaaggagctgaagaccgacagctctcccaaccaggcgcgggcccaggcggccctgcaggcggtgaactcggtccagtcggggaacctggccttggctgcctcggcggcggccgtggacgcagggatggcgatggccgggcagagccccgtgctcaggatcatcgtggagaacctcttctaccctgtgaccctggatgtgctgcaccagattttctccaagttcggcacagtgttgaagatcatcaccttcaccaagaacaaccagttccaggccctgctgcagtatgcggaccccgtgagcgcccagcacgccaagctgtcgctggacgggcagaacatctacaacgcctgctgcacgctgcgcatcgacttttccaagctcaccagcctcaacgtcaagtacaacaatgacaagagccgtgactacacacgcccagacctgccttccggggacagccagccctcgctggaccagaccatggccgcggccttccaggcctttccgttccgaacgtccacggcgccctggcccccctggccatcccctcggcggcggcggcagctgcggcggcaggtcggatcgccatcccgggcctggcgggggcaggaaattctgtattgctggtcagcaacctcaacccagagagagtcacaccccaaagcctctttattcttttcggcgtctacggtgacgtgcagcgcgtgaagatcctgttcaataagaaggagaacgccctagtgcagatggcggacggcaaccaggcccagctggccatgagccacctgaacgggcacaagctgcacgggaagcccatccgcatcacgctctcgaagcaccagaacgtgcagctgccccgcgagggccaggaggaccagggcctgaccaaggactacggcaactcacccctgcaccgcttcaagaagccgggctccaagaacttccagaacatattcccgccctcggccacgctgcacctctccaacatcccgccctcagtctccgaggaggatctcaaggtcctgttttccagcaatgggggcgtcgtcaaaggattcaagttcttccagaaggaccgcaagatggcactgatccagatgggctccgtggaggaggcggtccaggccctcattgacctgcacaaccacgacctcggggagaaccaccacctgcgggtctccttctccaagtccaccatctaggggcacaggcccccacggccgggccccctggcgacaacttccatcattccagagaaaagccactttaaaaacagctgaagtgaccttagcagaccagagattttatttttttaaagagaaatcagtttacctgtttttaaaaaaattaaatctagttcaccttgctcaccctgcggtgacagggacagctcaggctcttggtgactgtggcagcgggagttcccggccctccacacccggggccagaccctcggggccatgccttggtggggcctgtgtcgggcgtggggcctgcaggtgggcgccccgaccacgacttggcttccttgtgccttaaaaaacctgccttcctgcagccacacacccacccggggtgtcctggggacccaaggggtgggggggtcacaccagagagaggcagggggcctggccggctcctgcaggatcatgcagctggggcgcggcggccgcggctgcgacaccccaaccccagccctctaatcaagtcacgtgattctcccttcaccccgcccccagggccttcccttctgcccccaggcgggctccccgctgctccagctgcggagctggtcgacataatctctgtattatatactttgcagttgcagacgtctgtgcctagcaatatttccagttgaccaaatattctaatcttttttcatttatatgcaaaagaaatagttttaagtaactttttatagcaagatgatacaatggtatgagtgtaatctaaacttccttgtggtattaccttgtatgctgttacttttattttattccttgtaattaagtcacaggcaggacccagtttccagagagcaggcggggccgcccagtgggtcaggcacagggagccccggtcctatcttagagcccctgagcttcagggaaggggcgggcgtgtcgccgcctctggcatcgcctccggttgccttacaccacgccttcacctgcagtcgcctagaaaacttgctctcaaacttcagggttttttcttccttcaaattttggaccaaagtctcatttctgtgttttgcctgcctctgatgctgggacccggaaggcgggcgctcctcctgtcttctctgtgctctttctaccgcccccgcgtcctgtcccgggggctctcctaggatcccctttccgtaaaagcgtgtaacaagggtgtaaatatttataattttttatacctgttgtgagacccgaggggcggcggcgcggttttttatggtgacacaaatgtatattttgctaacagcaattccaggctcagtattgtgaccgcggagccacaggggaccccacgcacattccgttgccttacccgatggcttgtgacgcggagagaaccgattaaaaccgtttgagaaactcctcccttgtctagccctgtgttcgctgtggacgctgtagaggcaggttggccagtctgtacctggacttcgaataaatcttctgtatcctcgctccgttccgccttcgttgctggcttcctctttctgtgccgcgggcggccccgactcccgcccgggtgtccgccgaagcgccaggtggggccacgggcggggtgggcccggccctgagagtgggggtccctgcgtggggcgtgcgggccagagcgaatgaccaagagccggacctcggtttctgccgctttattgagcatccgcgcggccgc

SEQ ID NO: 279110 - DNA, 3147 bp, Homo sapiens
agcgacacgaaaaaaacttaggctaggtacgaggctgggtgttgccactccgtcccccgcgggtctgctctgtgtgccatggacggcattgtcccagatatagccgttggtacaaagcggggatctgacgagcttttctctacttgtgtcactaacggaccgtttatcatgagcagcaactcggcttctgcagcaaacggaaatgacagcaagaagttcaaaggtgacagccgaagtgcaggcgtcccctctagagtgatccacatccggaagctccccatcgacgtcacggagggggaagtcatctccctggggctgccctttgggaaggtcaccaacctcctgatgctgaaggggaaaaaccaggccttcatcgagatgaacacggaggaggctgccaacaccatggtgaactactacacctcggtgacccctgtgctgcgcggccagcccatctacatccagttctccaaccacaaggagctgaagaccgacagctctcccaaccaggcgcgggcccaggcggccctgcaggcggtgaactcggtccagtcggggaacctggccttggctgcctcggcggcggccgtggacgcagggatggcgatggccgggcagagccccgtgctcaggatcatcgtggagaacctcttctaccctgtgaccctggatgtgctgcaccagattttctccaagttcggcacagtgttgaagatcatcaccttcaccaagaacaaccagttccaggccctgctgcagtatgcggaccccgtgagcgcccagcacgccaagctgtcgctggacgggcagaacatctacaacgcctgctgcacgctgcgcatcgacttttccaagctcaccagcctcaacgtcaagtacaacaatgacaagagccgtgactacacacgcccagacctgccttccggggacagccagccctcgctggaccagaccatggccgcggccttcggtgcacctggtataatctcagcctctccgtatgcaggagctggtttccctcccacctttgccattcctcaagctgcaggcctttccgttccgaacgtccacggcgccctggcccccctggccatcccctcggcggcggcggcagctgcggcggcaggtcggatcgccatcccgggcctggcgggggcaggaaattctgtattgctggtcagcaacctcaacccagagagagtcacaccccaaagcctctttattcttttcggcgtctacggtgacgtgcagcgcgtgaagatcctgttcaataagaaggagaacgccctagtgcagatggcggacggcaaccaggcccagctggccatgagccacctgaacgggcacaagctgcacgggaagcccatccgcatcacgctctcgaagcaccagaacgtgcagctgccccgcgagggccaggaggaccagggcctgaccaaggactacggcaactcacccctgcaccgcttcaagaagccgggctccaagaacttccagaacatattcccgccctcggccacgctgcacctctccaacatcccgccctcagtctccgaggaggatctcaaggtcctgttttccagcaatgggggcgtcgtcaaaggattcaagttcttccagaaggaccgcaagatggcactgatccagatgggctccgtggaggaggcggtccaggccctcattgacctgcacaaccacgacctcggggagaaccaccacctgcgggtctccttctccaagtccaccatctaggggcacaggcccccacggccgggccccctggcgacaacttccatcattccagagaaaagccactttaaaaacagctgaagtgaccttagcagaccagagattttatttttttaaagagaaatcagtttacctgtttttaaaaaaattaaatctagttcaccttgctcaccctgcggtgacagggacagctcaggctcttggtgactgtggcagcgggagttcccggccctccacacccggggccagaccctcggggccatgccttggtggggcctgtgtcgggcgtggggcctgcaggtgggcgccccgaccacgacttggcttccttgtgccttaaaaaacctgccttcctgcagccacacacccacccggggtgtcctggggacccaaggggtgggggggtcacaccagagagaggcagggggcctggccggctcctgcaggatcatgcagctggggcgcggcggccgcggctgcgacaccccaaccccagccctctaatcaagtcacgtgattctcccttcaccccgcccccagggccttcccttctgcccccaggcgggctccccgctgctccagctgcggagctggtcgacataatctctgtattatatactttgcagttgcagacgtctgtgcctagcaatatttccagttgaccaaatattctaatcttttttcatttatatgcaaaagaaatagttttaagtaactttttatagcaagatgatacaatggtatgagtgtaatctaaacttccttgtggtattaccttgtatgctgttacttttattttattccttgtaattaagtcacaggcaggacccagtttccagagagcaggcggggccgcccagtgggtcaggcacagggagccccggtcctatcttagagcccctgagcttcagggaaggggcgggcgtgtcgccgcctctggcatcgcctccggttgccttacaccacgccttcacctgcagtcgcctagaaaacttgctctcaaacttcagggttttttcttccttcaaattttggaccaaagtctcatttctgtgttttgcctgcctctgatgctgggacccggaaggcgggcgctcctcctgtcttctctgtgctctttctaccgcccccgcgtcctgtcccgggggctctcctaggatcccctttccgtaaaagcgtgtaacaagggtgtaaatatttataattttttatacctgttgtgagacccgaggggcggcggcgcggttttttatggtgacacaaatgtatattttgctaacagcaattccaggctcagtattgtgaccgcggagccacaggggaccccacgcacattccgttgccttacccgatggcttgtgacgcggagagaaccgattaaaaccgtttgagaaactc

SEQ ID NO: 279111 - DNA, 3131 bp, Homo sapiens
agcgacacgaaaaaaacttaggctaggtacgaggctgggtgttgccactccgtcccccgcgggtctgctctgtgtgccatggacggcattgtcccagatatagccgttggtacaaagcggggatctgacgagcttttctctacttgtgtcactaacggaccgtttatcatgagcagcaactcggcttctgcagcaaacggaaatgacagcaagaagttcaaaggtgacagccgaagtgcaggcgtcccctctagagtgatccacatccggaagctccccatcgacgtcacggagggggaagtcatctccctggggctgccctttgggaaggtcaccaacctcctgatgctgaaggggaaaaaccaggccttcatcgagatgaacacggaggaggctgccaacaccatggtgaactactacacctcggtgacccctgtgctgcgcggccagcccatctacatccagttctccaaccacaaggagctgaagaccgacagctctcccaaccaggcgcgggcccaggcggccctgcaggcggtgaactcggtccagtcggggaacctggccttggctgcctcggcggcggccgtggacgcagggatggcgatggccgggcagagccccgtgctcaggatcatcgtggagaacctcttctaccctgtgaccctggatgtgctgcaccagattttctccaagttcggcacagtgttgaagatcatcaccttcaccaagaacaaccagttccaggccctgctgcagtatgcggaccccgtgagcgcccagcacgccaagctgtcgctggacgggcagaacatctacaacgcctgctgcacgctgcgcatcgacttttccaagctcaccagcctcaacgtcaagtacaacaatgacaagagccgtgactacacacgcccagacctgccttccggggacagccagccctcgctggaccagaccatggccgcggccttccaggcctttccgttccgaacgtccacggcgccctggcccccctggccatcccctcggcggcggcggcagctgcggcggcaggtcggatcgccatcccgggcctggcgggggcaggaaattctgtattgctggtcagcaacctcaacccagagggcgtctacggtgacgtgcagcgcgtgaagatcctgttcaataagaaggagaacgccctagtgcagatggcggacggcaaccaggcccagctggccatgagccacctgaacgggcacaagctgcacgggaagcccatccgcatcacgctctcgaagcaccagaacgtgcagctgccccgcgagggccaggaggaccagggcctgaccaaggactacggcaactcacccctgcaccgcttcaagaagccgggctccaagaacttccagaacatattcccgccctcggccacgctgcacctctccaacatcccgccctcagtctccgaggaggatctcaaggtcctgttttccagcaatgggggcgtcgtcaaaggattcaagttcttccagaaggaccgcaagatggcactgatccagatgggctccgtggaggaggcggtccaggccctcattgacctgcacaaccacgacctcggggagaaccaccacctgcgggtctccttctccaagtccaccatctaggggcacaggcccccacggccgggccccctggcgacaacttccatcattccagagaaaagccactttaaaaacagctgaagtgaccttagcagaccagagattttatttttttaaagagaaatcagtttacctgtttttaaaaaaattaaatctagttcaccttgctcaccctgcggtgacagggacagctcaggctcttggtgactgtggcagcgggagttcccggccctccacacccggggccagaccctcggggccatgccttggtggggcctgtgtcgggcgtggggcctgcaggtgggcgccccgaccacgacttggcttccttgtgccttaaaaaacctgccttcctgcagccacacacccacccggggtgtcctggggacccaaggggtgggggggtcacaccagagagaggcagggggcctggccggctcctgcaggatcatgcagctggggcgcggcggccgcggctgcgacaccccaaccccagccctctaatcaagtcacgtgattctcccttcaccccgcccccagggccttcccttctgcccccaggcgggctccccgctgctccagctgcggagctggtcgacataatctctgtattatatactttgcagttgcagacgtctgtgcctagcaatatttccagttgaccaaatattctaatcttttttcatttatatgcaaaagaaatagttttaagtaactttttatagcaagatgatacaatggtatgagtgtaatctaaacttccttgtggtattaccttgtatgctgttacttttattttattccttgtaattaagtcacaggcaggacccagtttccagagagcaggcggggccgcccagtgggtcaggcacagggagccccggtcctatcttagagcccctgagcttcagggaaggggcgggcgtgtcgccgcctctggcatcgcctccggttgccttacaccacgccttcacctgcagtcgcctagaaaacttgctctcaaacttcagggttttttcttccttcaaattttggaccaaagtctcatttctgtgttttgcctgcctctgatgctgggacccggaaggcgggcgctcctcctgtcttctctgtgctctttctaccgcccccgcgtcctgtcccgggggctctcctaggatcccctttccgtaaaagcgtgtaacaagggtgtaaatatttataattttttatacctgttgtgagacccgaggggcggcggcgcggttttttatggtgacacaaatgtatattttgctaacagcaattccaggctcagtattgtgaccgcggagccacaggggaccccacgcacattccgttgccttacccgatggcttgtgacgcggagagaaccgattaaaaccgtttgagaaactcctcccttgtctagccctgtgttcgctgtggacgctgtagaggcaggttggccagtctgtacctggacttcgaataaatcttctgtatcctcgc

SEQ ID NO: 279112 - DNA, 3207 bp, Homo sapiens
agcgacacgaaaaaaacttaggctaggtacgaggctgggtgttgccactccgtcccccgcgggtctgctctgtgtgccatggacggcattgtcccagatatagccgttggtacaaagcggggatctgacgagcttttctctacttgtgtcactaacggaccgtttatcatgagcagcaactcggcttctgcagcaaacggaaatgacagcaagaagttcaaaggtgacagccgaagtgcaggcgtcccctctagagtgatccacatccggaagctccccatcgacgtcacggagggggaagtcatctccctggggctgccctttgggaaggtcaccaacctcctgatgctgaaggggaaaaaccaggccttcatcgagatgaacacggaggaggctgccaacaccatggtgaactactacacctcggtgacccctgtgctgcgcggccagcccatctacatccagttctccaaccacaaggagctgaagaccgacagctctcccaaccaggcgcgggcccaggcggccctgcaggcggtgaactcggtccagtcggggaacctggccttggctgcctcggcggcggccgtggacgcagggatggcgatggccgggcagagccccgtgctcaggatcatcgtggagaacctcttctaccctgtgaccctggatgtgctgcaccagattttctccaagttcggcacagtgttgaagatcatcaccttcaccaagaacaaccagttccaggccctgctgcagtatgcggaccccgtgagcgcccagcacgccaagctgtcgctggacgggcagaacatctacaacgcctgctgcacgctgcgcatcgacttttccaagctcaccagcctcaacgtcaagtacaacaatgacaagagccgtgactacacacgcccagacctgccttccggggacagccagccctcgctggaccagaccatggccgcggccttcggtgcacctggtataatctcagcctctccgtatgcaggagctggtttccctcccacctttgccattcctcaagctgcaggcctttccgttccgaacgtccacggcgccctggcccccctggccatcccctcggcggcggcggcagctgcggcggcaggtcggatcgccatcccgggcctggcgggggcaggaaattctgtattgctggtcagcaacctcaacccagagggcgtctacggtgacgtgcagcgcgtgaagatcctgttcaataagaaggagaacgccctagtgcagatggcggacggcaaccaggcccagctggccatgagccacctgaacgggcacaagctgcacgggaagcccatccgcatcacgctctcgaagcaccagaacgtgcagctgccccgcgagggccaggaggaccagggcctgaccaaggactacggcaactcacccctgcaccgcttcaagaagccgggctccaagaacttccagaacatattcccgccctcggccacgctgcacctctccaacatcccgccctcagtctccgaggaggatctcaaggtcctgttttccagcaatgggggcgtcgtcaaaggattcaagttcttccagaaggaccgcaagatggcactgatccagatgggctccgtggaggaggcggtccaggccctcattgacctgcacaaccacgacctcggggagaaccaccacctgcgggtctccttctccaagtccaccatctaggggcacaggcccccacggccgggccccctggcgacaacttccatcattccagagaaaagccactttaaaaacagctgaagtgaccttagcagaccagagattttatttttttaaagagaaatcagtttacctgtttttaaaaaaattaaatctagttcaccttgctcaccctgcggtgacagggacagctcaggctcttggtgactgtggcagcgggagttcccggccctccacacccggggccagaccctcggggccatgccttggtggggcctgtgtcgggcgtggggcctgcaggtgggcgccccgaccacgacttggcttccttgtgccttaaaaaacctgccttcctgcagccacacacccacccggggtgtcctggggacccaaggggtgggggggtcacaccagagagaggcagggggcctggccggctcctgcaggatcatgcagctggggcgcggcggccgcggctgcgacaccccaaccccagccctctaatcaagtcacgtgattctcccttcaccccgcccccagggccttcccttctgcccccaggcgggctccccgctgctccagctgcggagctggtcgacataatctctgtattatatactttgcagttgcagacgtctgtgcctagcaatatttccagttgaccaaatattctaatcttttttcatttatatgcaaaagaaatagttttaagtaactttttatagcaagatgatacaatggtatgagtgtaatctaaacttccttgtggtattaccttgtatgctgttacttttattttattccttgtaattaagtcacaggcaggacccagtttccagagagcaggcggggccgcccagtgggtcaggcacagggagccccggtcctatcttagagcccctgagcttcagggaaggggcgggcgtgtcgccgcctctggcatcgcctccggttgccttacaccacgccttcacctgcagtcgcctagaaaacttgctctcaaacttcagggttttttcttccttcaaattttggaccaaagtctcatttctgtgttttgcctgcctctgatgctgggacccggaaggcgggcgctcctcctgtcttctctgtgctctttctaccgcccccgcgtcctgtcccgggggctctcctaggatcccctttccgtaaaagcgtgtaacaagggtgtaaatatttataattttttatacctgttgtgagacccgaggggcggcggcgcggttttttatggtgacacaaatgtatattttgctaacagcaattccaggctcagtattgtgaccgcggagccacaggggaccccacgcacattccgttgccttacccgatggcttgtgacgcggagagaaccgattaaaaccgtttgagaaactcctcccttgtctagccctgtgttcgctgtggacgctgtagaggcaggttggccagtctgtacctggacttcgaataaatcttctgtatcctcgc

SEQ ID NO: 279113 - DNA, 3209 bp, Homo sapiens
agcgacacgaaaaaaacttaggctaggtacgaggctgggtgttgccactccgtcccccgcgggtctgctctgtgtgccatggacggcggggatctgacgagcttttctctacttgtgtcactaacggaccgtttatcatgagcagcaactcggcttctgcagcaaacggaaatgacagcaagaagttcaaaggtgacagccgaagtgcaggcgtcccctctagagtgatccacatccggaagctccccatcgacgtcacggagggggaagtcatctccctggggctgccctttgggaaggtcaccaacctcctgatgctgaaggggaaaaaccaggccttcatcgagatgaacacggaggaggctgccaacaccatggtgaactactacacctcggtgacccctgtgctgcgcggccagcccatctacatccagttctccaaccacaaggagctgaagaccgacagctctcccaaccaggcgcgggcccaggcggccctgcaggcggtgaactcggtccagtcggggaacctggccttggctgcctcggcggcggccgtggacgcagggatggcgatggccgggcagagccccgtgctcaggatcatcgtggagaacctcttctaccctgtgaccctggatgtgctgcaccagattttctccaagttcggcacagtgttgaagatcatcaccttcaccaagaacaaccagttccaggccctgctgcagtatgcggaccccgtgagcgcccagcacgccaagctgtcgctggacgggcagaacatctacaacgcctgctgcacgctgcgcatcgacttttccaagctcaccagcctcaacgtcaagtacaacaatgacaagagccgtgactacacacgcccagacctgccttccggggacagccagccctcgctggaccagaccatggccgcggccttcggtgcacctggtataatctcagcctctccgtatgcaggagctggtttccctcccacctttgccattcctcaagctgcaggcctttccgttccgaacgtccacggcgccctggcccccctggccatcccctcggcggcggcggcagctgcggcggcaggtcggatcgccatcccgggcctggcgggggcaggaaattctgtattgctggtcagcaacctcaacccagagagagtcacaccccaaagcctctttattcttttcggcgtctacggtgacgtgcagcgcgtgaagatcctgttcaataagaaggagaacgccctagtgcagatggcggacggcaaccaggcccagctggccatgagccacctgaacgggcacaagctgcacgggaagcccatccgcatcacgctctcgaagcaccagaacgtgcagctgccccgcgagggccaggaggaccagggcctgaccaaggactacggcaactcacccctgcaccgcttcaagaagccgggctccaagaacttccagaacatattcccgccctcggccacgctgcacctctccaacatcccgccctcagtctccgaggaggatctcaaggtcctgttttccagcaatgggggcgtcgtcaaaggattcaagttcttccagaaggaccgcaagatggcactgatccagatgggctccgtggaggaggcggtccaggccctcattgacctgcacaaccacgacctcggggagaaccaccacctgcgggtctccttctccaagtccaccatctaggggcacaggcccccacggccgggccccctggcgacaacttccatcattccagagaaaagccactttaaaaacagctgaagtgaccttagcagaccagagattttatttttttaaagagaaatcagtttacctgtttttaaaaaaattaaatctagttcaccttgctcaccctgcggtgacagggacagctcaggctcttggtgactgtggcagcgggagttcccggccctccacacccggggccagaccctcggggccatgccttggtggggcctgtgtcgggcgtggggcctgcaggtgggcgccccgaccacgacttggcttccttgtgccttaaaaaacctgccttcctgcagccacacacccacccggggtgtcctggggacccaaggggtgggggggtcacaccagagagaggcagggggcctggccggctcctgcaggatcatgcagctggggcgcggcggccgcggctgcgacaccccaaccccagccctctaatcaagtcacgtgattctcccttcaccccgcccccagggccttcccttctgcccccaggcgggctccccgctgctccagctgcggagctggtcgacataatctctgtattatatactttgcagttgcagacgtctgtgcctagcaatatttccagttgaccaaatattctaatcttttttcatttatatgcaaaagaaatagttttaagtaactttttatagcaagatgatacaatggtatgagtgtaatctaaacttccttgtggtattaccttgtatgctgttacttttattttattccttgtaattaagtcacaggcaggacccagtttccagagagcaggcggggccgcccagtgggtcaggcacagggagccccggtcctatcttagagcccctgagcttcagggaaggggcgggcgtgtcgccgcctctggcatcgcctccggttgccttacaccacgccttcacctgcagtcgcctagaaaacttgctctcaaacttcagggttttttcttccttcaaattttggaccaaagtctcatttctgtgttttgcctgcctctgatgctgggacccggaaggcgggcgctcctcctgtcttctctgtgctctttctaccgcccccgcgtcctgtcccgggggctctcctaggatcccctttccgtaaaagcgtgtaacaagggtgtaaatatttataattttttatacctgttgtgagacccgaggggcggcggcgcggttttttatggtgacacaaatgtatattttgctaacagcaattccaggctcagtattgtgaccgcggagccacaggggaccccacgcacattccgttgccttacccgatggcttgtgacgcggagagaaccgattaaaaccgtttgagaaactcctcccttgtctagccctgtgttcgctgtggacgctgtagaggcaggttggccagtctgtacctggacttcgaataaatcttctgtatcctcgc

SEQ ID NO: 279114 - DNA, 3295 bp, Homo sapiens
agcgacacgaaaaaaacttaggctaggtacgaggctgggtgttgccactccgtcccccgcgggtctgctctgtgtgccatggacggcattgtcccagatatagccgttggtacaaagcggggatctgacgagcttttctctacttgtgtcactaacggaccgtttatcatgagcagcaactcggcttctgcagcaaacggaaatgacagcaagaagttcaaaggtgacagccgaagtgcaggcgtcccctctagagtgatccacatccggaagctccccatcgacgtcacggagggggaagtcatctccctggggctgccctttgggaaggtcaccaacctcctgatgctgaaggggaaaaaccaggccttcatcgagatgaacacggaggaggctgccaacaccatggtgaactactacacctcggtgacccctgtgctgcgcggccagcccatctacatccagttctccaaccacaaggagctgaagaccgacagctctcccaaccaggcgcgggcccaggcggccctgcaggcggtgaactcggtccagtcggggaacctggccttggctgcctcggcggcggccgtggacgcagggatggcgatggccgggcagagccccgtgctcaggatcatcgtggagaacctcttctaccctgtgaccctggatgtgctgcaccagattttctccaagttcggcacagtgttgaagatcatcaccttcaccaagaacaaccagttccaggccctgctgcagtatgcggaccccgtgagcgcccagcacgccaagctgtcgctggacgggcagaacatctacaacgcctgctgcacgctgcgcatcgacttttccaagctcaccagcctcaacgtcaagtacaacaatgacaagagccgtgactacacacgcccagacctgccttccggggacagccagccctcgctggaccagaccatggccgcggccttcggtgcacctggtataatctcagcctctccgtatgcaggagctggtttccctcccacctttgccattcctcaagctgcaggcctttccgttccgaacgtccacggcgccctggcccccctggccatcccctcggcggcggcggcagctgcggcggcaggtcggatcgccatcccgggcctggcgggggcaggaaattctgtattgctggtcagcaacctcaacccagagagagtcacaccccaaagcctctttattcttttcggcgtctacggtgacgtgcagcgcgtgaagatcctgttcaataagaaggagaacgccctagtgcagatggcggacggcaaccaggcccagctggccatgagccacctgaacgggcacaagctgcacgggaagcccatccgcatcacgctctcgaagcaccagaacgtgcagctgccccgcgagggccaggaggaccagggcctgaccaaggactacggcaactcacccctgcaccgcttcaagaagccgggctccaagaacttccagaacatattcccgccctcggccacgctgcacctctccaacatcccgccctcagtctccgaggaggatctcaaggtcctgttttccagcaatgggggcgtcgtcaaaggattcaagttcttccagaaggaccgcaagatggcactgatccagatgggctccgtggaggaggcggtccaggccctcattgacctgcacaaccacgacctcggggagaaccaccacctgcgggtctccttctccaagtccaccatctaggggcacaggcccccacggccgggccccctggcgacaacttccatcattccagagaaaagccactttaaaaacagctgaagtgaccttagcagaccagagattttatttttttaaagagaaatcagtttacctgtttttaaaaaaattaaatctagttcaccttgctcaccctgcggtgacagggacagctcaggctcttggtgactgtggcagcgggagttcccggccctccacacccggggccagaccctcggggccatgccttggtggggcctgtgtcgggcgtggggcctgcaggtgggcgccccgaccacgacttggcttccttgtgccttaaaaaacctgccttcctgcagccacacacccacccggggtgtcctggggacccaaggggtgggggggtcacaccagagagaggcagggggcctggccggctcctgcaggatcatgcagctggggcgcggcggccgcggctgcgacaccccaaccccagccctctaatcaagtcacgtgattctcccttcaccccgcccccagggccttcccttctgcccccaggcgggctccccgctgctccagctgcggagctggtcgacataatctctgtattatatactttgcagttgcagacgtctgtgcctagcaatatttccagttgaccaaatattctaatcttttttcatttatatgcaaaagaaatagttttaagtaactttttatagcaagatgatacaatggtatgagtgtaatctaaacttccttgtggtattaccttgtatgctgttacttttattttattccttgtaattaagtcacaggcaggacccagtttccagagagcaggcggggccgcccagtgggtcaggcacagggagccccggtcctatcttagagcccctgagcttcagggaaggggcgggcgtgtcgccgcctctggcatcgcctccggttgccttacaccacgccttcacctgcagtcgcctagaaaacttgctctcaaacttcagggttttttcttccttcaaattttggaccaaagtctcatttctgtgttttgcctgcctctgatgctgggacccggaaggcgggcgctcctcctgtcttctctgagcttcagggaaggggcgggcgtgtcgcgcctctggcatcgctccggttgccttacaccacgccttcacctgcagtcgcctagaaaacttgctctcctaggatcccctttccgtaaaagcgtgtaacaagggtgtaaatatttataattttttatacctgttgtgagacccgaggggcggcggcgcggttttttatggtgacacaaatgtatattttgctaacagcaattccaggctcagtattgtgaccgcggagccacaggggaccccacgcacattccgttgccttacccgatggcttgtgacgcggagagaaccgattaaaaccgtttgagaaactcctcccttgtctagccctgtgttcgctgtggacgctgtagaggcaggttggccagtctgtacctggacttcgaataaatcttctgtatcctcgc

SEQ ID NO: 279115 - DNA, 3199 bp, Homo sapiens
agcgacacgaaaaaaacttaggctaggtacgaggctgggtgttgccactccgtcccccgcgggtctgctctgtgtgccatggacggcattgtcccagatatagccgttggtacaaagcggggatctgacgagcttttctctacttgtgtcactaacggaccgtttatcatgagcagcaactcggcttctgcagcaaacggaaatgacagcaagaagttcaaaggtgacagccgaagtgcaggcgtcccctctagagtgatccacatccggaagctccccatcgacgtcacggagggggaagtcatctccctggggctgccctttgggaaggtcaccaacctcctgatgctgaaggggaaaaaccaggccttcatcgagatgaacacggaggaggctgccaacaccatggtgaactactacacctcggtgacccctgtgctgcgcggccagcccatctacatccagttctccaaccacaaggagctgaagaccgacagctctcccaaccaggcgcgggcccaggcggccctgcaggcggtgaactcggtccagtcggggaacctggccttggctgcctcggcggcggccgtggacgcagggatggcgatggccgggcagagccccgtgctcaggatcatcgtggagaacctcttctaccctgtgaccctggatgtgctgcaccagattttctccaagttcggcacagtgttgaagatcatcaccttcaccaagaacaaccagttccaggccctgctgcagtatgcggaccccgtgagcgcccagcacgccaagctgtcgctggacgggcagaacatctacaacgcctgctgcacgctgcgcatcgacttttccaagctcaccagcctcaacgtcaagtacaacaatgacaagagccgtgactacacacgcccagacctgccttccggggacagccagccctcgctggaccagaccatggccgcggccttcggtgcacctggtataatctcagcctctccgtatgcaggagctggtttccctcccacctttgccattcctcaagctgcaggcctttccgttccgaacgtccacggcgccctggcccccctggccatcccctcggcggcggcggcagctgcggcggcaggtcggatcgccatcccgggcctggcgggggcaggaaattctgtattgctggtcagcaacctcaacccagagagagtcacaccccaaagcctctttattcttttcggcgtctacggtgacgtgcagcgcgtgaagatcctgttcaataagaaggagaacgccctagtgcagatggcggacggcaaccaggcccagctggccatgagccacctgaacgggcacaagctgcacgggaagcccatccgcatcacgctctcgaagcaccagaacgtgcagctgccccgcgagggccaggaggaccagggcctgaccaaggactacggcaactcacccctgcaccgcttcaagaagccgggctccaagaacttccagaacatattcccgccctcggccacgctgcacctctccaacatcccgccctcagtctccgaggaggatctcaaggtcctgttttccagcaatgggggcgtcgtcaaaggattcaagttcttccagaaggaccgcaagatggcactgatccagatgggctccgtggaggaggcggtccaggccctcattgacctgcacaaccacgacctcggggagaaccaccacctgcgggtctccttctccaagtccaccatctaggggcacaggcccccacggccgggccccctggcgacaacttccatcattccagagaaaagccactttaaaaacagctgaagtgaccttagcagaccagagattttatttttttaaagagaaatcagtttacctgtttttaaaaaaattaaatctagttcaccttgctcaccctgcggtgacagggacagctcaggctcttggtgactgtggcagcgggagttcccggccctccacacccggggccagaccctcggggccatgccttggtggggcctgtgtcgggcgtggggcctgcaggtgggcgccccgaccacgacttggcttccttgtgccttaaaaaacctgccttcctgcagccacacacccacccggggtgtcctggggacccaaggggtgggggggtcacaccagagagaggcagggggcctggccggctcctgcaggatcatgcagctggggcgcggcggccgcggctgcgacaccccaaccccagccctctaatcaagtcacgtgattctcccttcaccccgcccccagggccttcccttctgcccccaggcgggctccccgctgctccagctgcggagctggtcgacataatctctgtattatatactttgcagttgcagacgtctgtgcctagcaatatttccagttgaccaaatattctaatcttttttcatttatatgcaaaagaaatagttttaagtaactttttatagcaagatgatacaatggtatgagtgtaatctaaacttccttgtaattaagtcacaggcaggacccagtttccagagagcaggcggggccgcccagtgggtcaggcacagggagccccggtcctatcttagagcccctgagcttcagggaaggggcgggcgtgtcgccgcctctggcatcgcctccggttgccttacaccacgccttcacctgcagtcgcctagaaaacttgctctcaaacttcagggttttttcttccttcaaattttggaccaaagtctcatttctgtgttttgcctgcctctgatgctgggacccggaaggcgggcgctcctcctgtcttctctgtgctctttctaccgcccccgcgtcctgtcccgggggctctcctaggatcccctttccgtaaaagcgtgtaacaagggtgtaaatatttataattttttatacctgttgtgagacccgaggggcggcggcgcggttttttatggtgacacaaatgtatattttgctaacagcaattccaggctcagtattgtgaccgcggagccacaggggaccccacgcacattccgttgccttacccgatggcttgtgacgcggagagaaccgattaaaaccgtttgagaaactcctcccttgtctagccctgtgttcgctgtggacgctgtagaggcaggttggccagtctgtacctggacttcgaataaatcttctgtatcctcgc

SEQ ID NO: 279116 - DNA, 2967 bp, Homo sapiens
agcgacacgaaaaaaacttaggctaggtacgaggctgggtgttgccactccgtcccccgcgggtctgctctgtgtgccatggacggcattgtcccagatatagccgttggtacaaagcggggatctgacgagcttttctctacttgtgtcactaacggaccgtttatcatgagcagcaactcggcttctgcagcaaacggaaatgacagcaagaagttcaaaggtgacagccgaagtgcaggcgtcccctctagagtgatccacatccggaagctccccatcgacgtcacggagggggaagtcatctccctggggctgccctttgggaaggtcaccaacctcctgatgctgaaggggaaaaaccaggccttcatcgagatgaacacggaggaggctgccaacaccatggtgaactactacacctcggtgacccctgtgctgcgcggccagcccatctacatccagttctccaaccacaaggagctgaagaccgacagctctcccaaccaggcgcgggcccaggcggccctgcaggcggtgaactcggtccagtcggggaacctggccttggctgcctcggcggcggccgtggacgcagggatggcgatggccgggcagagccccgtgctcaggatcatcgtggagaacctcttctaccctgtgaccctggatgtgctgcaccagattttctccaagttcggcacagtgttgaagatcatcaccttcaccaagaacaaccagttccaggccctgctgcagtatgcggaccccgtgagcgcccagcacgccaagctgtcgctggacgggcagaacatctacaacgcctgctgcacgctgcgcatcgacttttccaagctcaccagcctcaacgtcaagtacaacaatgacaagagccgtgactacacacgcccagacctgccttccggggacagccagccctcgctggaccagaccatggccgcggccttcggtgcacctggtataatctcagcctctccgtatgcaggagctggtttccctcccacctttgccattcctcaagctgcaggcctttccgttccgaacgtccacggcgccctggcccccctggccatcccctcggcggcggcggcagctgcggcggcaggtcggatcgccatcccgggcctggcgggggcaggaaattctgtattgctggtcagcaacctcaacccagagagagtcacaccccaaagcctctttattcttttcggcgtctacggtgacgtgcagcgcgtgaagatcctgttcaataagaaggagaacgccctagtgcagatggcggacggcaaccaggcccagctggccatgagccacctgaacgggcacaagctgcacgggaagcccatccgcatcacgctctcgaagcaccagaacgtgcagctgccccgcgagggccaggaggaccagggcctgaccaaggactacggcaactcacccctgcaccgcttcaagaagccgggctccaagaacttccagaacatattcccgccctcggccacgctgcacctctccaacatcccgccctcagtctccgaggaggatctcaaggtcctgttttccagcaatgggggcgtcgtcaaaggattcaagttcttccagaaggaccgcaagatggcactgatccagatgggctccgtggaggaggcggtccaggccctcattgacctgcacaaccacgacctcggggagaaccaccacctgcgggtctccttctccaagtccaccatctaggggcacaggcccccacggccgggccccctggcgacaacttccatcattccagagaaaagccactttaaaaacagctgaagtgaccttagcagaccagagattttatttttttaaagagaaatcagtttacctgtttttaaaaaaattaaatctagttcaccttgctcaccctgcggtgacagggacagctcaggctcttggtgactgtggcagcgggagttcccggccctccacacccggggccagaccctcggggccatgccttggtggggcctgtgtcgggcgtggggcctgcaggtgggcgccccgaccacgacttggcttccttgtgccttaaaaaacctgccttcctgcagccacacacccacccggggtgtcctggggacccaaggggtgggggggtcacaccagagagaggcagggggcctggccggctcctgcaggatcatgcagctggggcgcggcggccgcggctgcgacaccccaaccccagccctctaatcaagtcacgtgattctcccttcaccccgcccccagggccttcccttctgcccccaggcgggctccccgctgctccagctgcggagctggtcgacataatctctgtattatatactttgcagttgcagacgtctgtgcctagcaatatttccagttgaccaaatattctaatcttttttcatttatatgcaaaagaaatagttttaagtaactttttatagcaagatgatacaatggtatgagtgtaatctaaacttccttgtggtattaccttgtatgctgttacttttattttattccttgtaattaagtcacaggcaggacccagtttccagagagcaggcggggccgcccagtgggtcaggcacagggagccccggtcctatcttagagcccctgagcttcagggaaggggcgggcgtgtcgccgcctctttctaccgcccccgcgtcctgtcccgggggctctcctaggatcccctttccgtaaaagcgtgtaacaagggtgtaaatatttataattttttatacctgttgtgagacccgaggggcggcggcgcggttttttatggtgacacaaatgtatattttgctaacagcaattccaggctcagtattgtgaccgcggagccacaggggaccccacgcacattccgttgccttacccgatggcttgtgacgcggagagaaccgattaaaaccgtttgagaaactc

SEQ ID NO: 279117 - DNA, 3219 bp, Homo sapiens
agcgacacgaaaaaaacttaggctaggtacgaggctgggtgttgccactccgtcccccgcgggtctgctctgtgtgccatggacggcattgtcccagatatagccgttggtacaaagcggggatctgacgagcttttctctacttgtgtcactaacggaccgtttatcatgagcagcaactcggcttctgcagcaaacggaaatgacagcaagaagttcaaaggtgacagccgaagtgcaggcgtcccctctagagtgatccacatccggaagctccccatcgacgtcacggagggggaagtcatctccctggggctgccctttgggaaggtcaccaacctcctgatgctgaaggggaaaaaccaggccttcatcgagatgaacacggaggaggctgccaacaccatggtgaactactacacctcggtgacccctgtgctgcgcggccagcccatctacatccagttctccaaccacaaggagctgaagaccgacagctctcccaaccaggcgcgggcccaggcggccctgcaggcggtgaactcggtccagtcggggaacctggccttggctgcctcggcggcggccgtggacgcagggatggcgatggccgggcagagccccgtgctcaggatcatcgtggagaacctcttctaccctgtgaccctggatgtgctgcaccagattttctccaagttcggcacagtgttgaagatcatcaccttcaccaagaacaaccagttccaggccctgctgcagtatgcggaccccgtgagcgcccagcacgccaagctgtcgctggacgggcagaacatctacaacgcctgctgcacgctgcgcatcgacttttccaagctcaccagcctcaacgtcaagtacaacaatgacaagagccgtgactacacacgcccagacctgccttccggggacagccagccctcgctggaccagaccatggccgcggccttcggtgcacctggtataatctcagcctctccgtatgcaggagctggtttccctcccacctttgccattcctcaagctgcaggcctttccgttccgaacgtccacggcgccctggcccccctggccatcccctcggcggcggcggcagctgcggcggcaggtcggatcgccatcccgggcctggcgggggcaggaaattctgtattgctggtcagcaacctcaacccagagagagtcacaccccaaagcctctttattcttttcggcgtctacggtgacgtgcagcgcgtgaagatcctgttcaataagaaggagaacgccctagtgcagatggcggacggcaaccaggcccagctggccatgagccacctgaacgggcacaagctgcacgggaagcccatccgcatcacgctctcgaagcaccagaacgtgcagctgccccgcgagggccaggaggaccagggcctgaccaaggactacggcaactcacccctgcaccgcttcaagaagccgggctccaagaacttccagaacatattcccgccctcggccacgctgcacctctccaacatcccgccctcagtctccgaggaggatctcaaggtcctgttttccagcaatgggggcgtcgtcaaaggattcaagttcttccagaaggaccgcaagatggcactgatccagatgggctccgtggaggaggcggtccaggccctcattgacctgcacaaccacgacctcggggagaaccaccacctgcgggtctccttctccaagtccaccatctaggggcacaggcccccacggccgggccccctggcgacaacttccatcattccagagaaaagccactttaaaaacagctgaagtgaccttagcagaccagagattttatttttttaaagagaaatcagtttacctgtttttaaaaaaattaaatctagttcaccttgctcaccctgcggtgacagggacagctcaggctcttggtgactgtggcagcgggagttcccgaccctcggggccatgccttggtggggcctgtgtcgggcgtggggcctgcaggtgggcgccccgaccacgacttggcttccttgtgccttaaaaaacctgccttcctgcagccacacacccacccggggtgtcctggggacccaaggggtgggggggtcacaccagagagaggcagggggcctggccggctcctgcaggatcatgcagctggggcgcggcggccgcggctgcgacaccccaaccccagccctctaatcaagtcacgtgattctcccttcaccccgcccccagggccttcccttctgcccccaggcgggctccccgctgctccagctgcggagctggtcgacataatctctgtattatatactttgcagttgcagacgtctgtgcctagcaatatttccagttgaccaaatattctaatcttttttcatttatatgcaaaagaaatagttttaagtaactttttatagcaagatgatacaatggtatgagtgtaatctaaacttccttgtggtattaccttgtatgctgttacttttattttattccttgtaattaagtcacaggcaggacccagtttccagagagcaggcggggccgcccagtgggtcaggcacagggagccccggtcctatcttagagcccctgagcttcagggaaggggcgggcgtgtcgccgcctctggcatcgcctccggttgccttacaccacgccttcacctgcagtcgcctagaaaacttgctctcaaacttcagggttttttcttccttcaaattttggaccaaagtctcatttctgtgttttgcctgcctctgatgctgggacccggaaggcgggcgctcctcctgtcttctctgtgctctttctaccgcccccgcgtcctgtcccgggggctctcctaggatcccctttccgtaaaagcgtgtaacaagggtgtaaatatttataattttttatacctgttgtgagacccgaggggcggcggcgcggttttttatggtgacacaaatgtatattttgctaacagcaattccaggctcagtattgtgaccgcggagccacaggggaccccacgcacattccgttgccttacccgatggcttgtgacgcggagagaaccgattaaaaccgtttgagaaactcctcccttgtctagccctgtgttcgctgtggacgctgtagaggcaggttggccagtctgtacctggacttcgaataaatcttctgtatcctcgc

SEQ ID NO: 279118 - DNA, 4892 bp, Homo sapiens
agcgacacgaaaaaaacttaggctaggtacgaggctgggtgttgccactccgtcccccgcgggtctgctctgtgtgccatggacggcattgtcccagatatagccgttggtacaaagcggggatctgacgagcttttctctacttgtgtcactaacggaccgtttatcatgagcagcaactcggcttctgcagcaaacggaaatgacagcaagaagttcaaaggtgacagccgaagtgcaggcgtcccctctagagtgatccacatccggaagctccccatcgacgtcacggagggggaagtcatctccctggggctgccctttgggaaggtcaccaacctcctgatgctgaaggggaaaaaccaggccttcatcgagatgaacacggaggaggctgccaacaccatggtgaactactacacctcggtgacccctgtgctgcgcggccagcccatctacatccagttctccaaccacaaggagctgaagaccgacagctctcccaaccaggcgcgggcccaggcggccctgcaggcggtgaactcggtccagtcggggaacctggccttggctgcctcggcggcggccgtggacgcagggatggcgatggccgggcagagccccgtgctcaggatcatcgtggagaacctcttctaccctgtgaccctggatgtgctgcaccagattttctccaagttcggcacagtgttgaagatcatcaccttcaccaagaacaaccagttccaggccctgctgcagtatgcggaccccgtgagcgcccagcacgccaagctgtcgctggacgggcagaacatctacaacgcctgctgcacgctgcgcatcgacttttccaagctcaccagcctcaacgtcaagtacaacaatgacaagagccgtgactacacacgcccagacctgccttccggggacagccagccctcgctggaccagaccatggccgcggccttcggtgcacctggtataatctcagcctctccgtatgcaggagctggtttccctcccacctttgccattcctcaagctgcaggtattcaaacgcttggtcttggttccccagcgactgcatgcccacaccaccttcccaggcagctccgcatccacggcggcagcctgggcggactgggcactcgagtgccaggtcaggggcccttcccgggagaggggacgccacgtccacagagcaggcttggccagggcagtggtaggacagggctgtggaggcccacgtgtggacggcgccagccagaagccgctaatcgcacagtctttgtggtctggttcccttcaagcacctccgggcgagcgcgaggaccgccagtggttggagggatgtctctagtagttgaatttgagtggcctggtaagcgcgcggcccgaggctgagcagcatgaccggcggcgggacgtgtgtgcgtggccgtcctcccgcttcccttctgggaccggggcccggccgccccagtgctggccgtggacggagcagcgcgtgccgcccggcggccgcctcgtctgcatggaggcatgggcgcgcatgcgcggtggtcccgggacgggccctgcttgccgagggccccgtgtctgtgctggcggagccggagcttttctgtgctgtgggcggggcgcatgcagatgagcccaggcccggcccggcccgtgctgtgaggagaggcgggcgctggtgcaggagccggcgggtggctgtgcgggggtcgggcgaccccacaggcacccagggtagggccagagccagggccgcctcccgcgcggctcggctcctcggtgcatgaggacggggagcgtcggcctctcccactctgcggtggagtcgggggcgccgccgctcatctcacctcctgcttttccaggcctttccgttccgaacgtccacggcgccctggcccccctggccatcccctcggcggcggcggcagctgcggcggcaggtcggatcgccatcccgggcctggcgggggcaggaaattctgtattgctggtcagcaacctcaacccagaggtacgtgggcttttcctccgcgccgccgttcctcccggaagagcgagcaggggatgttgtgctcgggctcgggtcccggagcagcgccgcccctcgctgtgtctgcgcctctgccctggcagcccctctgctgcagcgctgagaccctccttttccaagatggcttgagttttcctcttttcctgaattcacatcttggttcgcgttttctcttgcatgatacgcagaatgaattattttttggttacccaaaggcaatctaaaaattacttggagctgagcagggcgcgcagttcagagccccagcaggccgccctgctggtcagcgggacacacagggttagcgcggcggggtgtgggcagcccctgtggctcgagagcctgtcacttaactggtggatccgttatttcccagaatggttaaattcccctcggggagagcttgggtgaaacaagaggcccaaaatatgtaactcttgatggatgggatcctcctggaatcagcatttcaggctgttctgtttcccggcaactcctgtgacttcctcaaggcggtgcccagcctggccctccctcgcgggggcccaggacgcactccctgcctgtgcctcttaccacgagccgggtgctgtccctccagctcctcctgagcgaggccgtgcactaacagactcgatctcccttcacgcctgtaatcgtccttagagactgacttgtgccacagctgcgggagacagcgctgctgcagggcttggctgaggtggccgcgagcggagctgcacgcgcgctcctggggggcgtggttgggatcggcttctgggagcccctccagcagcgctgtctctgccggcatgtgagtgaaggtgcttctcttaccgtgtgcccgtcgaggtaaacctgtaactggaatgtgtgtggagtgtgactgatagaacactacctgattcttatgtatttactgacctgtgtttttttgctactttttttcttttctccccttcccctttccctattttttttcttgccctgatccggaatttctttgccaactgactgcacggtacttctgcttcctgttgttgcttgaaacaaaacaaaaacataaacaaataaaaaacaaaaattccccctcaaaccctgctctccggaaaccaacctgcccttgaatattaacatcctgacaacttcatcatccatcaaccactgcacgcctgcggggactgtcttcctcgtgtggacgattggcaactcgccccccttgacctctccctctcccctgtccctccgctgccttgctctgctgtctctaaagagagtcacaccccaaagcctctttattcttttcggcgtctacggtgacgtgcagcgcgtgaagatcctgttcaataagaaggagaacgccctagtgcagatggcggacggcaaccaggcccagctggccatgagccacctgaacgggcacaagctgcacgggaagcccatccgcatcacgctctcgaagcaccagaacgtgcagctgccccgcgagggccaggaggaccagggcctgaccaaggactacggcaactcacccctgcaccgcttcaagaagccgggctccaagaacttccagaacatattcccgccctcggcccccctggcgacaacttccatcattccagagaaaagccactttaaaaacagctgaagtgaccttagcagaccagagattttatttttttaaagagaaatcagtttacctgtttttaaaaaaattaaatctagttcaccttgctcaccctgcggtgacagggacagctcaggctcctgcaggatcatgcagctggggcgcggcggccgcggctgcgacaccccaaccccagccctctaatcaagtcacgtgattctcccttcaccccgcccccagggccttcccttctgcccccaggcgggctccccgctgctccagctgcggagctggtcgacataatctctgtattatatactttgcagttgcagacgtctgtgcctagcaatatttccagttgaccaaatattctaatcttttttcatttatatgcaaaagaaatagttttaagtaactttttatagcaagatgatacaatggtatgagtgtaatctaaacttccttgtggtattaccttgtatgctgttacttttattttattccttgtaattaagtcacaggcaggacccagtttccagagagcaggcggggccgcccagtgggtcaggcacagggagccccggtcctatcttagagcccctgagcttcagggaaggggcgggcgtgtcgccgcctctggcatcgcctccggttgccttacaccacgccttcacctgcagtcgcctagaaaacttgctctcaaacttcagggttttttcttccttcaaattttggaccaaagtctcatttctgtgttttgcctgcctctgatgctgggacccggaaggcgggcgctcctcctgtcttctctgtgctctttctaccgcccccgcgtcctgtcccgggggctctcctaggatcccctttccgtaaaagcgtgtaacaagggtgtaaatatttataattttttatacctgttgtgagacccgaggggcggcggcgcggttttttatggtgacacaaatgtatattttgctaacagcaattccaggctcagtattgtgaccgcggagccacaggggaccccacgcacattccgttgccttacccgatggcttgtgacgcggagagaaccgattaaaaccgtttgagaaactcctcccttgtctagccctgtgttcgctgtggacgctgtagaggcaggttggccagtctgtacctggacttcgaataaatcttctgtatcctcgc

SEQ ID NO: 279119 - DNA, 3943 bp, Homo sapiens
agcgacacgaaaaaaacttaggctaggtacgaggctgggtgttgccactccgtcccccgcgggtctgctctgtgtgccatggacggcattgtcccagatatagccgttggtacaaagcggggatctgacgagcttttctctacttgtgtcactaacggaccgtttatcatgagcagcaactcggcttctgcagcaaacggaaatgacagcaagaagttcaaaggtgacagccgaagtgcaggcgtcccctctagagtgatccacatccggaagctccccatcgacgtcacggagggggaagtcatctccctggggctgccctttgggaaggtcaccaacctcctgatgctgaaggggaaaaaccaggccttcatcgagatgaacacggaggaggctgccaacaccatggtgaactactacacctcggtgacccctgtgctgcgcggccagcccatctacatccagttctccaaccacaaggagctgaagaccgacagctctcccaaccaggcgcgggcccaggcggccctgcaggcggtgaactcggtccagtcggggaacctggccttggctgcctcggcggcggccgtggacgcagggatggcgatggccgggcagagccccgtgctcaggatcatcgtggagaacctcttctaccctgtgaccctggatgtgctgcaccagattttctccaagttcggcacagtgttgaagatcatcaccttcaccaagaacaaccagttccaggccctgctgcagtatgcggaccccgtgagcgcccagcacgccaagctgtcgctggacgggcagaacatctacaacgcctgctgcacgctgcgcatcgacttttccaagctcaccagcctcaacgtcaagtacaacaatgacaagagccgtgactacacacgcccagacctgccttccggggacagccagccctcgctggaccagaccatggccgcggccttcggtgcacctggtataatctcagcctctccgtatgcaggagctggtttccctcccacctttgccattcctcaagctgcaggtattcaaacgcttggtcttggttccccagcgactgcatgcccacaccaccttcccaggcagctccgcatccacggcggcagcctgggcggactgggcactcgagtgccaggtcaggggcccttcccgggagaggggacgccacgtccacagagcaggcttggccagggcagtggtaggacagggctgtggaggcccacgtgtggacggcgccagccagaagccgctaatcgcacagtctttgtggtctggttcccttcaagcacctccgggcgagcgcgaggaccgccagtggttggagggatgtctctagtagttgaatttgagtggcctggtaagcgcgcggcccgaggctgagcagcatgaccggcggcgggacgtgtgtgcgtggccgtcctcccgcttcccttctgggaccggggcccggccgccccagtgctggccgtggacggagcagcgcgtgccgcccggcggccgcctcgtctgcatggaggcatgggcgcgcatgcgcggtggtcccgggacgggccctgcttgccgagggccccgtgtctgtgctggcggagccggagcttttctgtgctgtgggcggggcgcatgcagatgagcccaggcccggcccggcccgtgctgtgaggagaggcgggcgctggtgcaggagccggcgggtggctgtgcgggggtcgggcgaccccacaggcacccagggtagggccagagccagggccgcctcccgcgcggctcggctcctcggtgcatgaggacggggagcgtcggcctctcccactctgcggtggagtcgggggcgccgccgctcatctcacctcctgcttttccaggcctttccgttccgaacgtccacggcgccctggcccccctggccatcccctcggcggcggcggcagctgcggcggcaggtcggatcgccatcccgggcctggcgggggcaggaaattctgtattgctggtcagcaacctcaacccagaggtacgtgggcttttcctccgcgccgccgttcctcccggaagagcgagcaggggatgttgtgctcgggctcgggtcccggagcagcgccgcccctcgctgtgtctgcgcctctgccctggcagcccctctgctgcagcgctgagaccctccttttccaagatggcttgagttttcctcttttcctgaattcacatcttggttcgcgttttctcttgcatgatacgcagaatgaattattttttggttacccaaaggcaatctaaaaattacttggagctgagcagggcgcgcagttcagagccccagcaggccgccctgctggtcagcgggacacacagggttagcgcggcggggtgtgggcagcccctgtggctcgagagcctgtcacttaactggtggatccgttatttcccagaatggttaaattcccctcggggagagcttgggtgaaacaagaggcccaaaatatgtaactcttgatggatgggatcctcctggaatcagcatttcaggctgttctgtttcccggcaactcctgtgacttcctcaaggcggtgcccagcctggccctccctcgcgggggcccaggacgcactccctgcctgtgcctcttaccacgagccgggtgctgtccctccagctcctcctgagcgaggccgtgcactaacagactcgatctcccttcacgcctgtaatcgtccttagagactgacttgtgccacagctgcgggagacagcgctgctgcagggcttggctgaggtggccgcgagcggagctgcacgcgcgctcctggggggcgtggttgggatcggcttctgggagcccctccagcagcgctgtctctgccggcaggctcctgcaggatcatgcagctggggcgcggcggccgcggctgcgacaccccaaccccagccctctaatcaagtcacgtgattctcccttcaccccgcccccagggccttcccttctgcccccaggcgggctccccgctgctccagctgcggagctggtcgacataatctctgtattatatactttgcagttgcagacgtctgtgcctagcaatatttccagttgaccaaatattctaatcttttttcatttatatgcaaaagaaatagttttaagtaactttttatagcaagatgatacaatggtatgagtgtaatctaaacttccttgtggtattaccttgtatgctgttacttttattttattccttgtaattaagtcacaggcaggacccagtttccagagagcaggcggggccgcccagtgggtcaggcacagggagccccggtcctatcttagagcccctgagcttcagggaaggggcgggcgtgtcgccgcctctggcatcgcctccggttgccttacaccacgccttcacctgcagtcgcctagaaaacttgctctcaaacttcagggttttttcttccttcaaattttggaccaaagtctcatttctgtgttttgcctgcctctgatgctgggacccggaaggcgggcgctcctcctgtcttctctgtgctctttctaccgcccccgcgtcctgtcccgggggctctcctaggatcccctttccgtaaaagcgtgtaacaagggtgtaaatatttataattttttatacctgttgtgagacccgaggggcggcggcgcggttttttatggtgacacaaatgtatattttgctaacagcaattccaggctcagtattgtgaccgcggagccacaggggaccccacgcacattccgttgccttacccgatggcttgtgacgcggagagaaccgattaaaaccgtttgagaaactcctcccttgtctagccctgtgttcgctgtggacgctgtagaggcaggttggccagtctgtacctggacttcgaataaatcttctgtatcctcgc

SEQ ID NO: 279120 - DNA, 1909 bp, Homo sapiens
agcgacacgaaaaaaacttaggctaggtacgaggctgggtgttgccactccgtcccccgcgggtctgctctgtgtgccatggacggcattgtcccagatatagccgttggtacaaagcggggatctgacgagcttttctctacttgtgtcactaacggaccgtttatcatgagcagcaactcggcttctgcagcaaacggaaatgacagcaagaagttcaaaggtgacagccgaagtgcaggcgtcccctctagagtgatccacatccggaagctccccatcgacgtcacggagggggaagtcatctccctggggctgccctttgggaaggtcaccaacctcctgatgctgaaggggaaaaaccagggcctgaccaaggactacggcaactcacccctgcaccgcttcaagaagccgggctccaagaacttccagaacatattcccgccctcggccacgctgcacctctccaacatcccgccctcagtctccgaggaggatctcaaggtcctgttttccagcaatgggggcgtcgtcaaaggattcaagttcttccagaaggaccgcaagatggcactgatccagatgggctccgtggaggaggcggtccaggccctcattgacctgcacaaccacgacctcggggagaaccaccacctgcgggtctccttctccaagtccaccatctaggggcctgtgtcgggcgtggggcctgcaggtgggcgccccgaccacgacttggcttccttgtgccttaaaaaacctgccttcctgcagccacacacccacccggggtgtcctggggacccaaggggtgggggggtcacaccagagagaggcagggggcctggccggctcctgcaggatcatgcagctggggcgcggcggccgcggctgcgacaccccaaccccagccctctaatcaagtcacgtgattctcccttcaccccgcccccagggccttcccttctgcccccaggcgggctccccgctgctccagctgcggagctggtcgacataatctctgtattatatactttgcagttgcagacgtctgtgcctagcaatatttccagttgaccaaatattctaatcttttttcatttatatgcaaaagaaatagttttaagtaactttttatagcaagatgatacaatggtatgagtgtaatctaaacttccttgtggtattaccttgtatgctgttacttttattttattccttgtaattaagtcacaggcaggacccagtttccagagagcaggcggggccgcccagtgggtcaggcacagggagccccggtcctatcttagagcccctgagcttcagggaaggggcgggcgtgtcgccgcctctggcatcgcctccggttgccttacaccacgccttcacctgcagtcgcctagaaaacttgctctcaaacttcagggttttttcttccttcaaattttggaccaaagtctcatttctgtgttttgcctgcctctgatgctgggacccggaaggcgggcgctcctcctgtcttctctgtgctctttctaccgcccccgcgtcctgtcccgggggctctcctaggatcccctttccgtaaaagcgtgtaacaagggtgtaaatatttataattttttatacctgttgtgagacccgaggggcggcggcgcggttttttatggtgacacaaatgtatattttgctaacagcaattccaggctcagtattgtgaccgcggagccacaggggaccccacgcacattccgttgccttacccgatggcttgtgacgcggagagaaccgattaaaaccgtttgagaaactcctcccttgtctagccctgtgttcgctgtggacgctgtagaggcaggttggccagtctgtacctggacttcgaataaatcttctgtatcctcgc

SEQ ID NO: 279121 - DNA, 2659 bp, Homo sapiens
agcgacacgaaaaaaacttaggctaggtacgaggctgggtgttgccactccgtcccccgcgggtctgctctgtgtgccatggacggcattgtcccagatatagccgttggtacaaagcggggatctgacgagcttttctctacttgtgtcactaacggaccgtttatcatgagcagcaactcggcttctgcagcaaacggaaatgacagcaagaagttcaaaggtgacagccgaagtgcaggcgtcccctctagagtgatccacatccggaagctccccatcgacgtcacggagggggaagtcatctccctggggctgccctttgggaaggtcaccaacctcctgatgctgaaggggaaaaaccaggccttcatcgagatgaacacggaggaggctgccaacaccatggtgaactactacacctcggtgacccctgtgctgcgcggccagcccatctacatccagttctccaaccacaaggagctgaagaccgacagctctcccaaccaggcgcgggcccaggcggccctgcaggcggtgaactcggtccagtcggggaacctggccttggctgcctcggcggcggccgtggacgcagggatggcgatggccgggcagagccccgtgctcaggatcatcgtggagaacctcttctaccctgtgaccctggatgtgctgcaccagattttctccaagttcggcacagtgttgaagatcatcaccttcaccaagaacaaccagttccaggccctgctgcagtatgcggaccccgtgagcgcccagcacgccaagctgtcgctggacgggcagaacatctacaacgcctgctgcacgctgcgcatcgacttttccaagctcaccagcctcaacgtcaagtacaacaatgacaagagccgtgactacacacgcccagacctgccttccggggacagccagccctcgctggaccagaccatggccgcggccttcggtgcacctggtataatctcagcctctccgtatgcaggagctggtttccctcccacctttgccattcctcaagctgcaggcctttccgttccgaacgtccacggcgccctggcccccctggccatcccctcggcggcggcggcagctgcggcggcaggtcggatcgccatcccgggcctggcgggggcaggaaattctgtattgctggtcagcaacctcaacccagagagagtcacaccccaaagcctctttattcttttcggcgtctacggtgacgtgcagcgcgtgaagatcctgttcaataagaaggagaacgccctagtgcagatggcggacggcaaccaggcccagctggccatgagccacctgaacgggcacaagctgcacgggaagcccatccgcatcacgctctcgaagcaccagaacgtgcagctgccccgcgagggccaggaggaccagggcctgaccaaggactacggcaactcacccctgcaccgcttcaagaagccgggctccaagaacttccagaacatattcccgccctcggccacgctgcacctctccaacatcccgccctcagtctccgaggaggatctcaaggtcctgttttccagcaatgggggcgtcgtcaaaggattcaagttcttccagaaggaccgcaagatggcactgatccagatgggctccgtggaggaggcggtccaggccctcattgacctgcacaaccacgacctcggggagaaccaccacctgcgggtctccttctccaagtccaccatctaggggcacaggcccccacggccgggccccctggcgacaacttccatcattccagagaaaagccactttaaaaacagctgaagtgaccttagcagaccagagattttatttttttaaagagaaatcagtttacctgtttttaaaaaaattaaatctagttcaccttgctcaccctgcggtgacagggacagctcaggctcttggtgactgtggcagcgggagttcccggccctccacacccggggccagaccctcggggccatgccttggtggggcctgtgtcgggcgtggggcctgcaggtgggcgcctagaagcttgcattggcattcataagtttcgtgtaagtaaaccatgcagattacatgaatcagagacaaaaaaatgacttagtaaaaaaaaaaaaaaaaaaaaaaaaagagagagaggaattagagagagggaagaggagagaaaaaaaggaaaaaaatatgagtgaaaatatgatggagtaatagagggagcaaaaagaaaaaagagaaaaattataatgtgaagtgaaagagtggtgaagaaatattgagagagggataatctcatatattgtgagagaagagaattatataaataggaaaaaaaaagaaacggttacacacgagcaggagtatcaacagaaaccaccgggcgaaaagacaataatgaggaacgctccaaacaacataagcccatgaaacaacagtcaacacatacagaccaacatcacaagtacccatgaaagatcaaaatatacgataaaatacaatcaaaaacacaaaaaatgtagcctaacgacaaaagataaatacatatcaacaccccaaccgaaaaaagaatcattaaacatacaactaaaaacgagaaatcaaacataaagaacactacacctaaacacac

SEQ ID NO: 279122 - DNA, 3853 bp, Homo sapiens
agcgacacgaaaaaaacttaggctaggtacgaggctgggtgttgccactccgtcccccgcgggtctgctctgtgtgccatggacggcattgtcccagatatagccgttggtacaaagcggggatctgacgagcttttctctacttgtgtcactaacggaccgtttatcatgagcagcaactcggcttctgcagcaaacggaaatgacagcaagaagttcaaaggtgacagccgaagtgcaggcgtcccctctagagtgatccacatccggaagctccccatcgacgtcacggagggggaagtcatctccctggggctgccctttgggaaggtcaccaacctcctgatgctgaaggggaaaaaccaggccttcatcgagatgaacacggaggaggctgccaacaccatggtgaactactacacctcggtgacccctgtgctgcgcggccagcccatctacatccagttctccaaccacaaggagctgaagaccgacagctctcccaaccaggcgcgggcccaggcggccctgcaggcggtgaactcggtccagtcggggaacctggccttggctgcctcggcggcggccgtggacgcagggatggcgatggccgggcagagccccgtgctcaggatcatcgtggagaacctcttctaccctgtgaccctggatgtgctgcaccagattttctccaagttcggcacagtgttgaagatcatcaccttcaccaagaacaaccagttccaggccctgctgcagtatgcggaccccgtgagcgcccagcacgccaagctgtcgctggacgggcagaacatctacaacgcctgctgcacgctgcgcatcgacttttccaagctcaccagcctcaacgtcaagtacaacaatgacaagagccgtgactacacacgcccagacctgccttccggggacagccagccctcgctggaccagaccatggccgcggccttcggtgcacctggtataatctcagcctctccgtatgcaggagctggtttccctcccacctttgccattcctcaagctgcaggtattcaaacgcttggtcttggttccccagcgactgcatgcccacaccaccttcccaggcagctccgcatccacggcggcagcctgggcggactgggcactcgagtgccaggtcaggggcccttcccgggagaggggacgccacgtccacagagcaggcttggccagggcagtggtaggacagggctgtggaggcccacgtgtggacggcgccagccagaagccgctaatcgcacagtctttgtggtctggttcccttcaagcacctccgggcgagcgcgaggaccgccagtggttggagggatgtctctagtagttgaatttgagtggcctggtaagcgcgcggcccgaggctgagcagcatgaccggcggcgggacgtgtgtgcgtggccgtcctcccgcttcccttctgggaccggggcccggccgccccagtgctggccgtggacggagcagcgcgtgccgcccggcggccgcctcgtctgcatggaggcatgggcgcgcatgcgcggtggtcccgggacgggccctgcttgccgagggccccgtgtctgtgctggcggagccggagcttttctgtgctgtgggcggggcgcatgcagatgagcccaggcccggcccggcccgtgctgtgaggagaggcgggcgctggtgcaggagccggcgggtggctgtgcgggggtcgggcgaccccacaggcacccagggtagggccagagccagggccgcctcccgcgcggctcggctcctcggtgcatgaggacggggagcgtcggcctctcccactctgcggtggagtcgggggcgccgccgctcatctcacctcctgcttttccaggcctttccgttccgaacgtccacggcgccctggcccccctggccatcccctcggcggcggcggcagctgcggcggcaggtcggatcgccatcccgggcctggcgggggcaggaaattctgtattgctggtcagcaacctcaacccagaggtacgtgggcttttcctccgcgccgccgttcctcccggaagagcgagcaggggatgttgtgctcgggctcgggtcccggagcagcgccgcccctcgctgtgtctgcgcctctgccctggcagcccctctgctgcagcgctgagaccctccttttccaagatggcttgagttttcctcttttcctgaattcacatcttggttcgcgttttctcttgcatgatacgcagaatgaattattttttggttacccaaaggcaatctaaaaattacttggagctgagcagggcgcgcagttcagagccccagcaggccgccctgctggtcagcgggacacacagggttagcgcggcggggtgtgggcagcccctgtggctcgagagcctgtcacttaactggtggatccgttatttcccagaatggttaaattcccctcggggagagcttgggtgaaacaagaggcccaaaatatgtaactcttgatggatgggatcctcctggaatcagcatttcaggctgttctgtttcccggcaactcctgtgacttcctcaaggcggtgcccagcctggccctccctcgcgggggcccaggacgcactccctgcctgtgcctcttaccacgagccgggtgctgtccctccagctcctcctgagcgaggccgtgcactaacagactcgatctcccttcacgcctgtaatcgtccttagagactgacttgtgccacagctgcgggagacagcgctgctgcagggcttggctgaggtggccgcgagcggagctgcacgcgcgctcctggggggcgtggttgggatcggcttctgggagcccctccagcagcgctgtctctgccggcatgtgagtgaaggtgcttctcttaccgtgtgcccgtcgaggtaaacctgtaactggaatgtgtgtggagtgtgactgatagaacactacctgattcttatgtatttactgacctgtgtttttttgctactttttttcttttctccccttcccctttccctattttttttcttgccctgatccggaatttctttgccaactgactgcacggtacttctgcttcctgttgttgcttgaaacaaaacaaaaacataaacaaataaaaaacaaaaattccccctcaaaccctgctctccggaaaccaacctgcccttgaatattaacatcctgacaacttcatcatccatcaaccactgcacgcctgcggggactgtcttcctcgtgtggacgattggcaactcgccccccttgacctctccctctcccctgtccctccgctgccttgctctgctgtctctaaagagagtcacaccccaaagcctctttattcttttcggcgtctacggtgacgtgcagcgcgtgaagatcctgttcaataagaaggagaacgccctagtgcagatggcggacggcaaccaggcccagctggccatgagccacctgaacgggcacaagctgcacgggaagcccatccgcatcacgctctcgaagcaccagaacgtgcagctgccccgcgagggccaggaggaccagggcctgaccaaggactacggcaactcacccctgcaccgcttcaagaagccgggctccaagaacttccagaacatattcccgccctcggccacgctgcacctctccaacatcccgccctcagtctccgaggaggatctcaaggtcctgttttccagcaatgggggcgtcgtcaaaggattcaagttcttccagaaggaccgcaagatggcactgatccagatgggctccgtggaggaggcggtcaagccctcattgaaccgatagcttaaggatct

SEQ ID NO: 279123 - DNA, 2863 bp, Homo sapiens
agcgacacgaaaaaaacttaggctaggtacgaggctgggtgttgccactccgtcccccgcgggtctgctctgtgtgccatggacggcattgtcccagatatagccgttggtacaaagcggggatctgacgagcttttctctacttgtgtcactaacggaccgtttatcatgagcagcaactcggcttctgcagcaaacggaaatgacagcaagaagttcaaaggtgacagccgaagtgcaggcgtcccctctagagtgatccacatccggaagctccccatcgacgtcacggagggggaagtcatctccctggggctgccctttgggaaggtcaccaacctcctgatgctgaaggggaaaaaccaggccttcatcgagatgaacacggaggaggctgccaacaccatggtgaactactacacctcggtgacccctgtgctgcgcggccagcccatctacatccagttctccaaccacaaggagctgaagaccgacagctctcccaaccaggcgcgggcccaggcggccctgcaggcggtgaactcggtccagtcggggaacctggccttggctgcctcggcggcggccgtggacgcagggatggcgatggccgggcagagccccgtgctcaggatcatcgtggagaacctcttctaccctgtgaccctggatgtgctgcaccagattttctccaagttcggcacagtgttgaagatcatcaccttcaccaagaacaaccagttccaggccctgctgcagtatgcggaccccgtgagcgcccagcacgccaagctgtcgctggacgggcagaacatctacaacgcctgctgcacgctgcgcatcgacttttccaagctcaccagcctcaacgtcaagtacaacaatgacaagagccgtgactacacacgcccagacctgccttccggggacagccagccctcgctggaccagaccatggccgcggccttcggtgcacctggtataatctcagcctctccgtatgcaggagctggtttccctcccacctttgccattcctcaagctgcaggtattcaaacgcttggtcttggttccccagcgactgcatgcccacaccaccttcccaggcagctccgcatccacggcggcagcctgggcggactgggcactcgagtgccaggtcaggggcccttcccgggagaggggacgccacgtccacagagcaggcttggccagggcagtggtaggacagggctgtggaggcccacgtgtggacggcgccagccagaagccgctaatcgcacagtctttgtggtctggttcccttcaagcacctccgggcgagcgcgaggaccgccagtggttggagggatgtctctagtagttgaatttgagtggcctggtaagcgcgcggcccgaggctgagcagcatgaccggcggcgggacgtgtgtgcgtggccgtcctcccgcttcccttctgggaccggggcccggccgccccagtgctggccgtggacggagcagcgcgtgccgcccggcggccgcctcgtctgcatggaggcatgggcgcgcatgcgcggtggtcccgggacgggccctgcttgccgagggccccgtgtctgtgctggcggagccggagcttttctgtgctgtgggcggggcgcatgcagatgagcccaggcccggcccggcccgtgctgtgaggagaggcgggcgctggtgcaggagccggcgggtggctgtgcgggggtcgggcgaccccacaggcacccagggtagggccagagccagggccgcctcccgcgcggctcggctcctcggtgcatgaggacggggagcgtcggcctctcccactctgcggtggagtcgggggcgccgccgctcatctcacctcctgcttttccaggcctttccgttccgaacgtccacggcgccctggcccccctggccatcccctcggcggcggcggcagctgcggcggcaggtcggatcgccatcccgggcctggcgggggcaggaaattctgtattgctggtcagcaacctcaacccagaggtacgtgggcttttcctccgcgccgccgttcctcccggaagagcgagcaggggatgttgtgctcgggctcgggtcccggagcagcgccgcccctcgctgtgtctgcgcctctgccctggcagcccctctgctgcagcgctgagaccctccttttccaagatggcttgagttttcctcttttcctgaattcacatcttggttcgcgttttctcttgcatgatacgcagaatgaattattttttggttacccaaaggcaatctaaaaattacttggagctgagcagggcgcgcagttcagagccccagcaggccgccctgctggtcagcgggacacacagggttagcgcggcggggtgtgggcagcccctgtggctcgagagctgacacaaatgtatattttgctaacagcaattccaggctcagtattgtgaccgcggagccacaggggaccccacgcacattccgttgccttacccgatggcttgtgacgcggagagaaccgattaaaaccgtttgagaaactcctcccttgtctagccctgtgttcgctgtggacgctgtagaggcaggttggccagtctgtacctggacttcgaataaatcttctgtatcctcgctccgttccgccttcgttgctggcttcctctttctgtgccgcgggcggccccgactcccgcccgggtgtccgccgaagcgccaggtggggccacgggcggggtgggcccggccctgagagtgggggtccctgcgtggggcgtgcgggccagagcgaatgaccaagagccggacctcggtttctgccgctttattgagcatccgcgcggccgc

SEQ ID NO: 279124 - DNA, 879 bp, Homo sapiens
agcgacacgaaaaaaacttaggctaggtacgaggctgggtgttgccactccgtcccccgcgggtctgctctgtgtgccatggacggcattgtcccagatatagccgttggtacaaagcggggatctgacgagcttttctctacttgtgtcactaacggaccgtttatcatgagcagcaactcggcttctgcagcaaacggaaatgacagcaagaagttcaaaggtgacagccgaagtgcaggcgtcccctctagagtgatccacatccggaagctccccatcgacgtcacggagggggaagtcatctccctggggctgccctttgggaaggtcaccaacctcctgatgctgaaggggaaaaaccaggccttcatcgagatgaacacggaggaggctgccaacaccatggtgaactactacacctcggtgacccctgtgctgcgcggccagcccatctacatccagttctccaaccacaaggagctgaagaccgacagctctcccaaccaggcgcgggcccaggcggccctgcaggcggtgaactcggtccagtcggggaacctggccttggctgcctcggcggcggccgtggacgcagggatggcgatggccgggcagagccccgtgctcaggatcatcgtggagaacctcttctaccctgtgaccctggatgtgctgcaccagattttctccaagttcggcacagtgttgaagatcatcaccttcaccaagaacaaccagttccaggccctgcgccgcgaggcagcaaggcaggttccccgactgaccgagttcacgtctgcaggcctgctgtgccgcgcctggttgggagagctgtcggtcttcagctccttgtggttagagaactggatgtagatg

SEQ ID NO: 279125 - DNA, 864 bp, Homo sapiens
agcgacacgaaaaaaacttaggctaggtacgaggctgggtgttgccactccgtcccccgcgggtctgctctgtgtgccatggacggcattgtcccagatatagccgttggtacaaagcggggatctgacgagcttttctctacttgtgtcactaacggaccgtttatcatgagcagcaactcggcttctgcagcaaacggaaatgacagcaagaagttcaaaggtgacagccgaagtgcaggcgtcccctctagagtgatccacatccggaagctccccatcgacgtcacggagggggaagtcatctccctggggctgccctttgggaaggtcaccaacctcctgatgctgaaggggaaaaaccaggccttcatcgagatgaacacggaggaggctgccaacaccatggtgaactactacacctcggtgacccctgtgctgcgcggccagcccatctacatccagttctcctcctgtcttctctgtgctctttctaccgcccccgcgtcctgtcccgggggctctcctaggatcccctttccgtaaaagcgtgtaacaagggtgtaaatatttataattttttatacctgttgtgagacccgaggggcggcggcgcggttttttatggtgacacaaatgtatattttgctaacagcaattccaggctcagtattgtgaccgcggagccacaggggaccccacgcacattccgttgccttacccgatggcttgtgacgcggagagaaccgattaaaaccgtttgagaaactcctcccttgtctagccctgtgttcgctgtggacgctgtagaggcaggttggccagtctgtacctggacttcgaataaatcttctgtatcctcgc

SEQ ID NO: 279126 - DNA, 526 bp, Homo sapiens
ggcggccgccccgagggtctgtcctccgccccggggccggaggggcctctccagggacccccgcgggcgccgtcatggggaggggccttcccggctctcgggccggggcagcctttccgggcggctttgctgggcgggcttcccttgggagaggtgggagccccctccagaaaggccgtgtcccgccgagcgcttcctgcgcgaggccctccctgggaataggaagcgggagaggctggagatgtttcgcattctttccgttttcctgagaagtttttcttgggttcagtcacttttaaaagtctgttaaacgtggtccgtgcagtctgtggtgtcagaagaggcgcagccctagagtgggtctggaccccttagcatgcgtgcgggcaggtgggtcctgcagacggcgagacgagggctccccgctctcggacccagcaccgcgggctcgggggccgcgcactcgcctcccggagtgaggcaggaggcccggaggctgcccttccgacggacgctccgagtcact

SEQ ID NO: 279127 - DNA, 3475 bp, Homo sapiens
ggcgtctccgccattttgtgagtctataactcggagccgttgggtcggttcctgctattccggcgcctccactccgtcccccgcgggtctgctctgtgtgccatggacggcattgtcccagatatagccgttggtacaaagcggggatctgacgagcttttctctacttgtgtcactaacggaccgtttatcatgagcagcaactcggcttctgcagcaaacggaaatgacagcaagaagttcaaaggtgacagccgaagtgcaggcgtcccctctagagtgatccacatccggaagctccccatcgacgtcacggagggggaagtcatctccctggggctgccctttgggaaggtcaccaacctcctgatgctgaaggggaaaaaccaggccttcatcgagatgaacacggaggaggctgccaacaccatggtgaactactacacctcggtgacccctgtgctgcgcggccagcccatctacatccagttctccaaccacaaggagctgaagaccgacagctctcccaaccaggcgcgggcccaggcggccctgcaggcggtgaactcggtccagtcggggaacctggccttggctgcctcggcggcggccgtggacgcagggatggcgatggccgggcagagccccgtgctcaggatcatcgtggagaacctcttctaccctgtgaccctggatgtgctgcaccagattttctccaagttcggcacagtgttgaagatcatcaccttcaccaagaacaaccagttccaggccctgctgcagtatgcggaccccgtgagcgcccagcacgccaagctgtcgctggacgggcagaacatctacaacgcctgctgcacgctgcgcatcgacttttccaagctcaccagcctcaacgtcaagtacaacaatgacaagagccgtgactacacacgcccagacctgccttccggggacagccagccctcgctggaccagaccatggccgcggccttcggtgcacctggtataatctcagcctctccgtatgcaggagctggtttccctcccacctttgccattcctcaagctgcaggcctttccgttccgaacgtccacggcgccctggcccccctggccatcccctcggcggcggcggcagctgcggcggcaggtcggatcgccatcccgggcctggcgggggcaggaaattctgtattgctggtcagcaacctcaacccagagagagtcacaccccaaagcctctttattcttttcggcgtctacggtgacgtgcagcgcgtgaagatcctgttcaataagaaggagaacgccctagtgcagatggcggacggcaaccaggcccagctggccatgagccacctgaacgggcacaagctgcacgggaagcccatccgcatcacgctctcgaagcaccagaacgtgcagctgccccgcgagggccaggaggaccagggcctgaccaaggactacggcaactcacccctgcaccgcttcaagaagccgggctccaagaacttccagaacatattcccgccctcggccacgctgcacctctccaacatcccgccctcagtctccgaggaggatctcaaggtcctgttttccagcaatgggggcgtcgtcaaaggattcaagttcttccagaaggaccgcaagatggcactgatccagatgggctccgtggaggaggcggtccaggccctcattgacctgcacaaccacgacctcggggagaaccaccacctgcgggtctccttctccaagtccaccatctaggggcacaggcccccacggccgggccccctggcgacaacttccatcattccagagaaaagccactttaaaaacagctgaagtgaccttagcagaccagagattttatttttttaaagagaaatcagtttacctgtttttaaaaaaattaaatctagttcaccttgctcaccctgcggtgacagggacagctcaggctcttggtgactgtggcagcgggagttcccggccctccacacccggggccagaccctcggggccatgccttggtggggcctgtgtcgggcgtggggcctgcaggtgggcgccccgaccacgacttggcttccttgtgccttaaaaaacctgccttcctgcagccacacacccacccggggtgtcctggggacccaaggggtgggggggtcacaccagagagaggcagggggcctggccggctcctgcaggatcatgcagctggggcgcggcggccgcggctgcgacaccccaaccccagccctctaatcaagtcacgtgattctcccttcaccccgcccccagggccttcccttctgcccccaggcgggctccccgctgctccagctgcggagctggtcgacataatctctgtattatatactttgcagttgcagacgtctgtgcctagcaatatttccagttgaccaaatattctaatcttttttcatttatatgcaaaagaaatagttttaagtaactttttatagcaagatgatacaatggtatgagtgtaatctaaacttccttgtggtattaccttgtatgctgttacttttattttattccttgtaattaagtcacaggcaggacccagtttccagagagcaggcggggccgcccagtgggtcaggcacagggagccccggtcctatcttagagcccctgagcttcagggaaggggcgggcgtgtcgccgcctctggcatcgcctccggttgccttacaccacgccttcacctgcagtcgcctagaaaacttgctctcaaacttcagggttttttcttccttcaaattttggaccaaagtctcatttctgtgttttgcctgcctctgatgctgggacccggaaggcgggcgctcctcctgtcttctctgtgctctttctaccgcccccgcgtcctgtcccgggggctctcctaggatcccctttccgtaaaagcgtgtaacaagggtgtaaatatttataattttttatacctgttgtgagacccgaggggcggcggcgcggttttttatggtgacacaaatgtatattttgctaacagcaattccaggctcagtattgtgaccgcggagccacaggggaccccacgcacattccgttgccttacccgatggcttgtgacgcggagagaaccgattaaaaccgtttgagaaactcctcccttgtctagccctgtgttcgctgtggacgctgtagaggcaggttggccagtctgtacctggacttcgaataaatcttctgtatcctcgctccgttccgccttcgttgctggcttcctctttctgtgccgcgggcggccccgactcccgcccgggtgtccgccgaagcgccaggtggggccacgggcggggtgggcccggccctgagagtgggggtccctgcgtggggcgtgcgggccagagcgaatgaccaagagccggacctcggtttctgccgctttattgagcatccgcgcggccgc

SEQ ID NO: 279128 - DNA, 3399 bp, Homo sapiens
ggcgtctccgccattttgtgagtctataactcggagccgttgggtcggttcctgctattccggcgcctccactccgtcccccgcgggtctgctctgtgtgccatggacggcattgtcccagatatagccgttggtacaaagcggggatctgacgagcttttctctacttgtgtcactaacggaccgtttatcatgagcagcaactcggcttctgcagcaaacggaaatgacagcaagaagttcaaaggtgacagccgaagtgcaggcgtcccctctagagtgatccacatccggaagctccccatcgacgtcacggagggggaagtcatctccctggggctgccctttgggaaggtcaccaacctcctgatgctgaaggggaaaaaccaggccttcatcgagatgaacacggaggaggctgccaacaccatggtgaactactacacctcggtgacccctgtgctgcgcggccagcccatctacatccagttctccaaccacaaggagctgaagaccgacagctctcccaaccaggcgcgggcccaggcggccctgcaggcggtgaactcggtccagtcggggaacctggccttggctgcctcggcggcggccgtggacgcagggatggcgatggccgggcagagccccgtgctcaggatcatcgtggagaacctcttctaccctgtgaccctggatgtgctgcaccagattttctccaagttcggcacagtgttgaagatcatcaccttcaccaagaacaaccagttccaggccctgctgcagtatgcggaccccgtgagcgcccagcacgccaagctgtcgctggacgggcagaacatctacaacgcctgctgcacgctgcgcatcgacttttccaagctcaccagcctcaacgtcaagtacaacaatgacaagagccgtgactacacacgcccagacctgccttccggggacagccagccctcgctggaccagaccatggccgcggccttccaggcctttccgttccgaacgtccacggcgccctggcccccctggccatcccctcggcggcggcggcagctgcggcggcaggtcggatcgccatcccgggcctggcgggggcaggaaattctgtattgctggtcagcaacctcaacccagagagagtcacaccccaaagcctctttattcttttcggcgtctacggtgacgtgcagcgcgtgaagatcctgttcaataagaaggagaacgccctagtgcagatggcggacggcaaccaggcccagctggccatgagccacctgaacgggcacaagctgcacgggaagcccatccgcatcacgctctcgaagcaccagaacgtgcagctgccccgcgagggccaggaggaccagggcctgaccaaggactacggcaactcacccctgcaccgcttcaagaagccgggctccaagaacttccagaacatattcccgccctcggccacgctgcacctctccaacatcccgccctcagtctccgaggaggatctcaaggtcctgttttccagcaatgggggcgtcgtcaaaggattcaagttcttccagaaggaccgcaagatggcactgatccagatgggctccgtggaggaggcggtccaggccctcattgacctgcacaaccacgacctcggggagaaccaccacctgcgggtctccttctccaagtccaccatctaggggcacaggcccccacggccgggccccctggcgacaacttccatcattccagagaaaagccactttaaaaacagctgaagtgaccttagcagaccagagattttatttttttaaagagaaatcagtttacctgtttttaaaaaaattaaatctagttcaccttgctcaccctgcggtgacagggacagctcaggctcttggtgactgtggcagcgggagttcccggccctccacacccggggccagaccctcggggccatgccttggtggggcctgtgtcgggcgtggggcctgcaggtgggcgccccgaccacgacttggcttccttgtgccttaaaaaacctgccttcctgcagccacacacccacccggggtgtcctggggacccaaggggtgggggggtcacaccagagagaggcagggggcctggccggctcctgcaggatcatgcagctggggcgcggcggccgcggctgcgacaccccaaccccagccctctaatcaagtcacgtgattctcccttcaccccgcccccagggccttcccttctgcccccaggcgggctccccgctgctccagctgcggagctggtcgacataatctctgtattatatactttgcagttgcagacgtctgtgcctagcaatatttccagttgaccaaatattctaatcttttttcatttatatgcaaaagaaatagttttaagtaactttttatagcaagatgatacaatggtatgagtgtaatctaaacttccttgtggtattaccttgtatgctgttacttttattttattccttgtaattaagtcacaggcaggacccagtttccagagagcaggcggggccgcccagtgggtcaggcacagggagccccggtcctatcttagagcccctgagcttcagggaaggggcgggcgtgtcgccgcctctggcatcgcctccggttgccttacaccacgccttcacctgcagtcgcctagaaaacttgctctcaaacttcagggttttttcttccttcaaattttggaccaaagtctcatttctgtgttttgcctgcctctgatgctgggacccggaaggcgggcgctcctcctgtcttctctgtgctctttctaccgcccccgcgtcctgtcccgggggctctcctaggatcccctttccgtaaaagcgtgtaacaagggtgtaaatatttataattttttatacctgttgtgagacccgaggggcggcggcgcggttttttatggtgacacaaatgtatattttgctaacagcaattccaggctcagtattgtgaccgcggagccacaggggaccccacgcacattccgttgccttacccgatggcttgtgacgcggagagaaccgattaaaaccgtttgagaaactcctcccttgtctagccctgtgttcgctgtggacgctgtagaggcaggttggccagtctgtacctggacttcgaataaatcttctgtatcctcgctccgttccgccttcgttgctggcttcctctttctgtgccgcgggcggccccgactcccgcccgggtgtccgccgaagcgccaggtggggccacgggcggggtgggcccggccctgagagtgggggtccctgcgtggggcgtgcgggccagagcgaatgaccaagagccggacctcggtttctgccgctttattgagcatccgcgcggccgc

SEQ ID NO: 279129 - DNA, 877 bp, Homo sapiens
  misc_feature (90)..(90): n is a, c, g, or t
  misc_feature (552)..(552): n is a, c, g, or t
tgtggggcttgccgatcttgttcccccagtagcctctgcgcacggggacgatggagagcttggccaggatgatggccccacggatggcgntggccacctccttggagcacttaacacccagaccgacgtggccattgtagtccccgatagcaacaaatgccttgaacctggtgcgctggccggcacgggtctgcttctgcactggcataatcttcaaaacctcatccttgagagaggcggttttttatggtgacacaaatgtatattttgctaacagcaattccaggctcagtattgtgaccgcggagccacaggggaccccacgcacattccgttgccttacccgatggcttgtgacgcggagagaaccgattaaaaccgtttgagaaactcaaaaaaaaaaaaaaaaaaaaaaaaaaaaacggtggggggggccggggccccgcgagaaaagcttttcaagaaccattcgcggtgggggcgcgcgggggcccagaggagaggaaagagggaaagcgtggggccaaagcggggttcccaaaggagaaaccngcgggccgaggaacaaaggggcggggaattctctctccaccaaaataaaaagaggccgcgggggggaaacacgcgagaggcgttctgggaacaacaactcccaaggaggggagttccgggagaggcccaatagaggggggaccctatacacaaggggggagccccaagaggaggagcagccgagaaatcctacaaaaattaaaccgcccaggggacggggggggagcactggcaacaccaacgagacgcagcaccaaaaaaaaacagaaagcacacgaaagcaaaagaaaagcaagccaaaccacaacaagcagcgagagagagt

SEQ ID NO: 279130 - DNA, 3240 bp, Homo sapiens
agcgacacgaaaaaaacttaggctaggtacgaggctgggtgttgccactccgtcccccgcgggtctgctctgtgtgccatggacggcattgtcccagatatagccgttggtacaaagcggggatctgacgagcttttctctacttgtgtcactaacggaccgtttatcatgagcagcaactcggcttctgcagcaaacggaaatgacagcaagaagttcaaaggtgacagccgaagtgcaggcgtcccctctagagtgatccacatccggaagctccccatcgacgtcacggagggggaagtcatctccctggggctgccctttgggaaggtcaccaacctcctgatgctgaaggggaaaaaccaggccttcatcgagatgaacacggaggaggctgccaacaccatggtgaactactacacctcggtgacccctgtgctgcgcggccagcccatctacatccagttctccaaccacaaggagctgaagaccgacagctctcccaaccaggcgcgggcccaggcggccctgcaggcggtgaactcggtccagtcggggaacctggccttggctgcctcggcggcggccgtggacgcagggatggcgatggccgggcagagccccgtgctcaggatcatcgtggagaacctcttctaccctgtgaccctggatgtgctgcaccagattttctccaagttcggcacagtgttgaagatcatcaccttcaccaagaacaaccagttccaggccctgctgcagtatgcggaccccgtgagcgcccagcacgccaagctgtcgctggacgggcagaacatctacaacgcctgctgcacgctgcgcatcgacttttccaagctcaccagcctcaacgtcaagtacaacaatgacaagagccgtgactacacacgcccagacctgccttccggggacagccagccctcgctggaccagaccatggccgcggccttcggtgcacctggtataatctcagcctctccgtatgcaggagctggtttccctcccacctttgccattcctcaagctgcaggcctttccgttccgaacgtccacggcgccctggcccccctggccatcccctcggcggcggcggcagctgcggcggcaggtcggatcgccatcccgggcctggcgggggcaggaaattctgtattgctggtcagcaacctcaacccagagagagtcacaccccaaagcctctttattcttttcggcgtctacggtgacgtgcagcgcgtgaagatcctgttcaataagaaggagaacgccctagtgcagatggcggacggcaaccaggcccagctggccatgagccacctgaacgggcacaagctgcacgggaagcccatccgcatcacgctctcgaagcaccagaacgtgcagctgccccgcgagggccaggaggaccagggcctgaccaaggactacggcaactcacccctgcaccgcttcaagaagccgggctccaagaacttccagaacatattcccgccctcggccacgctgcacctctccaacatcccgccctcagtctccgaggaggatctcaaggtcctgttttccagcaatgggggcgtcgtcaaaggattcaagttcttccagaaggaccgcaagatggcactgatccagatgggctccgtggaggaggcggtccaggccctcattgacctgcacaaccacgacctcggggagaaccaccacctgcgggtctccttctccaagtccaccatctaggggcacaggcccccacggccgggccccctggcgacaacttccatcattccagagaaaagccactttaaaaacagctgaagtgaccttagcagaccagagattttatttttttaaagagaaatcagtttacctgtttttaaaaaaattaaatctagttcaccttgctcaccctgcggtgacagggacagctcaggctcttggtgactgtggcagcgggagttcccggccctccacacccggggccagaccctcggggccatgccttggtggggcctgtgtcgggcgtggggcctgcaggtgggcgccccgaccacgacttggcttccttgtgccttaaaaaacctgccttcctgcagccacacacccacccggggtgtcctggggacccaaggggtgggggggtcacaccagagagaggcagggggcctggccggctcctgcaggatcatgcagctggggcgcggcggccgcggctgcgacaccccaaccccagccctctaatcaagtcacgtgattctcccttcaccccgcccccagggccttcccttctgcccccaggcgggctccccgctgctccagctgcggagctggtcgacataatctctgtattatatactttgcagttgcagacgtctgtgcctagcaatatttccagttgaccaaatattctaatcttttttcatttatatgcaaaagaaatagttttaagtaactttttatagcaagatgatacaatggtatgagtgtaatctaaacttccttgtggtattaccttgtatgctgttacttttattttattccttgtaattaagtcacaggcaggacccagtttccagagagcaggcggggccgcccagtgggtcaggcacagggagccccggtcctatcttagagcccctgagcttcagggaaggggcgggcgtgtcgccgcctctggcatcgcctccggttgccttacaccacgccttcacctgcagtcgcctagaaaacttgctctcaaacttcagggttttttcttccttcaaattttggaccaaagtctcatttctgtgttttgcctgcctctgatgctgggacccggaaggcgggcgctcctcctgtcttctctgtgctctttctaccgcccccgcgtcctgtcccgggggctctcctaggatcccctttccgtaaaagcgtgtaacaagggtgtaaatatttataattttttatacctgttgtgagacccgaggggcggcggcgcggttttttatggtgacacaaatgtatattttgctaacagcaattccaggctcagtattgtgaccgcggagccacaggggaccccacgcacattccgttgccttacccgatggcttgtgacgcggagagaaccgattaaaaccgtttgagaaactcctcccttgtctagccctgtgttcgctgtggacgctgtagaggcaggttggccagtctgtacctggacttcgaataaatcttctgtatcctcgc

SEQ ID NO: 279131 - DNA, 5390 bp, Homo sapiens
agcgacacgaaaaaaacttaggctaggtacgaggctgggtgttgccactccgtcccccgcgggtctgctctgtgtgccatggacggcattgtcccagatatagccgttggtacaaagcggggatctgacgagcttttctctacttgtgtcactaacggaccgtttatcatgagcagcaactcggcttctgcagcaaacggaaatgacagcaagaagttcaaaggtgacagccgaagtgcaggcgtcccctctagagtgatccacatccggaagctccccatcgacgtcacggagggggaagtcatctccctggggctgccctttgggaaggtcaccaacctcctgatgctgaaggggaaaaaccaggccttcatcgagatgaacacggaggaggctgccaacaccatggtgaactactacacctcggtgacccctgtgctgcgcggccagcccatctacatccagttctccaaccacaaggagctgaagaccgacagctctcccaaccaggcgcgggcccaggcggccctgcaggcggtgaactcggtccagtcggggaacctggccttggctgcctcggcggcggccgtggacgcagggatggcgatggccgggcagagccccgtgctcaggatcatcgtggagaacctcttctaccctgtgaccctggatgtgctgcaccagattttctccaagttcggcacagtgttgaagatcatcaccttcaccaagaacaaccagttccaggccctgctgcagtatgcggaccccgtgagcgcccagcacgccaagctgtcgctggacgggcagaacatctacaacgcctgctgcacgctgcgcatcgacttttccaagctcaccagcctcaacgtcaagtacaacaatgacaagagccgtgactacacacgcccagacctgccttccggggacagccagccctcgctggaccagaccatggccgcggccttcggtgcacctggtataatctcagcctctccgtatgcaggagctggtttccctcccacctttgccattcctcaagctgcaggtattcaaacgcttggtcttggttccccagcgactgcatgcccacaccaccttcccaggcagctccgcatccacggcggcagcctgggcggactgggcactcgagtgccaggtcaggggcccttcccgggagaggggacgccacgtccacagagcaggcttggccagggcagtggtaggacagggctgtggaggcccacgtgtggacggcgccagccagaagccgctaatcgcacagtctttgtggtctggttcccttcaagcacctccgggcgagcgcgaggaccgccagtggttggagggatgtctctagtagttgaatttgagtggcctggtaagcgcgcggcccgaggctgagcagcatgaccggcggcgggacgtgtgtgcgtggccgtcctcccgcttcccttctgggaccggggcccggccgccccagtgctggccgtggacggagcagcgcgtgccgcccggcggccgcctcgtctgcatggaggcatgggcgcgcatgcgcggtggtcccgggacgggccctgcttgccgagggccccgtgtctgtgctggcggagccggagcttttctgtgctgtgggcggggcgcatgcagatgagcccaggcccggcccggcccgtgctgtgaggagaggcgggcgctggtgcaggagccggcgggtggctgtgcgggggtcgggcgaccccacaggcacccagggtagggccagagccagggccgcctcccgcgcggctcggctcctcggtgcatgaggacggggagcgtcggcctctcccactctgcggtggagtcgggggcgccgccgctcatctcacctcctgcttttccaggcctttccgttccgaacgtccacggcgccctggcccccctggccatcccctcggcggcggcggcagctgcggcggcaggtcggatcgccatcccgggcctggcgggggcaggaaattctgtattgctggtcagcaacctcaacccagaggtacgtgggcttttcctccgcgccgccgttcctcccggaagagcgagcaggggatgttgtgctcgggctcgggtcccggagcagcgccgcccctcgctgtgtctgcgcctctgccctggcagcccctctgctgcagcgctgagaccctccttttccaagatggcttgagttttcctcttttcctgaattcacatcttggttcgcgttttctcttgcatgatacgcagaatgaattattttttggttacccaaaggcaatctaaaaattacttggagctgagcagggcgcgcagttcagagccccagcaggccgccctgctggtcagcgggacacacagggttagcgcggcggggtgtgggcagcccctgtggctcgagagcctgtcacttaactggtggatccgttatttcccagaatggttaaattcccctcggggagagcttgggtgaaacaagaggcccaaaatatgtaactcttgatggatgggatcctcctggaatcagcatttcaggctgttctgtttcccggcaactcctgtgacttcctcaaggcggtgcccagcctggccctccctcgcgggggcccaggacgcactccctgcctgtgcctcttaccacgagccgggtgctgtccctccagctcctcctgagcgaggccgtgcactaacagactcgatctcccttcacgcctgtaatcgtccttagagactgacttgtgccacagctgcgggagacagcgctgctgcagggcttggctgaggtggccgcgagcggagctgcacgcgcgctcctggggggcgtggttgggatcggcttctgggagcccctccagcagcgctgtctctgccggcatgtgagtgaaggtgcttctcttaccgtgtgcccgtcgaggtaaacctgtaactggaatgtgtgtggagtgtgactgatagaacactacctgattcttatgtatttactgacctgtgtttttttgctactttttttcttttctccccttcccctttccctattttttttcttgccctgatccggaatttctttgccaactgactgcacggtacttctgcttcctgttgttgcttgaaacaaaacaaaaacataaacaaataaaaaacaaaaattccccctcaaaccctgctctccggaaaccaacctgcccttgaatattaacatcctgacaacttcatcatccatcaaccactgcacgcctgcggggactgtcttcctcgtgtggacgattggcaactcgccccccttgacctctccctctcccctgtccctccgctgccttgctctgctgtctctaaagagagtcacaccccaaagcctctttattcttttcggcgtctacggtgacgtgcagcgcgtgaagatcctgttcaataagaaggagaacgccctagtgcagatggcggacggcaaccaggcccagctggccatgagccacctgaacgggcacaagctgcacgggaagcccatccgcatcacgctctcgaagcaccagaacgtgcagctgccccgcgagggccaggaggaccagggcctgaccaaggactacggcaactcacccctgcaccgcttcaagaagccgggctccaagaacttccagaacatattcccgccctcggccacgctgcacctctccaacatcccgccctcagtctccgaggaggatctcaaggtcctgttttccagcaatgggggcgtcgtcaaaggattcaagttcttccagaaggaccgcaagatggcactgatccagatgggctccgtggaggaggcggtccaggccctcattgacctgcacaaccacgacctcggggagaaccaccacctgcgggtctccttctccaagtccaccatctaggggcacaggcccccacggccgggccccctggcgacaacttccatcattccagagaaaagccactttaaaaacagctgaagtgaccttagcagaccagagattttatttttttaaagagaaatcagtttacctgtttttaaaaaaattaaatctagttcaccttgctcaccctgcggtgacagggacagctcaggctcttggtgactgtggcagcgggagttcccggccctccacacccggggccagaccctcggggccatgccttggtggggcctgtgtcgggcgtggggcctgcaggtgggcgccccgaccacgacttggcttccttgtgccttaaaaaacctgccttcctgcagccacacacccacccggggtgtcctggggacccaaggggtgggggggtcacaccagagagaggcagggggcctggccggctcctgcaggatcatgcagctggggcgcggcggccgcggctgcgacaccccaaccccagccctctaatcaagtcacgtgattctcccttcaccccgcccccagggccttcccttctgcccccaggcgggctccccgctgctccagctgcggagctggtcgacataatctctgtattatatactttgcagttgcagacgtctgtgcctagcaatatttccagttgaccaaatattctaatcttttttcatttatatgcaaaagaaatagttttaagtaactttttatagcaagatgatacaatggtatgagtgtaatctaaacttccttgtggtattaccttgtatgctgttacttttattttattccttgtaattaagtcacaggcaggacccagtttccagagagcaggcggggccgcccagtgggtcaggcacagggagccccggtcctatcttagagcccctgagcttcagggaaggggcgggcgtgtcgccgcctctggcatcgcctccggttgccttacaccacgccttcacctgcagtcgcctagaaaacttgctctcaaacttcagggttttttcttccttcaaattttggaccaaagtctcatttctgtgttttgcctgcctctgatgctgggacccggaaggcgggcgctcctcctgtcttctctgtgctctttctaccgcccccgcgtcctgtcccgggggctctcctaggatcccctttccgtaaaagcgtgtaacaagggtgtaaatatttataattttttatacctgttgtgagacccgaggggcggcggcgcggttttttatggtgacacaaatgtatattttgctaacagcaattccaggctcagtattgtgaccgcggagccacaggggaccccacgcacattccgttgccttacccgatggcttgtgacgcggagagaaccgattaaaaccgtttgagaaactcctcccttgtctagccctgtgttcgctgtggacgctgtagaggcaggttggccagtctgtacctggacttcgaataaatcttctgtatcctcgc

SEQ ID NO: 279132 - DNA, 4045 bp, Homo sapiens
agcgacacgaaaaaaacttaggctaggtacgaggctgggtgttgccactccgtcccccgcgggtctgctctgtgtgccatggacggcattgtcccagatatagccgttggtacaaagcggggatctgacgagcttttctctacttgtgtcactaacggaccgtttatcatgagcagcaactcggcttctgcagcaaacggaaatgacagcaagaagttcaaaggtgacagccgaagtgcaggcgtcccctctagagtgatccacatccggaagctccccatcgacgtcacggagggggaagtcatctccctggggctgccctttgggaaggtcaccaacctcctgatgctgaaggggaaaaaccaggccttcatcgagatgaacacggaggaggctgccaacaccatggtgaactactacacctcggtgacccctgtgctgcgcggccagcccatctacatccagttctccaaccacaaggagctgaagaccgacagctctcccaaccaggcgcgggcccaggcggccctgcaggcggtgaactcggtccagtcggggaacctggccttggctgcctcggcggcggccgtggacgcagggatggcgatggccgggcagagccccgtgctcaggatcatcgtggagaacctcttctaccctgtgaccctggatgtgctgcaccagattttctccaagttcggcacagtgttgaagatcatcaccttcaccaagaacaaccagttccaggccctgctgcagtatgcggaccccgtgagcgcccagcacgccaagctgtcgctggacgggcagaacatctacaacgcctgctgcacgctgcgcatcgacttttccaagctcaccagcctcaacgtcaagtacaacaatgacaagagccgtgactacacacgcccagacctgccttccggggacagccagccctcgctggaccagaccatggccgcggccttcggtgcacctggtataatctcagcctctccgtatgcaggagctggtttccctcccacctttgccattcctcaagctgcaggtattcaaacgcttggtcttggttccccagcgactgcatgcccacaccaccttcccaggcagctccgcatccacggcggcagcctgggcggactgggcactcgagtgccaggtcaggggcccttcccgggagaggggacgccacgtccacagagcaggcttggccagggcagtggtaggacagggctgtggaggcccacgtgtggacggcgccagccagaagccgctaatcgcacagtctttgtggtctggttcccttcaagcacctccgggcgagcgcgaggaccgccagtggttggagggatgtctctagtagttgaatttgagtggcctggtaagcgcgcggcccgaggctgagcagcatgaccggcggcgggacgtgtgtgcgtggccgtcctcccgcttcccttctgggaccggggcccggccgccccagtgctggccgtggacggagcagcgcgtgccgcccggcggccgcctcgtctgcatggaggcatgggcgcgcatgcgcggtggtcccgggacgggccctgcttgccgagggccccgtgtctgtgctggcggagccggagcttttctgtgctgtgggcggggcgcatgcagatgagcccaggcccggcccggcccgtgctgtgaggagaggcgggcgctggtgcaggagccggcgggtggctgtgcgggggtcgggcgaccccacaggcacccagggtagggccagagccagggccgcctcccgcgcggctcggctcctcggtgcatgaggacggggagcgtcggcctctcccactctgcggtggagtcgggggcgccgccgctcatctcacctcctgcttttccaggcctttccgttccgaacgtccacggcgccctggcccccctggccatcccctcggcggcggcggcagctgcggcggcaggtcggatcgccatcccgggcctggcgggggcaggaaattctgtattgctggtcagcaacctcaacccagagggcgtctacggtgacgtgcagcgcgtgaagatcctgttcaataagaaggagaacgccctagtgcagatggcggacggcaaccaggcccagctggccatgagccacctgaacgggcacaagctgcacgggaagcccatccgcatcacgctctcgaagcaccagaacgtgcagctgccccgcgagggccaggaggaccagggcctgaccaaggactacggcaactcacccctgcaccgcttcaagaagccgggctccaagaacttccagaacatattcccgccctcggccacgctgcacctctccaacatcccgccctcagtctccgaggaggatctcaaggtcctgttttccagcaatgggggcgtcgtcaaaggattcaagttcttccagaaggaccgcaagatggcactgatccagatgggctccgtggaggaggcggtccaggccctcattgacctgcacaaccacgacctcggggagaaccaccacctgcgggtctccttctccaagtccaccatctaggggcacaggcccccacggccgggccccctggcgacaacttccatcattccagagaaaagccactttaaaaacagctgaagtgaccttagcagaccagagattttatttttttaaagagaaatcagtttacctgtttttaaaaaaattaaatctagttcaccttgctcaccctgcggtgacagggacagctcaggctcttggtgactgtggcagcgggagttcccggccctccacacccggggccagaccctcggggccatgccttggtggggcctgtgtcgggcgtggggcctgcaggtgggcgccccgaccacgacttggcttccttgtgccttaaaaaacctgccttcctgcagccacacacccacccggggtgtcctggggacccaaggggtgggggggtcacaccagagagaggcagggggcctggccggctcctgcaggatcatgcagctggggcgcggcggccgcggctgcgacaccccaaccccagccctctaatcaagtcacgtgattctcccttcaccccgcccccagggccttcccttctgcccccaggcgggctccccgctgctccagctgcggagctggtcgacataatctctgtattatatactttgcagttgcagacgtctgtgcctagcaatatttccagttgaccaaatattctaatcttttttcatttatatgcaaaagaaatagttttaagtaactttttatagcaagatgatacaatggtatgagtgtaatctaaacttccttgtggtattaccttgtatgctgttacttttattttattccttgtaattaagtcacaggcaggacccagtttccagagagcaggcggggccgcccagtgggtcaggcacagggagccccggtcctatcttagagcccctgagcttcagggaaggggcgggcgtgtcgccgcctctggcatcgcctccggttgccttacaccacgccttcacctgcagtcgcctagaaaacttgctctcaaacttcagggttttttcttccttcaaattttggaccaaagtctcatttctgtgttttgcctgcctctgatgctgggacccggaaggcgggcgctcctcctgtcttctctgtgctctttctaccgcccccgcgtcctgtcccgggggctctcctaggatcccctttccgtaaaagcgtgtaacaagggtgtaaatatttataattttttatacctgttgtgagacccgaggggcggcggcgcggttttttatggtgacacaaatgtatattttgctaacagcaattccaggctcagtattgtgaccgcggagccacaggggaccccacgcacattccgttgccttacccgatggcttgtgacgcggagagaaccgattaaaaccgtttgagaaactcctcccttgtctagccctgtgttcgctgtggacgctgtagaggcaggttggccagtctgtacctggacttcgaataaatcttctgtatcctcgc

SEQ ID NO: 279133 - DNA, 3381 bp, Homo sapiens
agcgacacgaaaaaaacttaggctaggtacgaggctgggtgttgccactccgtcccccgcgggtctgctctgtgtgccatggacggcattgtcccagatatagccgttggtacaaagcggggatctgacgagcttttctctacttgtgtcactaacggaccgtttatcatgagcagcaactcggcttctgcagcaaacggaaatgacagcaagaagttcaaaggtgacagccgaagtgcaggcgtcccctctagagtgatccacatccggaagctccccatcgacgtcacggagggggaagtcatctccctggggctgccctttgggaaggtcaccaacctcctgatgctgaaggggaaaaaccaggccttcatcgagatgaacacggaggaggctgccaacaccatggtgaactactacacctcggtgacccctgtgctgcgcggccagcccatctacatccagttctccaaccacaaggagctgaagaccgacagctctcccaaccaggcgcgggcccaggcggccctgcaggcggtgaactcggtccagtcggggaacctggccttggctgcctcggcggcggccgtggacgcagggatggcgatggccgggcagagccccgtgctcaggatcatcgtggagaacctcttctaccctgtgaccctggatgtgctgcaccagattttctccaagttcggcacagtgttgaagatcatcaccttcaccaagaacaaccagttccaggccctgctgcagtatgcggaccccgtgagcgcccagcacgccaagctgtcgctggacgggcagaacatctacaacgcctgctgcacgctgcgcatcgacttttccaagctcaccagcctcaacgtcaagtacaacaatgacaagagccgtgactacacacgcccagacctgccttccggggacagccagccctcgctggaccagaccatggccgcggccttccaggcctttccgttccgaacgtccacggcgccctggcccccctggccatcccctcggcggcggcggcagctgcggcggcaggtcggatcgccatcccgggcctggcgggggcaggaaattctgtattgctggtcagcaacctcaacccagagagagtcacaccccaaagcctctttattcttttcggcgtctacggtgacgtgcagcgcgtgaagatcctgttcaataagaaggagaacgccctagtgcagatggcggacggcaaccaggcccagctggccatgagccacctgaacgggcacaagctgcacgggaagcccatccgcatcacgctctcgaagcaccagaacgtgcagctgccccgcgagggccaggaggaccagggcctgaccaaggactacggcaactcacccctgcaccgcttcaagaagccgggctccaagaacttccagaacatattcccgccctcggccacgctgcacctctccaacatcccgccctcagtctccgaggaggatctcaaggtcctgttttccagcaatgggggcgtcgtcaaaggattcaagttcttccagaaggaccgcaagatggcactgatccagatgggctccgtggaggaggcggtccaggccctcattgacctgcacaaccacgacctcggggagaaccaccacctgcgggtctccttctccaagtccaccatctaggggcacaggcccccacggccgggccccctggcgacaacttccatcattccagagaaaagccactttaaaaacagctgaagtgaccttagcagaccagagattttatttttttaaagagaaatcagtttacctgtttttaaaaaaattaaatctagttcaccttgctcaccctgcggtgacagggacagctcaggctcttggtgactgtggcagcgggagttcccggccctccacacccggggccagaccctcggggccatgccttggtggggcctgtgtcgggcgtggggcctgcaggtgggcgccccgaccacgacttggcttccttgtgccttaaaaaacctgccttcctgcagccacacacccacccggggtgtcctggggacccaaggggtgggggggtcacaccagagagaggcagggggcctggccggctcctgcaggatcatgcagctggggcgcggcggccgcggctgcgacaccccaaccccagccctctaatcaagtcacgtgattctcccttcaccccgcccccagggccttcccttctgcccccaggcgggctccccgctgctccagctgcggagctggtcgacataatctctgtattatatactttgcagttgcagacgtctgtgcctagcaatatttccagttgaccaaatattctaatcttttttcatttatatgcaaaagaaatagttttaagtaactttttatagcaagatgatacaatggtatgagtgtaatctaaacttccttgtggtattaccttgtatgctgttacttttattttattccttgtaattaagtcacaggcaggacccagtttccagagagcaggcggggccgcccagtgggtcaggcacagggagccccggtcctatcttagagcccctgagcttcagggaaggggcgggcgtgtcgccgcctctggcatcgcctccggttgccttacaccacgccttcacctgcagtcgcctagaaaacttgctctcaaacttcagggttttttcttccttcaaattttggaccaaagtctcatttctgtgttttgcctgcctctgatgctgggacccggaaggcgggcgctcctcctgtcttctctgtgctctttctaccgcccccgcgtcctgtcccgggggctctcctaggatcccctttccgtaaaagcgtgtaacaagggtgtaaatatttataattttttatacctgttgtgagacccgaggggcggcggcgcggttttttatggtgacacaaatgtatattttgctaacagcaattccaggctcagtattgtgaccgcggagccacaggggaccccacgcacattccgttgccttacccgatggcttgtgacgcggagagaaccgattaaaaccgtttgagaaactcctcccttgtctagccctgtgttcgctgtggacgctgtagaggcaggttggccagtctgtacctggacttcgaataaatcttctgtatcctcgcaaaaaaaaaaaaaaaaaaaaaaaaaaaattgggggcattaatgccgggcgggcgggaataagcggggcccgacaacgggggccacgggggccaatcaggtggtccccgggacccaaggtttcctggggccacaacgggggacaaaactcgggcgagtacccccattaataggggaggccggaaataaatccgaaaacccggggtaaaccgggtagag

SEQ ID NO: 279134 - DNA, 4556 bp, Homo sapiens
agcgacacgaaaaaaacttaggctaggtacgaggctgggtgttgccactccgtcccccgcgggtctgctctgtgtgccatggacggcattgtcccagatatagccgttggtacaaagcggggatctgacgagcttttctctacttgtgtcactaacggaccgtttatcatgagcagcaactcggcttctgcagcaaacggaaatgacagcaagaagttcaaaggtgacagccgaagtgcaggcgtcccctctagagtgatccacatccggaagctccccatcgacgtcacggagggggaagtcatctccctggggctgccctttgggaaggtcaccaacctcctgatgctgaaggggaaaaaccaggccttcatcgagatgaacacggaggaggctgccaacaccatggtgaactactacacctcggtgacccctgtgctgcgcggccagcccatctacatccagttctccaaccacaaggagctgaagaccgacagctctcccaaccaggcgcgggcccaggcggccctgcaggcggtgaactcggtccagtcggggaacctggccttggctgcctcggcggcggccgtggacgcagggatggcgatggccgggcagagccccgtgctcaggatcatcgtggagaacctcttctaccctgtgaccctggatgtgctgcaccagattttctccaagttcggcacagtgttgaagatcatcaccttcaccaagaacaaccagttccaggccctgctgcagtatgcggaccccgtgagcgcccagcacgccaagctgtcgctggacgggcagaacatctacaacgcctgctgcacgctgcgcatcgacttttccaagctcaccagcctcaacgtcaagtacaacaatgacaagagccgtgactacacacgcccagacctgccttccggggacagccagccctcgctggaccagaccatggccgcggccttcggtgcacctggtataatctcagcctctccgtatgcaggagctggtttccctcccacctttgccattcctcaagctgcaggcaggcctttccgttccgaacgtccacggcgccctggcccccctggccatcccctcggcggcggcggcagctgcggcggcaggtcggatcgccatcccgggcctggcgggggcaggaaattctgtattgctggtcagcaacctcaacccagaggtacgtgggcttttcctccgcgccgccgttcctcccggaagagcgagcaggggatgttgtgctcgggctcgggtcccggagcagcgccgcccctcgctgtgtctgcgcctctgccctggcagcccctctgctgcagcgctgagaccctccttttccaagatggcttgagttttcctcttttcctgaattcacatcttggttcgcgttttctcttgcatgatacgcagaatgaattattttttggttacccaaaggcaatctaaaaattacttggagctgagcagggcgcgcagttcagagccccagcaggccgccctgctggtcagcgggacacacagggttagcgcggcggggtgtgggcagcccctgtggctcgagagcctgtcacttaactggtggatccgttatttcccagaatggttaaattcccctcggggagagcttgggtgaaacaagaggcccaaaatatgtaactcttgatggatgggatcctcctggaatcagcatttcaggctgttctgtttcccggcaactcctgtgacttcctcaaggcggtgcccagcctggccctccctcgcgggggcccaggacgcactccctgcctgtgcctcttaccacgagccgggtgctgtccctccagctcctcctgagcgaggccgtgcactaacagactcgatctcccttcacgcctgtaatcgtccttagagactgacttgtgccacagctgcgggagacagcgctgctgcagggcttggctgaggtggccgcgagcggagctgcacgcgcgctcctggggggcgtggttgggatcggcttctgggagcccctccagcagcgctgtctctgccggcatgtgagtgaaggtgcttctcttaccgtgtgcccgtcgaggtaaacctgtaactggaatgtgtgtggagtgtgactgatagaacactacctgattcttatgtatttactgacctgtgtttttttgctactttttttcttttctccccttcccctttccctattttttttcttgccctgatccggaatttctttgccaactgactgcacggtacttctgcttcctgttgttgcttgaaacaaaacaaaaacataaacaaataaaaaacaaaaattccccctcaaaccctgctctccggaaaccaacctgcccttgaatattaacatcctgacaacttcatcatccatcaaccactgcacgcctgcggggactgtcttcctcgtgtggacgattggcaactcgccccccttgacctctccctctcccctgtccctccgctgccttgctctgctgtctctaaagagagtcacaccccaaagcctctttattcttttcggcgtctacggtgacgtgcagcgcgtgaagatcctgttcaataagaaggagaacgccctagtgcagatggcggacggcaaccaggcccagctggccatgagccacctgaacgggcacaagctgcacgggaagcccatccgcatcacgctctcgaagcaccagaacgtgcagctgccccgcgagggccaggaggaccagggcctgaccaaggactacggcaactcacccctgcaccgcttcaagaagccgggctccaagaacttccagaacatattcccgccctcggccacgctgcacctctccaacatcccgccctcagtctccgaggaggatctcaaggtcctgttttccagcaatgggggcgtcgtcaaaggattcaagttcttccagaaggaccgcaagatggcactgatccagatgggctccgtggaggaggcggtccaggccctcattgacctgcacaaccacgacctcggggagaaccaccacctgcgggtctccttctccaagtccaccatctaggggcacaggcccccacggccgggccccctggcgacaacttccatcattccagagaaaagccactttaaaaacagctgaagtgaccttagcagaccagagattttatttttttaaagagaaatcagtttacctgtttttaaaaaaattaaatctagttcaccttgctcaccctgcggtgacagggacagctcaggctcttggtgactgtggcagcgggagttcccggccctccacacccggggccagaccctcggggccatgccttggtggggcctgtgtcgggcgtggggcctgcaggtgggcgccccgaccacgacttggcttccttgtgccttaaaaaacctgccttcctgcagccacacacccacccggggtgtcctggggacccaaggggtgggggggtcacaccagagagaggcagggggcctggccggctcctgcaggatcatgcagctggggcgcggcggccgcggctgcgacaccccaaccccagccctctaatcaagtcacgtgattctcccttcaccccgcccccagggccttcccttctgcccccaggcgggctccccgctgctccagctgcggagctggtcgacataatctctgtattatatactttgcagttgcagacgtctgtgcctagcaatatttccagttgaccaaatattctaatcttttttcatttatatgcaaaagaaatagttttaagtaactttttatagcaagatgatacaatggtatgagtgtaatctaaacttccttgtggtattaccttgtatgctgttacttttattttattccttgtaattaagtcacaggcaggacccagtttccagagagcaggcggggccgcccagtgggtcaggcacagggagccccggtcctatcttagagcccctgagcttcagggaaggggcgggcgtgtcgccgcctctggcatcgcctccggttgccttacaccacgccttcacctgcagtcgcctagaaaacttgctctcaaacttcagggttttttcttccttcaaattttggaccaaagtctcatttctgtgttttgcctgcctctgatgctgggacccggaaggcgggcgctcctcctgtcttctctgtgctctttctaccgcccccgcgtcctgtcccgggggctctcctaggatcccctttccgtaaaagcgtgtaacaagggtgtaaatatttataattttttatacctgttgtgagacccgaggggcggcggcgcggttttttatggtgacacaaatgtatattttgctaacagcaattccaggctcagtattgtgaccgcggagccacaggggaccccacgcacattccgttgccttacccgatggcttgtgacgcggagagaaccgattaaaaccgtttgagaaactcctcccttgtctagccctgtgttcgctgtggacgctgtagaggcaggttggccagtctgtacctggacttcgaataaatcttctgtatcctcgc

SEQ ID NO: 279135 - DNA, 2811 bp, Homo sapiens
ggcaggggaggctgggttggaatcggccgagggtcccttcaagcacctccgggcgagcgcgaggaccgccagtggttggagggatgtctctagtagttgaatttgagtggcctggtaagcgcgcggcccgaggctgagcagcatgaccggcggcgggacgtgtgtgcgtggccgtcctcccgcttcccttctgggaccggggcccggccgccccagtgctggccgtggacggagcagcgcgtgccgcccggcggccgcctcgtctgcatggaggcatgggcgcgcatgcgcggtggtcccgggacgggccctgcttgccgagggccccgtgtctgtgctggcggagccggagcttttctgtgctgtgggcggggcgcatgcagatgagcccaggcccggcccggcccgtgctgtgaggagaggcgggcgctggtgcaggagccggcgggtggctgtgcgggggtcgggcgaccccacaggcacccagggtagggccagagccagggccgcctcccgcgcggctcggctcctcggtgcatgaggacggggagcgtcggcctctcccactctgcggtggagtcgggggcgccgccgctcatctcacctcctgcttttccaggcctttccgttccgaacgtccacggcgccctggcccccctggccatcccctcggcggcggcggcagctgcggcggcaggtcggatcgccatcccgggcctggcgggggcaggaaattctgtattgctggtcagcaacctcaacccagagagagtcacaccccaaagcctctttattcttttcggcgtctacggtgacgtgcagcgcgtgaagatcctgttcaataagaaggagaacgccctagtgcagatggcggacggcaaccaggcccagctggccatgagccacctgaacgggcacaagctgcacgggaagcccatccgcatcacgctctcgaagcaccagaacgtgcagctgccccgcgagggccaggaggaccagggcctgaccaaggactacggcaactcacccctgcaccgcttcaagaagccgggctccaagaacttccagaacatattcccgccctcggccacgctgcacctctccaacatcccgccctcagtctccgaggaggatctcaaggtcctgttttccagcaatgggggcgtcgtcaaaggattcaagttcttccagaaggaccgcaagatggcactgatccagatgggctccgtggaggaggcggtccaggccctcattgacctgcacaaccacgacctcggggagaaccaccacctgcgggtctccttctccaagtccaccatctaggggcacaggcccccacggccgggccccctggcgacaacttccatcattccagagaaaagccactttaaaaacagctgaagtgaccttagcagaccagagattttatttttttaaagagaaatcagtttacctgtttttaaaaaaattaaatctagttcaccttgctcaccctgcggtgacagggacagctcaggctcttggtgactgtggcagcgggagttcccggccctccacacccggggccagaccctcggggccatgccttggtggggcctgtgtcgggcgtggggcctgcaggtgggcgccccgaccacgacttggcttccttgtgccttaaaaaacctgccttcctgcagccacacacccacccggggtgtcctggggacccaaggggtgggggggtcacaccagagagaggcagggggcctggccggctcctgcaggatcatgcagctggggcgcggcggccgcggctgcgacaccccaaccccagccctctaatcaagtcacgtgattctcccttcaccccgcccccagggccttcccttctgcccccaggcgggctccccgctgctccagctgcggagctggtcgacataatctctgtattatatactttgcagttgcagacgtctgtgcctagcaatatttccagttgaccaaatattctaatcttttttcatttatatgcaaaagaaatagttttaagtaactttttatagcaagatgatacaatggtatgagtgtaatctaaacttccttgtggtattaccttgtatgctgttacttttattttattccttgtaattaagtcacaggcaggacccagtttccagagagcaggcggggccgcccagtgggtcaggcacagggagccccggtcctatcttagagcccctgagcttcagggaaggggcgggcgtgtcgccgcctctggcatcgcctccggttgccttacaccacgccttcacctgcagtcgcctagaaaacttgctctcaaacttcagggttttttcttccttcaaattttggaccaaagtctcatttctgtgttttgcctgcctctgatgctgggacccggaaggcgggcgctcctcctgtcttctctgtgctctttctaccgcccccgcgtcctgtcccgggggctctcctaggatcccctttccgtaaaagcgtgtaacaagggtgtaaatatttataattttttatacctgttgtgagacccgaggggcggcggcgcggttttttatggtgacacaaatgtatattttgctaacagcaattccaggctcagtattgtgaccgcggagccacaggggaccccacgcacattccgttgccttacccgatggcttgtgacgcggagagaaccgattaaaaccgtttgagaaactcctcccttgtctagccctgtgttcgctgtggacgctgtagaggcaggttggccagtctgtacctggacttcgaataaatcttctgtatcctcgc

SEQ ID NO: 279136 - DNA, 2126 bp, Homo sapiens
agcgacacgaaaaaaacttaggctaggtacgaggctgggtgttgccactccgtcccccgcgggtctgctctgtgtgccatggacggcattgtcccagatatagccgttggtacaaaggcgtctacggtgacgtgcagcgcgtgaagatcctgttcaataagaaggagaacgccctagtgcagatggcggacggcaaccaggcccagctggccatgagccacctgaacgggcacaagctgcacgggaagcccatccgcatcacgctctcgaagcaccagaacgtgcagctgccccgcgagggccaggaggaccagggcctgaccaaggactacggcaactcacccctgcaccgcttcaagaagccgggctccaagaacttccagaacatattcccgccctcggccacgctgcacctctccaacatcccgccctcagtctccgaggaggatctcaaggtcctgttttccagcaatgggggcgtcgtcaaaggattcaagttcttccagaaggaccgcaagatggcactgatccagatgggctccgtggaggaggcggtccaggccctcattgacctgcacaaccacgacctcggggagaaccaccacctgcgggtctccttctccaagtccaccatctaggggcacaggcccccacggccgggccccctggcgacaacttccatcattccagagaaaagccactttaaaaacagctgaagtgaccttagcagaccagagattttatttttttaaagagaaatcagtttacctgtttttaaaaaaattaaatctagttcaccttgctcaccctgcggtgacagggacagctcaggctcttggtgactgtggcagcgggagttcccggccctccacacccggggccagaccctcggggccatgccttggtggggcctgtgtcgggcgtggggcctgcaggtgggcgccccgaccacgacttggcttccttgtgccttaaaaaacctgccttcctgcagccacacacccacccggggtgtcctggggacccaaggggtgggggggtcacaccagagagaggcagggggcctggccggctcctgcaggatcatgcagctggggcgcggcggccgcggctgcgacaccccaaccccagccctctaatcaagtcacgtgattctcccttcaccccgcccccagggccttcccttctgcccccaggcgggctccccgctgctccagctgcggagctggtcgacataatctctgtattatatactttgcagttgcagacgtctgtgcctagcaatatttccagttgaccaaatattctaatcttttttcatttatatgcaaaagaaatagttttaagtaactttttatagcaagatgatacaatggtatgagtgtaatctaaacttccttgtggtattaccttgtatgctgttacttttattttattccttgtaattaagtcacaggcaggacccagtttccagagagcaggcggggccgcccagtgggtcaggcacagggagccccggtcctatcttagagcccctgagcttcagggaaggggcgggcgtgtcgccgcctctggcatcgcctccggttgccttacaccacgccttcacctgcagtcgcctagaaaacttgctctcaaacttcagggttttttcttccttcaaattttggaccaaagtctcatttctgtgttttgcctgcctctgatgctgggacccggaaggcgggcgctcctcctgtcttctctgtgctctttctaccgcccccgcgtcctgtcccgggggctctcctaggatcccctttccgtaaaagcgtgtaacaagggtgtaaatatttataattttttatacctgttgtgagacccgaggggcggcggcgcggttttttatggtgacacaaatgtatattttgctaacagcaattccaggctcagtattgtgaccgcggagccacaggggaccccacgcacattccgttgccttacccgatggcttgtgacgcggagagaaccgattaaaaccgtttgagaaactcctcccttgtctagccctgtgttcgctgtggacgctgtagaggcaggttggccagtctgtacctggacttcgaataaatcttctgtatcctcgc

SEQ ID NO: 279137 - DNA, 2178 bp, Homo sapiens
agcgacacgaaaaaaacttaggctaggtacgaggctgggtgttgccactccgtcccccgcgggtctgctctgtgtgccatggacggcattgtcccagatatagccgttggtacaaagcggggatctgacgagcttttctctacttgtgtcactaacggaccgtttatcatgagcagcaactcggcttctgcagcaaacggaaatgacagcaagaagttcaaaggtgacagccgaagtgcaggcgtcccctctagagtgatccacatccggaagctccccatcgacgtcacggagggggaagtcatctccctggggctgccctttgggaaggtcaccaacctcctgatgctgaaggggaaaaaccagggcctgaccaaggactacggcaactcacccctgcaccgcttcaagaagccgggctccaagaacttccagaacatattcccgccctcggccacgctgcacctctccaacatcccgccctcagtctccgaggaggatctcaaggtcctgttttccagcaatgggggcgtcgtcaaaggattcaagttcttccagaaggaccgcaagatggcactgatccagatgggctccgtggaggaggcggtccaggccctcattgacctgcacaaccacgacctcggggagaaccaccacctgcgggtctccttctccaagtccaccatctaggggcacaggcccccacggccgggccccctggcgacaacttccatcattccagagaaaagccactttaaaaacagctgaagtgaccttagcagaccagagattttatttttttaaagagaaatcagtttacctgtttttaaaaaaattaaatctagttcaccttgctcaccctgcggtgacagggacagctcaggctcttggtgactgtggcagcgggagttcccggccctccacacccggggccagaccctcggggccatgccttggtggggcctgtgtcgggcgtggggcctgcaggtgggcgccccgaccacgacttggcttccttgtgccttaaaaaacctgccttcctgcagccacacacccacccggggtgtcctggggacccaaggggtgggggggtcacaccagagagaggcagggggcctggccggctcctgcaggatcatgcagctggggcgcggcggccgcggctgcgacaccccaaccccagccctctaatcaagtcacgtgattctcccttcaccccgcccccagggccttcccttctgcccccaggcgggctccccgctgctccagctgcggagctggtcgacataatctctgtattatatactttgcagttgcagacgtctgtgcctagcaatatttccagttgaccaaatattctaatcttttttcatttatatgcaaaagaaatagttttaagtaactttttatagcaagatgatacaatggtatgagtgtaatctaaacttccttgtggtattaccttgtatgctgttacttttattttattccttgtaattaagtcacaggcaggacccagtttccagagagcaggcggggccgcccagtgggtcaggcacagggagccccggtcctatcttagagcccctgagcttcagggaaggggcgggcgtgtcgccgcctctggcatcgcctccggttgccttacaccacgccttcacctgcagtcgcctagaaaacttgctctcaaacttcagggttttttcttccttcaaattttggaccaaagtctcatttctgtgttttgcctgcctctgatgctgggacccggaaggcgggcgctcctcctgtcttctctgtgctctttctaccgcccccgcgtcctgtcccgggggctctcctaggatcccctttccgtaaaagcgtgtaacaagggtgtaaatatttataattttttatacctgttgtgagacccgaggggcggcggcgcggttttttatggtgacacaaatgtatattttgctaacagcaattccaggctcagtattgtgaccgcggagccacaggggaccccacgcacattccgttgccttacccgatggcttgtgacgcggagagaaccgattaaaaccgtttgagaaactcctcccttgtctagccctgtgttcgctgtggacgctgtagaggcaggttggccagtctgtacctggacttcgaataaatcttctgtatcctcgc

SEQ ID NO: 279138 - DNA, 1968 bp, Homo sapiens
agcgacacgaaaaaaacttaggctaggtacgaggctgggtgttgccactccgtcccccgcgggtctgctctgtgtgccatggacggcattgtcccagatatagccgttggtacaaagcggggatctgacgagcttttctctacttgtgtcactaacggaccgtttatcatgagcagcaactcggcttctgcagcaaacggaaatgacagcaagaagttcaaaggtgacagccgaagtgcaggcgtcccctctagagtgatccacatccggaagctccccatcgacgtcacggagggggaagtcatctccctggggctgccctttgggaaggtcaccaacctcctgatgctgaaggggaaaaaccaggccttcatcgagatgaacacggaggaggctgcccaggccctcattgacctgcacaaccacgacctcggggagaaccaccacctgcgggtctccttctccaagtccaccatctaggggcacaggcccccacggccgggccccctggcgacaacttccatcattccagagaaaagccactttaaaaacagctgaagtgaccttagcagaccagagattttatttttttaaagagaaatcagtttacctgtttttaaaaaaattaaatctagttcaccttgctcaccctgcggtgacagggacagctcaggctcttggtgactgtggcagcgggagttcccggccctccacacccggggccagaccctcggggccatgccttggtggggcctgtgtcgggcgtggggcctgcaggtgggcgccccgaccacgacttggcttccttgtgccttaaaaaacctgccttcctgcagccacacacccacccggggtgtcctggggacccaaggggtgggggggtcacaccagagagaggcagggggcctggccggctcctgcaggatcatgcagctggggcgcggcggccgcggctgcgacaccccaaccccagccctctaatcaagtcacgtgattctcccttcaccccgcccccagggccttcccttctgcccccaggcgggctccccgctgctccagctgcggagctggtcgacataatctctgtattatatactttgcagttgcagacgtctgtgcctagcaatatttccagttgaccaaatattctaatcttttttcatttatatgcaaaagaaatagttttaagtaactttttatagcaagatgatacaatggtatgagtgtaatctaaacttccttgtggtattaccttgtatgctgttacttttattttattccttgtaattaagtcacaggcaggacccagtttccagagagcaggcggggccgcccagtgggtcaggcacagggagccccggtcctatcttagagcccctgagcttcagggaaggggcgggcgtgtcgccgcctctggcatcgcctccggttgccttacaccacgccttcacctgcagtcgcctagaaaacttgctctcaaacttcagggttttttcttccttcaaattttggaccaaagtctcatttctgtgttttgcctgcctctgatgctgggacccggaaggcgggcgctcctcctgtcttctctgtgctctttctaccgcccccgcgtcctgtcccgggggctctcctaggatcccctttccgtaaaagcgtgtaacaagggtgtaaatatttataattttttatacctgttgtgagacccgaggggcggcggcgcggttttttatggtgacacaaatgtatattttgctaacagcaattccaggctcagtattgtgaccgcggagccacaggggaccccacgcacattccgttgccttacccgatggcttgtgacgcggagagaaccgattaaaaccgtttgagaaactcctcccttgtctagccctgtgttcgctgtggacgctgtagaggcaggttggccagtctgtacctggacttcgaataaatcttctgtatcctcgc

SEQ ID NO: 279139 - DNA, 5040 bp, Homo sapiens
agcgacacgaaaaaaacttaggctaggtacgaggctgggtgttgccactccgtcccccgcgggtctgctctgtgtgccatggacggcattgtcccagatatagccgttggtacaaagcggggatctgacgagcttttctctacttgtgtcactaacggaccgtttatcatgagcagcaactcggcttctgcagcaaacggaaatgacagcaagaagttcaaaggtgacagccgaagtgcaggcgtcccctctagagtgatccacatccggaagctccccatcgacgtcacggagggggaagtcatctccctggggctgccctttgggaaggtcaccaacctcctgatgctgaaggggaaaaaccaggccttcatcgagatgaacacggaggaggctgccaacaccatggtgaactactacacctcggtgacccctgtgctgcgcggccagcccatctacatccagttctccaaccacaaggagctgaagaccgacagctctcccaaccaggcgcgggcccaggcggccctgcaggcggtgaactcggtccagtcggggaacctggccttggctgcctcggcggcggccgtggacgcagggatggcgatggccgggcagagccccgtgctcaggatcatcgtggagaacctcttctaccctgtgaccctggatgtgctgcaccagattttctccaagttcggcacagtgttgaagatcatcaccttcaccaagaacaaccagttccaggccctgctgcagtatgcggaccccgtgagcgcccagcacgccaagctgtcgctggacgggcagaacatctacaacgcctgctgcacgctgcgcatcgacttttccaagctcaccagcctcaacgtcaagtacaacaatgacaagagccgtgactacacacgcccagacctgccttccggggacagccagccctcgctggaccagaccatggccgcggccttcggtgcacctggtataatctcagcctctccgtatgcaggagctggtttccctcccacctttgccattcctcaagctgcaggtattcaaacgcttggtcttggttccccagcgactgcatgcccacaccaccttcccaggcagctccgcatccacggcggcagcctgggcggactgggcactcgagtgccaggtcaggggcccttcccgggagaggggacgccacgtccacagagcaggcttggccagggcagtggtaggacagggctgtggaggcccacgtgtggacggcgccagccagaagccgctaatcgcacagtctttgtggtctggttcccttcaagcacctccgggcgagcgcgaggaccgccagtggttggagggatgtctctagtagttgaatttgagtggcctggtaagcgcgcggcccgaggctgagcagcatgaccggcggcgggacgtgtgtgcgtggccgtcctcccgcttcccttctgggaccggggcccggccgccccagtgctggccgtggacggagcagcgcgtgccgcccggcggccgcctcgtctgcatggaggcatgggcgcgcatgcgcggtggtcccgggacgggccctgcttgccgagggccccgtgtctgtgctggcggagccggagcttttctgtgctgtgggcggggcgcatgcagatgagcccaggcccggcccggcccgtgctgtgaggagaggcgggcgctggtgcaggagccggcgggtggctgtgcgggggtcgggcgaccccacaggcacccagggtagggccagagccagggccgcctcccgcgcggctcggctcctcggtgcatgaggacggggagcgtcggcctctcccactctgcggtggagtcgggggcgccgccgctcatctcacctcctgcttttccaggcctttccgttccgaacgtccacggcgccctggcccccctggccatcccctcggcggcggcggcagctgcggcggcaggtcggatcgccatcccgggcctggcgggggcaggaaattctgtattgctggtcagcaacctcaacccagaggtacgtgggcttttcctccgcgccgccgttcctcccggaagagcgagcaggggatgttgtgctcgggctcgggtcccggagcagcgccgcccctcgctgtgtctgcgcctctgccctggcagcccctctgctgcagcgctgagaccctccttttccaagatggcttgagttttcctcttttcctgaattcacatcttggttcgcgttttctcttgcatgatacgcagaatgaattattttttggttacccaaaggcaatctaaaaattacttggagctgagcagggcgcgcagttcagagccccagcaggccgccctgctggtcagcgggacacacagggttagcgcggcggggtgtgggcagcccctgtggctcgagagcctgtcacttaactggtggatccgttatttcccagaatggttaaattcccctcggggagagcttgggtgaaacaagaggcccaaaatatgtaactcttgatggatgggatcctcctggaatcagcatttcaggctgttctgtttcccggcaactcctgtgacttcctcaaggcggtgcccagcctggccctccctcgcgggggcccaggacgcactccctgcctgtgcctcttaccacgagccgggtgctgtccctccagctcctcctgagcgaggccgtgcactaacagactcgatctcccttcacgcctgtaatcgtccttagagactgacttgtgccacagctgcgggagacagcgctgctgcagggcttggctgaggtggccgcgagcggagctgcacgcgcgctcctggggggcgtggttgggatcggcttctgggagcccctccagcagcgctgtctctgccggcatgtgagtgaaggtgcttctcttaccgtgtgcccgtcgaggtaaacctgtaactggaatgtgtgtggagtgtgactgatagaacactacctgattcttatgtatttactgacctgtgtttttttgctactttttttcttttctccccttcccctttccctattttttttcttgccctgatccggaatttctttgccaactgactgcacggtacttctgcttcctgttgttgcttgaaacaaaacaaaaacataaacaaataaaaaacaaaaattccccctcaaaccctgctctccggaaaccaacctgcccttgaatattaacatcctgacaacttcatcatccatcaaccactgcacgcctgcggggactgtcttcctcgtgtggacgattggcaactcgccccccttgacctctccctctcccctgtccctccgctgccttgctctgctgtctctaaagagagtcacaccccaaagcctctttattcttttcggcgtctacggtgacgtgcagcgcgtgaagatcctgttcaataagaaggagaacgccctagtgcagatggcggacggcaaccaggcccagctggccatgagccacctgaacgggcacaagctgcacgggaagcccatccgcatcacgctctcgaagcaccagaacgtgcagctgccccgcgagggccaggaggaccagggcctgaccaaggactacggcaactcacccctgcaccgcttcaagaagccgggctccaagaacttccagaacatattcccgccctcggccacgctgcacctctccaacatcccgccctcagtctccgaggaggatctcaaggtcctgttttccagcaatgggggcgtcgtcaaaggattcaagttcttccagaaggaccgcaagatggcactgatccagatgggctccgtggaggaggcggtccaggccctcattgacctgcacaaccacgacctcggggccgaccacgacttggcttccttgtgccttaaaaaacctgccttcctgcagccacacacccacccggggtgtcctggggacccaaggggtgggggggtcacaccagagagaggcagggggcctggccggctcctgcaggatcatgcagctggggcgcggcggccgcggctgcgacaccccaaccccagccctctaatcaagtcacgtgattctcccttcaccccgcccccagggccttcccttctgcccccaggcgggctccccgctgctccagctgcggagctggtcgacataatctctgtattatatactttgcagttgcagacgtctgtgcctagcaatatttccagttgaccaaatattctaatcttttttcatttatatgcaaaagaaatagttttaagtaactttttatagcaagatgatacaatggtatgagtgtaatctaaacttccttgtggtattaccttgtatgctgttacttttattttattccttgtaattaagtcacaggcaggacccagtttccagagagcaggcggggccgcccagtgggtcaggcacagggagccccggtcctatcttagagcccctgagcttcagggaaggggcgggcgtgtcgccgcctctggcatcgcctccggttgccttacaccacgccttcacctgcagtcgcctagaaaacttgctctcaaacttcagggttttttcttccttcaaattttggaccaaagtctcatttctgtgttttgcctgcctctgatgctgggacccggaaggcgggcgctcctcctgtcttctctgtgctctttctaccgcccccgcgtcctgtcccgggggctctcctaggatcccctttccgtaaaagcgtgtaacaagggtgtaaatatttataattttttatacctgttgtgagacccgaggggcggcggcgcggttttttatggtgacacaaatgtatattttgctaacagcaattccaggctcagtattgtgaccgcggagccacaggggaccccacgcacattccgttgccttacccgatggcttgtgacgcggagagaaccgattaaaaccgtttgagaaactcctcccttgtctagccctgtgttcgctgtggacgctgtagaggcaggttggccagtctgtacctggacttcgaataaatcttctgtatcctcgc

SEQ ID NO: 279140 - DNA, 3440 bp, Homo sapiens
agcgacacgaaaaaaacttaggctaggtacgaggctgggtgttgccactccgtcccccgcgggtctgctctgtgtgccatggacggcattgtcccagatatagccgttggtacaaagcggggatctgacgagcttttctctacttgtgtcactaacggaccgtttatcatgagcagcaactcggcttctgcagcaaacggaaatgacagcaagaagttcaaaggtgacagccgaagtgcaggcgtcccctctagagtgatccacatccggaagctccccatcgacgtcacggagggggaagtcatctccctggggctgccctttgggaaggtcaccaacctcctgatgctgaaggggaaaaaccaggccttcatcgagatgaacacggaggaggctgccaacaccatggtgaactactacacctcggtgacccctgtgctgcgcggccagcccatctacatccagttctccaaccacaaggagctgaagaccgacagctctcccaaccaggcgcgggcccaggcggccctgcaggcggtgaactcggtccagtcggggaacctggccttggctgcctcggcggcggccgtggacgcagggatggcgatggccgggcagagccccgtgctcaggatcatcgtggagaacctcttctaccctgtgaccctggatgtgctgcaccagattttctccaagttcggcacagtgttgaagatcatcaccttcaccaagaacaaccagttccaggccctgctgcagtatgcggaccccgtgagcgcccagcacgccaagctgtcgctggacgggcagaacatctacaacgcctgctgcacgctgcgcatcgacttttccaagctcaccagcctcaacgtcaagtacaacaatgacaagagccgtgactacacacgcccagacctgccttccggggacagccagccctcgctggaccagaccatggccgcggccttcggtgcacctggtataatctcagcctctccgtatgcaggagctggtttccctcccacctttgccattcctcaagctgcaggtattcaaacgcttggtcttggttccccagcgactgcatgcccacaccaccttcccaggcagctccgcatccacggcggcagcctgggcggactgggcactcgagtgccaggtcaggggcccttcccgggagaggggacgccacgtccacagagcaggcttggccagggcagtggtaggacagggctgtggaggcccacgtgtggacggcgccagccagaagccgctaatcgcacagtctttgtggtctggttcccttcaagcacctccgggcgagcgcgaggaccgccagtggttggagggatgtctctagtagttgaatttgagtggcctggtaagcgcgcggcccgaggctgagcagcatgaccggcggcgggacgtgtgtgcgtggccgtcctcccgcttcccttctgggaccggggcccggccgccccagtgctggccgtggacggagcagcgcgtgccgcccggcggccgcctcgtctgcatggaggcatgggcgcgcatgcgcggtggtcccgggacgggccctgcttgccgagggccccgtgtctgtgctggcggagccggagcttttctgtgctgtgggcggggcgcatgcagatgagcccaggcccggcccggcccgtgctgtgaggagaggcgggcgctggtgcaggagccggcgggtggctgtgcgggggtcgggcgaccccacaggcacccagggtagggccagagccagggccgcctcccgcgcggctcggctcctcggtgcatgaggacggggagcgtcggcctctcccactctgcggtggagtcgggggcgccgccgctcatctcacctcctgcttttccaggcctttccgttccgaacgtccacggcgccctggcccccctggccatcccctcggcggcggcggcagctgcggcggcaggtcggatcgccatcccgggcctggcgggggcaggaaattctgtattgctggtcagcaacctcaacccagagagagtcacaccccaaagcctctttattcttttcggcgtctacggtgacgtgcagcgcgtgaagatcctgttcaataagaaggagaacgccctagtgcagatggcggacggcaaccaggcccagctggccatgagccacctgaacgggcacaagctgcacgggaagcccatccgcatcacgctctcggggcctgtgtcgggcgtggggcctgcaggtgggcgccccgaccacgacttggcttccttgtgccttaaaaaacctgccttcctgcagccacacacccacccggggtgtcctggggacccaaggggtgggggggtcacaccagagagaggcagggggcctggccggctcctgcaggatcatgcagctggggcgcggcggccgcggctgcgacaccccaaccccagccctctaatcaagtcacgtgattctcccttcaccccgcccccagggccttcccttctgcccccaggcgggctccccgctgctccagctgcggagctggtcgacataatctctgtattatatactttgcagttgcagacgtctgtgcctagcaatatttccagttgaccaaatattctaatcttttttcatttatatgcaaaagaaatagttttaagtaactttttatagcaagatgatacaatggtatgagtgtaatctaaacttccttgtggtattaccttgtatgctgttacttttattttattccttgtaattaagtcacaggcaggacccagtttccagagagcaggcggggccgcccagtgggtcaggcacagggagccccggtcctatcttagagcccctgagcttcagggaaggggcgggcgtgtcgccgcctctggcatcgcctccggttgccttacaccacgccttcacctgcagtcgcctagaaaacttgctctcaaacttcagggttttttcttccttcaaattttggaccaaagtctcatttctgtgttttgcctgcctctgatgctgggacccggaaggcgggcgctcctcctgtcttctctgtgctctttctaccgcccccgcgtcctgtcccgggggctctcctaggatcccctttccgtaaaagcgtgtaacaagggtgtaaatatttataattttttatacctgttgtgagacccgaggggcggcggcgcggttttttatggtgacacaaatgtatattttgctaacagcaattccaggctcagtattgtgaccgcggagccacaggggaccccacgcacattccgttgccttacccgatggcttgtgacgcggagagaaccgattaaaaccgtttgagaaactcctcccttgtctagccctgtgttcgctgtggacgctgtagaggcaggttggccagtctgtacctggacttcgaataaatcttctgtatcctcgc

SEQ ID NO: 279141 - DNA, 2284 bp, Homo sapiens
agcgacacgaaaaaaacttaggctaggtacgaggctgggtgttgccactccgtcccccgcgggtctgctctgtgtgccatggacggcattgtcccagatatagccgttggtacaaagcggggatctgacgagcttttctctacttgtgtcactaacggaccgtttatcatgagcagcaactcggcttctgcagcaaacggaaatgacagcaagaagttcaaaggtgacagccgaagtgcaggcgtcccctctagagtgatccacatccggaagctccccatcgacgtcacggagggggaagtcatctccctggggctgccctttgggaaggtcaccaacctcctgatgctgaaggggaaaaaccaggccttcatcgagatgaacacggaggaggctgccaacaccatggtgaactactacacctcggtgacccctgtgctgcgcggccagcccatctacatccagttctccaaccacaaggagctgaagaccgacagctctcccaaccaggcgcgggcccaggcggccctgcaggcggtgaactcggtccagtcggggaacctggccttggctgcctcggcggcggccgtggacgcagggatggcgatggccgggcagagccccgtgctcaggatcatcgtggagaacctcttctaccctgtgaccctggatgtgctgcaccagattttctccaagttcggcacagtgttgaagatcatcaccttcaccaagaacaaccagttccaggccctgctgcagtatgcggaccccgtgagcgcccagcacgccaagctgtcgctggacgggcagaacatctacaacgcctgctgcacgctgcgcatcgacttttccaagctcaccagcctcaacgtcaagtacaacaatgacaagagccgtgactacacacgcccagacctgccttccggggacagccagccctcgctggaccagaccatggccgcggccttcggtgcacctggtataatctcagcctctccgtatgcaggagctggtttccctcccacctttgccattcctcaagctgcaggcctttccgttccgaacgtccacggcgccctggcccccctggccatcccctcggcggcggcggcagctgcggcggcaggtcggatcgccatcccgggcctggcgggggcaggaaattctgtattgctggtcagcaacctcaacccagaggtcacaccagagagaggcagggggcctggccggctcctgcaggatcatgcagctggggcgcggcggccgcggctgcgacaccccaaccccagccctctaatcaagtcacgtgattctcccttcaccccgcccccagggccttcccttctgcccccaggcgggctccccgctgctccagctgcggagctggtcgacataatctctgtattatatactttgcagttgcagacgtctgtgcctagcaatatttccagttgaccaaatattctaatcttttttcatttatatgcaaaagaaatagttttaagtaactttttatagcaagatgatacaatggtatgagtgtaatctaaacttccttgtggtattaccttgtatgctgttacttttattttattccttgtaattaagtcacaggcaggacccagtttccagagagcaggcggggccgcccagtgggtcaggcacagggagccccggtcctatcttagagcccctgagcttcagggaaggggcgggcgtgtcgccgcctctggcatcgcctccggttgccttacaccacgccttcacctgcagtcgcctagaaaacttgctctcaaacttcagggttttttcttccttcaaattttggaccaaagtctcatttctgtgttttgcctgcctctgatgctgggacccggaaggcgggcgctcctcctgtcttctctgtgctctttctaccgcccccgcgtcctgtcccgggggctctcctaggatcccctttccgtaaaagcgtgtaacaagggtgtaaatatttataattttttatacctgttgtgagacccgaggggcggcggcgcggttttttatggtgacacaaatgtatattttgctaacagcaattccaggctcagtattgtgaccgcggagccacaggggaccccacgcacattccgttgccttacccgatggcttgtgacgcggagagaaccgattaaaaccgtttgagaaactcctcccttgtctagccctgtgttcgctgtggacgctgtagaggcaggttggccagtctgtacctggacttcgaataaatcttctgtatcctcgc

SEQ ID NO: 279142 - DNA, 2207 bp, Homo sapiens
agcgacacgaaaaaaacttaggctaggtacgaggctgggtgttgccactccgtcccccgcgggtctgctctgtgtgccatggacggcattgtcccagatatagccgttggtacaaagcggggatctgacgagcttttctctacttgtgtcactaacggaccgtttatcatgagcagcaactcggcttctgcagcaaacggaaatgacagcaagaagttcaaaggtgacagccgaagtgcaggcgtcccctctagagtgatccacatccggaagctccccatcgacgtcacggagggggaagtcatctccctggggctgccctttgggaaggtcaccaacctcctgatgctgaaggggaaaaaccaggccttcatcgagatgaacacggaggaggctgccaacaccatggtgaactactacacctcggtgacccctgtgctgcgcggccagcccatctacatccagttctccaaccacaaggagctgaagaccgacagctctcccaaccaggcgcgggcccaggcggccctgcaggcggtgaactcggtccagtcggggaacctggccttggctgcctcggcggcggccgtggacgcagggatggcgatggccgggcagagccccgtgctcaggatcatcgtggagaacctcttctaccctgtgaccctggatgtgctgcaccagattttctccaagttcggcacagtgttgaagatcatcaccttcaccaagaacaaccagttccaggccctgctgcagtatgcggaccccgtgagcgcccagcacgccaagctgtcgctggacgggcagaacatctacaacgcctgctgcacgctgcgcatcgacttttccaagctcaccagcctcaacgtcaagtacaacaatgacaagagccgtgactacacacgcccagacctgccttccggggacagccagccctcgctggaccagaccatggccgcggccttcggtgcacctggtataatctcagcctctccgtatgcaggagctggtttccctcccacctttgccattcctcaagctgcaggcctttccgttccgaacgtccacggcgccctggcccccctggccatcccctcggcggcggcggcagctgcggcggcaggtcggatcgccatcccgggcctggcgggggcaggaaattctgtattgctggtcagcaacctcaacccagagagagtcacaccccaaagcctctttattcttttcggcgtctacggtgacgtgcagcgcgtgaagatcctgttcaataagaaggagaacgccctagtgcagatggcggacggcaaccaggcccagctggccatgagccacctgaacgggcacaagctgcacgggaagcccatccgcatcacgctctcgaagcaccagaacgtgcagctgccccgcgagggccaggaggaccagggcctgaccaaggactacggcaactcacccctgcaccgcttcaagaagccgggctccaagaacttccagaacatattcccgccctcggccacgctgcacctctccaacatcccgccctcagtctccgaggaggatctcaaggtcctgttttccagcaatgggggcgtcgtcaaaggattcaagttcttccagaaggaccgcaagatggcactgatccagatgggctccgtggaggaggcggtccaggccctcattgacctgcacaaccacgacctcggggagaaccaccacctgcgggtctccttctccaagtccaccatctaggggcacaggcccccacggccgggccccctggcgacaacttccatcattccagagaaaagccactttaaaaacagctgaagtgaccttagcagaccagagatcctccgtcaacgacaaatccagttacggttccaagaacttcaagctagcgtaccacgtggctcgcccccgtggcgcggcacagggacacgggcaagggccaaggggaacgaggccagtggagagcactcgggacactcaaccagggggcaacacccggggcccacacgagacgaggaagagcacgaaagtacacaaaatgatcacccaacaacaaacggaacgcagtcgacacgacactcgaaaacacccgcggtcgatcagaccaggagatcacacagcaggcgatcctacacaagagcgacgacaccaagaagcaccagcagcagtagatcggtgcggatcggaacgaacat

SEQ ID NO: 279143 - DNA, 3850 bp, Homo sapiens
agcgacacgaaaaaaacttaggctaggtacgaggctgggtgttgccactccgtcccccgcgggtctgctctgtgtgccatggacggcattgtcccagatatagccgttggtacaaagcggggatctgacgagcttttctctacttgtgtcactaacggaccgtttatcatgagcagcaactcggcttctgcagcaaacggaaatgacagcaagaagttcaaaggtgacagccgaagtgcaggcgtcccctctagagtgatccacatccggaagctccccatcgacgtcacggagggggaagtcatctccctggggctgccctttgggaaggtcaccaacctcctgatgctgaaggggaaaaaccaggccttcatcgagatgaacacggaggaggctgccaacaccatggtgaactactacacctcggtgacccctgtgctgcgcggccagcccatctacatccagttctccaaccacaaggagctgaagaccgacagctctcccaaccaggcgcgggcccaggcggccctgcaggcggtgaactcggtccagtcggggaacctggccttggctgcctcggcggcggccgtggacgcagggatggcgatggccgggcagagccccgtgctcaggatcatcgtggagaacctcttctaccctgtgaccctggatgtgctgcaccagattttctccaagttcggcacagtgttgaagatcatcaccttcaccaagaacaaccagttccaggccctgctgcagtatgcggaccccgtgagcgcccagcacgccaagctgtcgctggacgggcagaacatctacaacgcctgctgcacgctgcgcatcgacttttccaagctcaccagcctcaacgtcaagtacaacaatgacaagagccgtgactacacacgcccagacctgccttccggggacagccagccctcgctggaccagaccatggccgcggccttcggtgcacctggtataatctcagcctctccgtatgcaggagctggtttccctcccacctttgccattcctcaagctgcaggtattcaaacgcttggtcttggttccccagcgactgcatgcccacaccaccttcccaggcagctccgcatccacggcggcagcctgggcggactgggcactcgagtgccaggtcaggggcccttcccgggagaggggacgccacgtccacagagcaggcttggccagggcagtggtaggacagggctgtggaggcccacgtgtggacggcgccagccagaagccgctaatcgcacagtctttgtggtctggttcccttcaagcacctccgggcgagcgcgaggaccgccagtggttggagggatgtctctagtagttgaatttgagtggcctggtaagcgcgcggcccgaggctgagcagcatgaccggcggcgggacgtgtgtgcgtggccgtcctcccgcttcccttctgggaccggggcccggccgccccagtgctggccgtggacggagcagcgcgtgccgcccggcggccgcctcgtctgcatggaggcatgggcgcgcatgcgcggtggtcccgggacgggccctgcttgccgagggccccgtgtctgtgctggcggagccggagcttttctgtgctgtgggcggggcgcatgcagatgagcccaggcccggcccggcccgtgctgtgaggagaggcgggcgctggtgcaggagccggcgggtggctgtgcgggggtcgggcgaccccacaggcacccagggtagggccagagccagggccgcctcccgcgcggctcggctcctcggtgcatgaggacggggagcgtcggcctctcccactctgcggtggagtcgggggcgccgccgctcatctcacctcctgcttttccaggcctttccgttccgaacgtccacggcgccctggcccccctggccatcccctcggcggcggcggcagctgcggcggcaggtcggatcgccatcccgggcctggcgggggcaggaaattctgtattgctggtcagcaacctcaacccagaggtacgtgggcttttcctccgcgccgccgttcctcccggaagagcgagcaggggatgttgtgctcgggctcgggtcccggagcagcgccgcccctcgctgtgtctgcgcctctgccctggcagcccctctgctgcagcgctgagaccctccttttccaagatggcttgagttttcctcttttcctgaattcacatcttggttcgcgttttctcttgcatgatacgcagaatgaattattttttggttacccaaaggcaatctaaaaattacttggagctgagcagggcgcgcagttcagagccccagcaggccgccctgctggtcagcgggacacacagggttagcgcggcggggtgtgggcagcccctgtggctcgagagcctgtcacttaactggtggatccgttatttcccagaatggttaaattcccctcggggagagcttgggtgaaacaagaggcccaaaatatgtaactcttgatggatgggatcctcctggaatcagcatttcaggctgttctgtttcccggcaactcctgtgacttcctcaaggcggtgcccagcctggccctccctcgcgggggcccaggacgcactccctgcctgtgcctcttaccacgagccgggtgctgtccctccagctcctcctgagcgaggccgtgcactaacagactcgatctcccttcacgcctgtaatcgtccttagagactgacttgtgccacagctgcgggagacagcgctgctgcagggcttggctgaggtggccgcgagcggagctgcacgcgcgctcctggggggcgtggttgggatcggcttctgggagcccctccagcagcgctgtctctgccggcatgtgagtgaaggtgcttctcttaccgtgtgcccgtcgaggtaaacctgtaactggaatgtgtgtggagtgtgactgatagaacactacctgattcttatgtatttactgacctgtgtttttttgctactttttttcttttctccccttcccctttccctattttttttcttgccctgatccggaatttctttgccaactgactgcacggtacttctgcttcctgttgttgcttgaaacaaaacaaaaacataaacaaataaaaaacaaaaattccccctcaaaccctgctctccggaaaccaacctgcccttgaatattaacatcctgacaacttcatcatccatcaaccactgcacgcctgcggggactgtcttcctcgtgtggacgattggcaactcgccccccttgacctctccctctcccctgtccctccgctgccttgctctgctgtctctaaagagagtcacaccccaaagcctctttattcttttcggcgtctacggtgacgtgcagcgcgtgaagatcctgttcaataagaaggagaacgccctagtgcagatggcggacggcaaccaggcccagctggccatgagccacctgaacgggcacaagctgcacgggaagcccatccgcatcacgctctcgaagcaccagaacgtgcagctgccccgcgagggccaggaggaccagggcctgaccaaggactacggcaactcacccctgcaccgcttcaagaagccgggctccaagaacttccagaacatattcccgccctcggccacgctgcacctctccaacatcccgccctcagtctccgaggaggatctcaaggtcctgttttccagcaatgggggcgtcgtcaaaggattcaagttcttccagaaggaccgcaagatggcactgatccagatgggctccgtggaggaggcggtccaggccctctacctgcccgccaccccata

SEQ ID NO: 279144 - DNA, 2340 bp, Homo sapiens
agcgacacgaaaaaaacttaggctaggtacgaggctgggtgttgccactccgtcccccgcgggtctgctctgtgtgccatggacggcattgtcccagatatagccgttggtacaaagcggggatctgacgagcttttctctacttgtgtcactaacggaccgtttatcatgagcagcaactcggcttctgcagcaaacggaaatgacagcaagaagttcaaaggtgacagccgaagtgcaggcgtcccctctagagtgatccacatccggaagctccccatcgacgtcacggagggggaagtcatctccctggggctgccctttgggaaggtcaccaacctcctgatgctgaaggggaaaaaccaggccttcatcgagatgaacacggaggaggctgccaacaccatggtgaactactacacctcggtgacccctgtgctgcgcggccagcccatctacatccagttctccaaccacaaggagctgaagaccgacagctctcccaaccaggcgcgggcccaggcggccctgcaggcggtgaactcggtccagtcggggaacctggccttggctgcctcggcggcggccgtggacgcagggatggcgatggccgggcagagccccgtgctcaggatcatcgtggagaacctcttctaccctgtgaccctggatgtgctgcaccagattttctccaagttcggcacagtgttgaagatcatcaccttcaccaagaacaaccagttccaggccctgctgcagtatgcggaccccgtgagcgcccagcacgccaagctgtcgctggacgggcagaacatctacaacgcctgctgcacgctgcgcatcgacttttccaagctcaccagcctcaacgtcaagtacaacaatgacaagagccgtgactacacacgcccagacctgccttccggggacagccagccctcgctggaccagaccatggccgcggccttcggtgcacctggtataatctcagcctctccgtatgcaggagctggtttccctcccacctttgccattcctcaagctgcaggtattcaaacgcttggtcttggttccccagcgactgcatgcccacaccaccttcccaggcagctccgcatccacggcggcagcctgggcggactgggcactcgagtgccaggtcaggggcccttcccgggagaggggacgccacgtccacagagcaggcttggccagggcagtggtaggacagggctgtggaggcccacgtgtggacggcgccagccagaagccgctaatcgcacagtctttgtggtctggttcccttcaagcacctccgggcgagcgcgaggaccgccagtggttggagggatgtctctagtagttgaatttgagtggcctggtaagcgcgcggcccgaggctgagcagcatgaccggcggcgggacgtgtgtgcgtggccgtcctcccgcttcccttctgggaccggggcccggccgccccagtgctggccgtggacggagcagcgcgtgccgcccggcggccgcctcgtctgcatggaggcatgggcgcgcatgcgcggtggtcccgggacgggccctgcttgccgagggccccgtgtctgtgctggcggagccggagcttttctgtgctgtgggcggggcgcatgcagatgagcccaggcccggcccggcccgtgctgtgaggagaggcgggcgctggtgcaggagccggcgggtggctgtgcgggggtcgggcgaccccacaggcacccagggtagggccagagccagggccgcctcccgcgcggctcggctcctcggtgcatgaggacggggagcgtcggcctctcccactctgcggtggagtcgggggcgccgccgctcatctcacctcctgcttttccaggcctttccgttccgaacgtccacggcgccctggcccccctggccatcccctcggcggcggcggcagctgcggcggcaggtcggatcgccatcccgggcctggcgggggcaggaaattctgtattgctggtcagcaacctcaacccagagagagtcacaccccaaagcctctttattcttttcggcgtctacggtgacgtgcagcgcgtgaagatcctgttcaataagaaggagaacgccctagtgcagatggcggacggcaaccaggcccagctggccatgagccacctgaacgggcacaagctgcacgggaagcccatccgcatcacgctctcgaagcaccagaacgtgcagctgccccgcgagggccaggaggaccagggcctgaccaaggactacggcaactcacctctctcgctcaagaaccggcgcagtctgtgatagatctctagagt

SEQ ID NO: 279145 - DNA, 560 bp, Homo sapiens
  misc_feature (560)..(560): n is a, c, g, or t
agcgacacgaaaaaaacttaggctaggtacgaggctgggtgttgccactccgtcccccgcgggtctgctctgtgtgccatggacggcattgtcccagatatagccgttggtacaaagcggggatctgacgagcttttctctacttgtgtcactaacggaccgtttatcatgagcagcaactcggcttctgcagcaaacggaaatgacagcaagaagttcaaaggtgacagccgaagtgcaggcgtcccctctagagtgatccacatccggaagctccccatcgacgtcacggagggggaagtcatctccctggggctgccctttgggaaggtcaccaacctcctgatgctgaaggggaaaaaccaggccttcatcgagatgaacacggaggaggctgccaacaccatggtgaactactacacctcggtgacccctgtgctgcgcggccagcccatctacatccagttctccaaccacaaggagctgaagaccgacagctctcccaaccggcctttgacgggtacctgacgctcgcacattctgtacatcactggggtcan

SEQ ID NO: 279146 - DNA, 730 bp, Homo sapiens
gcagggcaaaggaggaaagccagagaaaaggcctcaagtctaggaagaggaagtcaatgctctggaagccagactctggctctctatgcctcaaaggaacaagctcagagctgtgctgggatctaggaaagcctggtcccaggctgaaggggaagcggcgggtcacagtgggtgaggccacactgttctggtcctgatgtcgcgatgcaaacacttcattctgcaagggctcaaagggagacaggtggaggttgttaccagggctggaaagcacctcattcccagagcaaggcagacattaacccctctgctgggcctgctgacctgagatgactccagcaagcttccctggaaattcagcctaagcagctcacctcgtgcatgctgggactgcggcctccctgtaagtgctcaggtctgtaataccacaggaggctcatcatcagctctcctggaaggacaacacagtggttatggcttgaactggcaacctgagttacttagacaggcagagaggctggctggctgccctggaggttcatccaacctcaatcctgcaggctccggcaacccatgtcccctgccccaggccaagcattcagaggcctggaatgctgttaggcatggagggagaagggggagaaggcactgacaggtgaggtggggggacaggtgcccaggctctgctggctggaaaggttaatgagctgatccaacccaagccacaagg

SEQ ID NO: 279147 - DNA, 450 bp, Homo sapiens
tcttgctgctcagctgaatacaaggcctcagtggtttgctgggctttggtgagatcttaaaggcaaacctctcttggcgcaaggaaggagccatgcagttgtatctgtactcgatgtccacagccatcatggggctagatgaacaggctagaaccgtggaaagggaagagaagaaagaaaacagtggagcaatcagatcagacagatgtgtaaaggcatcattccagcagggactggcaaacaatatttccttttatctatgcccacctggctacaggtccacgtatgctcagattctcttctgcctctgccgccctgagacagcaagaccaaccccttctcctcctcttcctcctcctcagcctactcaacgtgaagaggatgagaatgaagacctttatgatgacccgcatccacttaatgaatagtaaatatattttctctttccta

SEQ ID NO: 279148 - DNA, 2686 bp, Homo sapiens
cggaattggacttgggaggcgcggtgaggagtcaggcttaaaacttgttggaggggagtaaccagcctgctcctctcgctctcctcctcgtctgcgccgcgtttcagagagaaaattcctgttccaagagaaaataaggcaacatcaatgaaggagagaagagccagccagaaattatccagcaaatctatcatggatcctaatcagaacgtgaaatgcaagatagttgtggtgggagacagtcagtgtggaaaaactgcgctgctccatgtcttcgccaaggactgcttccccgagaattacgttcctacagtgtttgagaattacacggccagttttgaaatcgacacacaaagaatagagttgagcctgtgggacacttcgggttctccttactatgacaatgtccgccccctctcttaccctgattcggatgctgtgctgatttgctttgacatcagtagaccagagaccctggacagtgtcctcaaaaagtggaaaggtgaaatccaggaattttgtccaaataccaaaatgctcttggtcggctgcaagtctgatctgcggacagatgttagtacattagtagagctctccaatcacaggcagacgccagtgtcctatgaccagggggcaaatatggccaaacagattggagcagctacttatatcgaatgctcagctttacagtcggaaaatagcgtcagagacatttttcacgttgccaccttggcatgtgtaaataagacaaataaaaacgttaagcggaacaaatcacagagagccacaaagcggatttcacacatgcctagcagaccagaactctcggcagttgctacggacttacgaaaggacaaagcgaagagctgcactgtgatgtgaatctttcattatctttaatgaagacaaaggaatctagtgtaaaaaacaacagcaaacaaaaaggtgaagtctaaatgaagtgcacagccaaagtcatgtataccagaggcttaggaggcgtttgagaggatactcatctttttggaatcctgaccttaggttcggcatgtagaccaagtgatgagaagtgaatacatggaagagtttttaagtgtgacttgaaaaatatgccaaaaaatgagagatacaaatgagctagaggaagatgaggggggatgcgagtacctccaagaagaaaaatcacactctgaatggtgcttgcatttttgggtttttttttttttttgttataatctattcatggatctccactttgatttaatttttaaatgttttaatctcctttacaaaaagtatacgttaatataccgtcctcaagggggaactggcactgtgaccttagcatttagttttctagaggatgtgatctaatttctttctagctcatcattaaaaaggaaattgtatcaggacccatgggatatatccagaggcaaactttatgaggctttgaaatcttgccttcctgaagatagctgagtaggatggttctaaggaaagcctttgcaatcttgcaagatttgtagaccagcactacaaagatcgcatagatcaaataggaaaaaaaatgtcgatttttattcagtctgatggttctgttcttcattgtgattgtcattaaaaagtggtaaattgctcaatgtaatatttttgtgcgctgtttagaagttgtgtgattttttgccatcgttgataaaaatgcaaagtcaaataaaaggtgtcttggtttgatgtcatagaatgatccaaggagagaaaaaaggtagttactgttttcaccagaaaaggtaatgagtgaaggaaagaatagtagcagaaagcacagtttgtgagtaaagctgtctggaattaagttaccaaaaatacaaagcaaaaggactattattttgggttgaagctccaaaactgacagcatctgataatctgttggtttatttcacttttcattaaatgaacattgatgagagaagatgccacttacccaagctttagagaatccctagtggaagattatatgataaactttcagtcctgacataacactagggcatttctagagtgtcattgctaaaacctcactgaacagacgcagccaaggtctgtgttcagcacttggtctctgttgttacgtaaaataataagcatttaaaatagtttacagatatttttgaccagttccttttagagattctttcagagaagaaaccagatctgacctgtttattgttggcgcttgttgaaaacgagctttctttcccatgatagtgcttcgtttttgaagtgttgaagctgtgctccccttaaatcgtggcaggagagattaaggtaattacaacactcagttctatgtcttacaagcactttgtcttgtctctgcaagaaaattcgattccagtcatttcccataaaatacagacattttaccaacataatatgctttgattgatgcagcattatgctttgggcagtattacaaaatagctggcgagtgctttctgtatttaaatattgtaaaaagaaaataagttataactgttataaagcagaacttttgttgcattttttaaactgttgaagtcactgtgtatgtttgtttggtcaatgtttccgcagtatttattaaaacatacttttttttttcttcaaataaaaaagtaaccatgtctttgtctaaatgtgatct

SEQ ID NO: 279149 - DNA, 2969 bp, Homo sapiens
cttgttcttaaagaggacagttggaattccaagccaggcattgctgaaggttctaataattattgttagatcatgaaacaactagacaaattggaatagattgaaatagttttaaactaacttgaaggcatatgagctacaggaccagctgccttcccgatgacccaagagatgttcctttgcaaatgtcatggtctgtgttgatgcaaccatgtgaacagaaactccttcaaggcaggatgttctgttttattaactatctcaggtacttaaaatagagcctcagctcgtggtggcatgcttcagtgtttcatgatgggatcagggaatgcatacttgtgctagtgttgcctctgccttatccccagccttctagtgaaggaggatcagatccacacatcgaaggatgtggtcacttgttaggatatataattattcttaagacacatttatctttaagagacacaccaataattaagacattattgaagctacctttggacaacatctaccaagtctctttcagtagcaacagatgagtcacagagagggagaatcaatcataatatacataattattctctaatgcttaaaaagtagtaaaacttcacatctgttcaggagataaatgcaaagtttgcttcttcatctcaagggacactccatttttaacatcttttctgagtttcattctaatgtcagccagtggagaaatggttttcatgatatggataccgttactttgttcatttttaatctttttttttttctttcatagtggaaaggtgaaatccaggaattttgtccaaataccaaaatgctcttggtcggctgcaagtctgatctgcggacagatgttagtacattagtagagctctccaatcacaggcagacgccagtgtcctatgaccagggggcaaatatggccaaacagattggagcagctacttatatcgaatgctcagctttacagtcggaaaatagcgtcagagacatttttcacgttgccaccttggcatgtgtaaataagacaaataaaaacgttaagcggaacaaatcacagagagccacaaagcggatttcacacatgcctagcagaccagaactctcggcagttgctacggacttacgaaaggacaaagcgaagagctgcactgtgatgtgaatctttcattatctttaatgaagacaaaggaatctagtgtaaaaaacaacagcaaacaaaaaggtgaagtctaaatgaagtgcacagccaaagtcatgtataccagaggcttaggaggcgtttgagaggatactcatctttttggaatcctgaccttaggttcggcatgtagaccaagtgatgagaagtgaatacatggaagagtttttaagtgtgacttgaaaaatatgccaaaaaatgagagatacaaatgagctagaggaagatgaggggggatgcgagtacctccaagaagaaaaatcacactctgaatggtgcttgcatttttgggtttttttttttttttgttataatctattcatggatctccactttgatttaatttttaaatgttttaatctcctttacaaaaagtatacgttaatataccgtcctcaagggggaactggcactgtgaccttagcatttagttttctagaggatgtgatctaatttctttctagctcatcattaaaaaggaaattgtatcaggacccatgggatatatccagaggcaaactttatgaggctttgaaatcttgccttcctgaagatagctgagtaggatggttctaaggaaagcctttgcaatcttgcaagatttgtagaccagcactacaaagatcgcatagatcaaataggaaaaaaaatgtcgatttttattcagtctgatggttctgttcttcattgtgattgtcattaaaaagtggtaaattgctcaatgtaatatttttgtgcgctgtttagaagttgtgtgattttttgccatcgttgataaaaatgcaaagtcaaataaaaggtgtcttggtttgatgtcatagaatgatccaaggagagaaaaaaggtagttactgttttcaccagaaaaggtaatgagtgaaggaaagaatagtagcagaaagcacagtttgtgagtaaagctgtctggaattaagttaccaaaaatacaaagcaaaaggactattattttgggttgaagctccaaaactgacagcatctgataatctgttggtttatttcacttttcattaaatgaacattgatgagagaagatgccacttacccaagctttagagaatccctagtggaagattatatgataaactttcagtcctgacataacactagggcatttctagagtgtcattgctaaaacctcactgaacagacgcagccaaggtctgtgttcagcacttggtctctgttgttacgtaaaataataagcatttaaaatagtttacagatatttttgaccagttccttttagagattctttcagagaagaaaccagatctgacctgtttattgttggcgcttgttgaaaacgagctttctttcccatgatagtgcttcgtttttgaagtgttgaagctgtgctccccttaaatcgtggcaggagagattaaggtaattacaacactcagttctatgtcttacaagcactttgtcttgtctctgcaagaaaattcgattccagtcatttcccataaaatacagacattttaccaacataatatgctttgattgatgcagcattatgctttgggcagtattacaaaatagctggcgagtgctttctgtatttaaatattgtaaaaagaaaataagttataactgttataaagcagaacttttgttgcattttttaaactgttgaagtcactgtgtatgtttgtttggtcaatgtttccgcagtatttattaaaacatacttttttttttcttcaaataaaaaagtaaccatgtctttgtctaaatgtgatct

SEQ ID NO: 279150 - DNA, 280 bp, Homo sapiens
gaaaattcctgttccaagagaaaataaggcaacatcaatgaaggagagaagagccagccagaaattatccagcaaatctatcatggatcctaatcagaacgtgaaatgcaagatagttgtggtgggagacagtcagtgtggaaaaactgcgctgctccatgtcttcgccaaggactgcttccccgaggtgagtgtggccggccgcggcttccacgagggggtcggccagtgggatcccagtcccgaggtgggcctccccgctttcatccgttttccctta

SEQ ID NO: 279151 - DNA, 2780 bp, Homo sapiens
cggaattggacttgggaggcgcggtgaggagtcaggcttaaaacttgttggaggggagtaaccagcctgctcctctcgctctcctcctcgtctgcgccgcgtttcagaggttgcccatcagccttgtgatttatttttatatctgctttttataaagagagaaatatatatatatatatatatattttttttttcttcttaagagaaaattcctgttccaagagaaaataaggcaacatcaatgaaggagagaagagccagccagaaattatccagcaaatctatcatggatcctaatcagaacgtgaaatgcaagatagttgtggtgggagacagtcagtgtggaaaaactgcgctgctccatgtcttcgccaaggactgcttccccgagaattacgttcctacagtgtttgagaattacacggccagttttgaaatcgacacacaaagaatagagttgagcctgtgggacacttcgggttctccttactatgacaatgtccgccccctctcttaccctgattcggatgctgtgctgatttgctttgacatcagtagaccagagaccctggacagtgtcctcaaaaagtggaaaggtgaaatccaggaattttgtccaaataccaaaatgctcttggtcggctgcaagtctgatctgcggacagatgttagtacattagtagagctctccaatcacaggcagacgccagtgtcctatgaccagggggcaaatatggccaaacagattggagcagctacttatatcgaatgctcagctttacagtcggaaaatagcgtcagagacatttttcacgttgccaccttggcatgtgtaaataagacaaataaaaacgttaagcggaacaaatcacagagagccacaaagcggatttcacacatgcctagcagaccagaactctcggcagttgctacggacttacgaaaggacaaagcgaagagctgcactgtgatgtgaatctttcattatctttaatgaagacaaaggaatctagtgtaaaaaacaacagcaaacaaaaaggtgaagtctaaatgaagtgcacagccaaagtcatgtataccagaggcttaggaggcgtttgagaggatactcatctttttggaatcctgaccttaggttcggcatgtagaccaagtgatgagaagtgaatacatggaagagtttttaagtgtgacttgaaaaatatgccaaaaaatgagagatacaaatgagctagaggaagatgaggggggatgcgagtacctccaagaagaaaaatcacactctgaatggtgcttgcatttttgggtttttttttttttttgttataatctattcatggatctccactttgatttaatttttaaatgttttaatctcctttacaaaaagtatacgttaatataccgtcctcaagggggaactggcactgtgaccttagcatttagttttctagaggatgtgatctaatttctttctagctcatcattaaaaaggaaattgtatcaggacccatgggatatatccagaggcaaactttatgaggctttgaaatcttgccttcctgaagatagctgagtaggatggttctaaggaaagcctttgcaatcttgcaagatttgtagaccagcactacaaagatcgcatagatcaaataggaaaaaaaatgtcgatttttattcagtctgatggttctgttcttcattgtgattgtcattaaaaagtggtaaattgctcaatgtaatatttttgtgcgctgtttagaagttgtgtgattttttgccatcgttgataaaaatgcaaagtcaaataaaaggtgtcttggtttgatgtcatagaatgatccaaggagagaaaaaaggtagttactgttttcaccagaaaaggtaatgagtgaaggaaagaatagtagcagaaagcacagtttgtgagtaaagctgtctggaattaagttaccaaaaatacaaagcaaaaggactattattttgggttgaagctccaaaactgacagcatctgataatctgttggtttatttcacttttcattaaatgaacattgatgagagaagatgccacttacccaagctttagagaatccctagtggaagattatatgataaactttcagtcctgacataacactagggcatttctagagtgtcattgctaaaacctcactgaacagacgcagccaaggtctgtgttcagcacttggtctctgttgttacgtaaaataataagcatttaaaatagtttacagatatttttgaccagttccttttagagattctttcagagaagaaaccagatctgacctgtttattgttggcgcttgttgaaaacgagctttctttcccatgatagtgcttcgtttttgaagtgttgaagctgtgctccccttaaatcgtggcaggagagattaaggtaattacaacactcagttctatgtcttacaagcactttgtcttgtctctgcaagaaaattcgattccagtcatttcccataaaatacagacattttaccaacataatatgctttgattgatgcagcattatgctttgggcagtattacaaaatagctggcgagtgctttctgtatttaaatattgtaaaaagaaaataagttataactgttataaagcagaacttttgttgcattttttaaactgttgaagtcactgtgtatgtttgtttggtcaatgtttccgcagtatttattaaaacatacttttttttttcttcaaataaaaaagtaaccatgtctttgtctaaatgtgatct

SEQ ID NO: 279152 - DNA, 1189 bp, Homo sapiens
tctttgacatttcacattttatttttagtaccatatcctttgtcagtgctcatcagaatgcacattaaaatgggtttattttatgcatattactgtaccacaataaatttattacaaatcacatgacctttatgttagacattttaatacatcaataggaggtcacgtttcattcagaaaatagcagtttttccctcaaacaccttcaggtttactgtgggttcacatagcctaggttaagcagttggcaacattttgcttcactgtctggttttacaaagctttcttgtgacaacaggtataaaagagtctaccgagttcaccaagacatctgcttcaaagagagctgtgaaagcacaagcctcaagaagaccccaaacaggtgcctctggggagcaggcccatgccgtgtcctgcatgtagcccacagggtgatggggcaagggcggggtgctatgggatgctgcaggcctgtgggctgagccaggcggtctactcgcccagataggcagccctgggcagccacgttctgctacgaaactgtatgtccatatatgtgcatgtgagcatacccagaggggcacagccgggcatgctgggtgctggggggggtcactctggttatgcatattcacacagaacatggtgctacaattgggaagcacagggtgttacggacagccccgagtatttaatggccgatatagcgcgtcgctctttactttttattcactcacacccaggttctttccacaaagggttcaaggtagttacaagaattactactgtttggcgtttgctgaaagaagtacgtgagaatattatatgctttagaaaccacagagtcgaagcctgtcatcgtcctcatagaccaatgagtagccacacgtacttgtttggcattaccaagtgtccgggcaaggccgcagcctgcagctcaccagccgtgctgctcggcctgtgcacgtcaccggctcttccctagggtagcttttgcttgctttctcccacgtccatcctctctctctctgactcacagccagccaggtttctagccttgtcattcctaaactactgcctcaagccaggcgggcgcacacaaactaaaatgctaatctccacagcggtgtctggactaatggtgtcccccaccgtggaatgtatgtgagctaaagacaggatctcagca

SEQ ID NO: 279153 - DNA, 989 bp, Homo sapiens
tgaagcactgggtgaagcactgggtgaagcactgggttaagcagttggcaacattttgcttcactgtctggttttacaaagctttcttgtgacaacaggtataaaagagtctaccgagttcaccaagacatctgcttcaaagagagctgtgaaagcacaagcctcaagaagaccccaaacaggtgcctctggggagcaggcccatgccgtgtcctgcatgtagcccacagggtgatggggcaagggcggggtgctatgggatgctgcaggcctgtgggctgagccaggcggtctactcgcccagataggcagccctgggcagccacgttctgctacgaaactgtatgtccatatatgtgcatgtgagcatacccagaggggcacagccgggcatgctgggtgctggggggggtcactctggttatgcatattcacacagaacatggtgctacaattgggaagcacagggtgttacggacagccccgagtatttaatggccgatatagcgcgtcgctctttactttttattcactcacacccaggttctttccacaaagggttcaaggtagttacaagaattactactgtttggcgtttgctgaaagaagtacgtgagaatattatatgctttagaaaccacagagtcgaagcctgtcatcgtcctcatagaccaatgagtagccacacgtacttgtttggcattaccaagtgtccgggcaaggccgcagcctgcagctcaccagccgtgctgctcggcctgtgcacgtcaccggctcttccctagggtagcttttgcttgctttctcccacgtccatcctctctctctctgactcacagccagccaggtttctagccttgtcattcctaaactactgcctcaagccaggcgggcgcacacaaactaaaatgctaatctccacagcggtgtctggactaatggtgtcccccaccgtggaatgtatgtgagctaaagacaggatctcagca

SEQ ID NO: 279154 - DNA, 877 bp, Homo sapiens
tctttgacatttcacattttatttttagtaccatatcctttgtcagtgctcatcagaatgcacattaaaatgggtttattttatgcatattactgtaccacaataaatttattacaaatcacatgacctttatgttagacattttaatacatcaataggaggtcacgtttcattcagaaaatagcagtttttccctcaaacaccttcaggtttactgtgggttcacatagcctaggttaagcagttggcaacattttgcttcactgtctggttttacaaagctttcttgtgacaacaggtataaaagagtctaccgagttcaccaagacatctgcttcaaagagagctgtgaaagcacaagcctcaagaagaccccaaacaggaaacaaagtaagagtcagacactggagaaatcttaaggatttaagacgttcttgttacactccaccaacctcacgagtttctaacacccaggaagatgaggtctaaaaactggatgaaaaaggacaccctgagaaaaggtcctagctggagtcagtcccctctgtgacctctctcctcaggcctctagaggacagatggccaggcctgtgcacacaccagcccaccctgagagacccctctgggaccaaccacctgtgagtcctgcgatgcgtttaagcagcctgtgccctcacccaagctgcagttcctgaaggtgtagtctgtgtctctgcggatgagatgacagctcgccattccccggaatcagtgaggctgtcagtcagccacgcttctgcagtatgcagaaacctgttcttagactccaaagccagagaaagaattctcccttcgaggcccaacaaattgagaaggaactgtgatgggaccacttcca

SEQ ID NO: 279155 - DNA, 670 bp, Homo sapiens
tggctaatgcctgctcatttctcatagcgcagcccatttactgccttctccaggaagcttttctgaatcctccagtgagtaagggagagcccactgctaaaaaaggcctagtcaaatcctcaggtgtacatggacatcaagattgggaacaagccggctggctgcatccaaaccctcctgcgttccgacgtcgtgcccatgaccacagagaattttctctacatgtgcacccatttaaaggactcggcttcaagggaagcagcttccaccgcattatcccccagttcatttgccagggcagtgatttcacaaaccacggtggcaccaggggtctgcgcaggcatggcactaagtgtcccatggcacatttggccctcatggaggcctcaaaagggcaggaccagcaccctcttctacggaggaaggaacgggcacagcagaaacaaggagagtcagcaattaccagccagccaaggtcctggaagctgacgtagagctcgtgccgacggcagacctgccggccgtgggagccgcggacgtcatctgcagggacagaaggggcaaggtcttttctggggttcctgctgtgtgcagctactatggggtaccagggtgggggatgccctgatgagcacatttgtcaaataaatgaatgacaggaaaccaaaag

SEQ ID NO: 279156 - DNA, 847 bp, Homo sapiens
tgaccagggactgcaggatggcgtggttggtggcgttcatgcaggagtccagcgggaaggagcactccccctcacagtaataggctgagtagccttggggggcgatgacccagtcctggggggcaagggagaaggtgagtcccatccatgtgctcctccctgagcctcagggcccaaacccatcctccagccctgcagggccgtctcccccaagaggcttgaatccacccaggaacccccggcggaaaaggctgggcaggagctcaggcccaacaacccccatcttcactttgtgtcccctccccagccggccctccccagccggccctcccctgcccacacctcccagagctgcagtcgtagccaatgcagggaggtctcagttaccctgcggcaatgctgacagcttagttggttgattcagtcttcattttcatggttttaaaaaaaacaaaaaacacaaccaacaacaacaaaaccctttctcaccatattctcactttagaaaacttggaaaacacagaagaaaaaaatacataagaaaattgaagtcaccatgattctatgtcctccctgcagattcacttctgatctacaggtggtgattgtcatttcagaaacaaggagagtcagcaattaccagccagccaaggtcctggaagctgacgtagagctcgtgccgacggcagacctgccggccgtgggagccgcggacgtcatctgcagggacagaaggggcaaggtcttttctggggttcctgctgtgtgcagctactatggggtaccagggtgggggatgccctgatgagcacatttgtcaaataaatgaatgacaggaaaccaaaag

SEQ ID NO: 279157 - DNA, 504 bp, Homo sapiens
cgtgctgcctcggaccacctgcccagtcgagctgccatcacctgccagggtgagccactgcgcctgatcaaggcatcaccgttgaacctcctaagaggaaaacataaggctgtgcaataccaggaactgggattctaggttgccccagacaccaaggcatcaaaagccaggggatccagagaaaacacagacagccaagagagaaactgcgggaaaaagccaaaaggttgagagccacaccatctagaagcttcctgcctgtggtgcggcacagaaacaaggagagtcagcaattaccagccagccaaggtcctggaagctgacgtagagctcgtgccgacggcagacctgccggccgtgggagccgcggacgtcatctgcagggacagaaggggcaaggtcttttctggggttcctgctgtgtgcagctactatggggtaccagggtgggggatgccctgatgagcacatttgtcaaataaatgaatgacaggaaaccaaaag

SEQ ID NO: 279158 - DNA, 1107 bp, Homo sapiens
gattgttgaccaatgggatgaagctgtggtactgccaggggacagagttgcctctgttgagccaggaagctgtgggaagttgtaggttcctgactgaggcctgaggtggtggtgctgtcaggcaacgctgttgtgtgcgttgagcctggttgactgtgggatgtgctggattcttcgctgaggcctgagctaggttgtggatcatgggcaagaaaagcgctgttctgggactgcggggcaggagaaggaaactgatgcttctgagggtgagtctgatgagataacatgcctgtgtgtgggcctcaggttagacagtgctgaggtctcccgtcactgggcatccagctgggtgctacggccgtggctcctgccttctgcagccctgtcagggcccaaggccttccccatcagcacttgctccagcctactcactggagttgtgttctgggtgggtgtgtagaatactcgcactcctacttggggcatcagggagctctctagcaatttcttctgcacctagggagagcccactgctaaaaaaggcctagtcaaatcctcaggtgtacatggacatcaagattgggaacaagccggctggctgcatccaaaccctcctgcgttccgacgtcgtgcccatgaccacagagaattttctctacatgtgcacccatttaaaggactcggcttcaagggaagcagcttccaccgcattatcccccagttcatttgccagggcagtgatttcacaaaccacggtggcaccaggggtctgcgcaggcatggcactaagtgtcccatggcacatttggccctcatggaggcctcaaaagggcaggaccagcaccctcttctacggaggaaggaacgggcacagcagaaacaaggagagtcagcaattaccagccagccaaggtcctggaagctgacgtagagctcgtgccgacggcagacctgccggccgtgggagccgcggacgtcatctgcagggacagaaggggcaaggtcttttctggggttcctgctgtgtgcagctactatggggtaccagggtgggggatgccctgatgagcacatttgtcaaataaatgaatgacaggaaaccaaaag

SEQ ID NO: 279159 - DNA, 997 bp, Homo sapiens
ctgggcaataagagctactccagcctgggcaataagagctactccagcctgggcaataagagctactccagcctgggcaataagagctactccaccctgggcaaaagcgctgttctgggactgcggggcaggagaaggaaactgatgcttctgagggtgagtctgatgagataacatgcctgtgtgtgggcctcaggttagacagtgctgaggtctcccgtcactgggcatccagctgggtgctacggccgtggctcctgccttctgcagccctgtcagggcccaaggccttccccatcagcacttgctccagcctactcactggagttgtgttctgggtgggtgtgtagaatactcgcactcctacttggggcatcagggagctctctagcaatttcttctgcacctagggagagcccactgctaaaaaaggcctagtcaaatcctcaggtgtacatggacatcaagattgggaacaagccggctggctgcatccaaaccctcctgcgttccgacgtcgtgcccatgaccacagagaattttctctacatgtgcacccatttaaaggactcggcttcaagggaagcagcttccaccgcattatcccccagttcatttgccagggcagtgatttcacaaaccacggtggcaccaggggtctgcgcaggcatggcactaagtgtcccatggcacatttggccctcatggaggcctcaaaagggcaggaccagcaccctcttctacggaggaaggaacgggcacagcagaaacaaggagagtcagcaattaccagccagccaaggtcctggaagctgacgtagagctcgtgccgacggcagacctgccggccgtgggagccgcggacgtcatctgcagggacagaaggggcaaggtcttttctggggttcctgctgtgtgcagctactatggggtaccagggtgggggatgccctgatgagcacatttgtcaaataaatgaatgacaggaaaccaaaag

SEQ ID NO: 279160 - DNA, 1146 bp, Homo sapiens
gattgttgaccaatgggatgaagctgtggtactgccaggggacagagttgcctctgttgagccaggaagctgtgggaagttgtaggttcctgactgaggcctgaggtggtggtgctgtcaggcaacgctgttgtgtgcgttgagcctggttgactgtgggatgtgctggattcttcgctgaggcctgagctaggttgtggatcatgggcaagaaaagcgctgttctgggactgcggggcaggagaaggaaactgatgcttctgagggtgagtctgatgagataacatgcctgtgtgtgggcctcaggttagacagtgctgaggtctcccgtcactgggcatccagctgggtgctacggccgtggctcctgccttctgcagccctgtcagggcccaaggccttccccatcagcacttgctccagcctactcactggagttgtgttctgggtgggtgtgtagaatactcgcactcctacttggggcatcagggagctctctagcaatttcttctgcacctagggagagcccactgctaaaaaaggcctagtcaaatcctcaggtgtacatggacatcaagattgggaacaagccggctggctgcatccaaaccctcctgcgttccgacgtcgtgcccatgaccacagagaattttctctacatgtgcacccatttaaaggactcggcttcaagggaagcagcttccaccgcattatcccccagttcatttgccagggcagtgatttcacaaaccacggtggcaccaggggtctgcgcaggcatggcactaagtgtcccatggcacatttggccctcatggaggcctcaaaagggcaggaccagcaccctcttctacggaggaaggaacgggcacagcaggtacatgatgtggtcaaattaacaagaggcagaggccggaaacaaggagagtcagcaattaccagccagccaaggtcctggaagctgacgtagagctcgtgccgacggcagacctgccggccgtgggagccgcggacgtcatctgcagggacagaaggggcaaggtcttttctggggttcctgctgtgtgcagctactatggggtaccagggtgggggatgccctgatgagcacatttgtcaaataaatgaatgacaggaaaccaaaag

SEQ ID NO: 279161 - DNA, 575 bp, Homo sapiens
cgtgctgcctcggaccacctgcccagtcgagctgccatcacctgccagggtgagccactgcgcctgatcaaggcatcaccgttgaacctcctaagaggaaaacataaggctgtgcaataccaggaactgggattctaggtaaaaacttctagaaggaagcctcggtgccagaatccgcaaacacacagagcactcagtggtgagcagcaccagtgatcccatcagaagcctgcttttgtcctttaaggttgccccagacaccaaggcatcaaaagccaggggatccagagaaaacacagacagccaagagagaaactgcgggaaaaagccaaaaggttgagagccacaccatctagaagcttcctgcctgtggtgcggcacaggtgggtgagtgcacacgcacaccccacacactgtgcgcacatatcacgggcggtcagtattgccagcgtactcgggggcccgtgtgttaagatcacacagcccccacacagtgtacacatctgtttcatgtgctgtgcctctgagcgccgcacgcaggtgtgtaagtgtcccacaggagtatgctcagcgct

SEQ ID NO: 279162 - DNA, 227 bp, Homo sapiens
ccgtggctgggacccaaatgattatttttatttttgtagagatggcatgttacagagagctggagttttaattatctagttagatattcttacctcagcacttttctctttctcaatcccagagaattttctctacatgtgcacccatttaaaggactcggcttcaagggaagcagcttccaccgcattatcccccagttcatttgccagggcagtgatttcacaaa

SEQ ID NO: 279163 - DNA, 923 bp, Homo sapiens
  misc_feature (77)..(77): n is a, c, g, or t
  misc_feature (80)..(80): n is a, c, g, or t
  misc_feature (91)..(91): n is a, c, g, or t
  misc_feature (105)..(105): n is a, c, g, or t
  misc_feature (108)..(109): n is a, c, g, or t
aagtcttccatcttgtaccaagtggtcaagcagtggtgatggtcccatttttgtggcaggcggttcggttgagtagngangaggtcaattnaatggtttggcaantgnnaagattacaggctgtgccagccctggaaaaacagttacaattgttgttcgtggttctaacaaactggtgattgaagaagctgagcgctccattcatgatgccctatgtgttattcgttgtttagtgaagaagagggctcttattgcaggaggtggtgctccagaaatagagttggccctacgattaactgaatattcacgaacactgagtggtatggaatcctactgcgttcgtgcttttgcagatgctatggaggtcattccatctacactagctgaaaatgccggcctgaatcccatttctacagtaacagaactaagaaaccggcatgcccagggagaaaaaactgcaggcattaatgtccgaaagggtggtatttccaacattttggaggaactggttgtccagcctctgttggtatcagtcagtgctctgactcttgcaactgaaactgttcggagcattctgaaaatagatgatgtggtaaacactcgataatctggataactgactagcaccattatgatcaccagtattgtggctggaatggaagaagatcaccttggtgttccttgtttggaagattatttcctctgaatttctgggcttggtcttccagttggcatttgcctgaagttgtattgaaacaatttaatgaaaatattaaatatttggtttcaaaaggcagatttatcttctcccaacattctgttatttctgatacttttgaaaaactaataaaaactaataaaagaatctcgcatgcgggccggcggccccccccgtacgtctcttacatacacgacattattga

SEQ ID NO: 279164 - DNA, 453 bp, Homo sapiens
aatacaaaaaattagccgggcatggtggcgcgtgcctgtaatcccagctaaggcaggagaatcacttgaacccgggaggtagaggttgcagtgagccaagatcatgccattgcagtccagcctgggcaacaagagcaaactccatctcaaaaaaaaaaaaaaagaaatgagtggtagaaatattactaatcttggactcttatacaagaaagaagatttgggagagaaagtcaggattgtctttgctttagtaaatggtatttaattatagtagtgactatccaatcacttattttacttataatgtagatttgtgatattttgagaagtatcggccaggtgcggtgactcatacttgtaatcccagcactttgggaggctgaggctggcagaacaattgagcccaaggagttgagaccagactgggcaacatggcaaaaccctgtctccacc

SEQ ID NO: 279165 - DNA, 658 bp, Homo sapiens
aaaagtttaataaaactattaaggtgtgacattgaaatataactttaaaattttttttctagattcaagatggaaaaggtgatgtaaccattacaaatgatggtgctaccattctgaaacaaatgcaagtattacatccagcagccagaatgctggtggtaagtgtaattttaggtgagtctttttttttttttttttttgagacagagtcttgctctgtcatccaggctagagtgccgtggcacaatctcagctcactgcaacctctgcctcccagattcatttctcctgcctcagcctcctgagtagctgggattacaggctcgtgccaccatgcctggttgatttttgtattttcagtagagacgggtttcaccatgttggtcaggctgttctcaaactcctgaccttgtgatccacctacgttggcctcccaaagtgctgggattacagacatgagctactgcgcccggccagatgagtcttcttttttaagtgtatttgatacttggtaaacagttaaatttatttgatcacatgatatttaagcacgatgaacacttttcgtgctgaacaggcatatttttaggatacattgtgtgcctaacattgtgctttttggtgtgagggggttttcgacatttagccggccttctgg

SEQ ID NO: 279166 - DNA, 374 bp, Homo sapiens
  misc_feature (133)..(133): n is a, c, g, or t
gtagttaggattgggtgacaccagcattaattcagttttccaaattttaattgaaataacatcccacagtgtagagaaaagcttagtagagtatcatattctaatcttcttagaaagaaaactagatttaggncttgaggtacactggtaaccacgtggctgctgatgtgtattatcacagacactaaaagcaacttgtgctgatttgatttgcagggtggtatttccaacattttggaggaactggttgtccagcctctgttggtatcagtcagtgctctgactcttgcaactgaaactgttcggagcattctgaaaatagatgatgtgtaagtgtttccaggttgcaaattttcttaggaggtcaaaaaggc

SEQ ID NO: 279167 - DNA, 2549 bp, Homo sapiens
agcggcttctccgcctccgcctcctcccgacgccggcgccgctttctggaaggttcgtgaaggcagtgagggcttaccgttattacactgcggccggccagaatccgggtccatccgtccttcccgagccaacccagacacagcggagtttgccatgcccgagaatgtggcaccccggagcggggcgactgccggggctgccggcggccgcgggaaaggcgcctatcaggaccgcgacaagccagcccagatccgcttcagcaacatttccgccgccaaagcggttgctgatgctattagaacaagccttggaccaaaaggaatggataaaatgattcaagatggaaaaggtgatgtaaccattacaaatgatggtgctaccattctgaaacaaatgcaagtattacatccagcagccagaatgctggtggagctgtctaaggctcaagatatagaagcaggagatggcaccacatcagtagtcatcattgctggctccctcttagattcttgtaccaagcttcttcagaaagggattcatccaaccatcatttctgagtcattccagaaggccctggaaaagggcattgaaatcttgactgacatgtctcgacctgtggaactgagtgacagagaaactttgttaaatagtgcaaccacttcactgaactcaaaggtggtttctcagtattcaagtctgctttctccaatgagtgtaaatgcagtgatgaaagtgattgacccagccacagccaccagtgtagatcttagagatattaaaatagttaagaagcttggtgggacaattgatgactgtgagttggtggaagggctggttctcacccaaaaagtgtcaaattctggcataaccagagttgaaaaggccaagattgggcttattcagttttgcttatctgctcccaaaacagacatggataatcaaatagtggtttctgactatgcccagatggaccgagtgctgcgagaagagagagcctatattttaaatttagtgaagcaaattaaaaaaacaggatgtaatgtccttctcatacagaaatctattctaagagatgctcttagtgatcttgcattacactttctgaataaaatgaagatcatggtgattaaggatattgaaagagaagacattgaattcatttgtaagacaattggaaccaagccagttgctcatattgaccaatttactgctgacatgctgggttctgctgagttagctgaggaggtcaatttaaatggttctggcaaactgctcaagattacaggctgtgccagccctggaaaaacagttacaattgttgttcgtggttctaacaaactggtgattgaagaagctgagcgctccattcatgatgccctatgtgttattcgttgtttagtgaagaagagggctcttattgcaggaggtggtgctccagaaatagagttggccctacgattaactgaatattcacgaacactgagtggtatggaatcctactgcgttcgtgcttttgcagatgctatggaggtcattccatctacactagctgaaaatgccggcctgaatcccatttctacagtaacagaactaagaaaccggcatgcccagggagaaaaaactgcaggcattaatgtccgaaagggtggtatttccaacattttggaggaactggttgtccagcctctgttggtatcagtcagtgctctgactcttgcaactgaaactgttcggagcattctgaaaatagatgatgtggtaaacactcgataatctggataactgactagcaccattatgatcaccagtattgtggctggaatggaagaagatcaccttggtgttccttgtttggaagattatttcctctgaatttctgggcttggtcttccagttggcatttgcctgaagttgtattgaaacaatttaatgaaaatattaaatatttggtttcaaaaggcagatttatcttctcccaacattctgttatttctgatacttttgaaaaactaataaaaactaataaaagaagcgtaaaaagtgagtttacatgttgaggaaaaaaatggcccaatatgctcatcactgataaatgctccctggccttaaaaactaccaacatataatatatatgctgtcttaaaagttaatgatccaagtggcacctctctgaacctactttggcttgggaggctgcccagttaaaacaaaaataagttaatggtacagaaagagaatgaaaaatgaaagcctccttttatcctatcatcctaattccttttcccagtaataatgactgctgtgttggattccttctgcaaataaaagtgtatacagtaaaaaaaaacgaagaaaaaaaaaaaacaaaaaaaaacacaaaaagaacaaaagaaaagaaacaaagaaaaaaaaaaagacaatcaagaaaaaaacaaaaaagaacatcaaaacacaaacaacaaaaaaaaaaaagaaagggggggggccaacatgaaaaccaacaggaggagacgcaaaagagacaacgcgagaggagaaaagccgcaaa

SEQ ID NO: 279168 - DNA, 2546 bp, Homo sapiens
  misc_feature (36)..(36): n is a, c, g, or t
  misc_feature (43)..(43): n is a, c, g, or t
tcacggcagttactccccggcgtatgtaccgaggcngggtggngggaaggttcgtgaaggcagtgagggcttaccgttattacactgcggccggccagaatccgggtccatccgtccttcccgagccaacccagacacagcggagtttgccatgcccgagaatgtggcaccccggagcggggcgactgccggggctgccggcggccgcgggaaaggcgcctatcaggaccgcgacaagccagcccagatccgcttcagcaacatttccgccgccaaagcggttgctgatgctattagaacaagccttggaccaaaaggaatggataaaatgattcaagatggaaaaggtgatgtaaccattacaaatgatggtgctaccattctgaaacaaatgcaagtattacatccagcagccagaatgctggtggagctgtctaaggctcaagatatagaagcaggagatggcaccacatcagtagtcatcattgctggctccctcttagattcttgtaccaagcttcttcagaaagggattcatccaaccatcatttctgagtcattccagaaggccctggaaaagggcattgaaatcttgactgacatgtctcgacctgtggaactgagtgacagagaaactttgttaaatagtgcaaccacttcactgaactcaaaggtggtttctcagtattcaagtctgctttctccaatgagtgtaaatgcagtgatgaaagtgattgacccagccacagccaccagtgtagatcttagagatattaaaatagttaagaagcttggtgggacaattgatgactgtgagttggtggaagggctggttctcacccaaaaagtgtcaaattctggcataaccagagttgaaaaggccaagattgggcttattcagttttgcttatctgctcccaaaacagacatggataatcaaatagtggtttctgactatgcccagatggaccgagtgctgcgagaagagagagcctatattttaaatttagtgaagcaaattaaaaaaacaggatgtaatgtccttctcatacagaaatctattctaagagatgctcttagtgatcttgcattacactttctgaataaaatgaagatcatggtgattaaggatattgaaagagaagacattgaattcatttgtaagacaattggaaccaagccagttgctcatattgaccaatttactgctgacatgctgggttctgctgagttagctgaggaggtcaatttaaatggttctggcaaactgctcaagattacaggctgtgccagccctggaaaaacagttacaattgttgttcgtggttctaacaaactggtgattgaagaagctgagcgctccattcatgatgccctatgtgttattcgttgtttagtgaagaagagggctcttattgcaggaggtggtgctccagaaatagagttggccctacgattaactgaatattcacgaacactgagtggtatggaatcctactgcgttcgtgcttttgcagatgctatggaggtcattccatctacactagctgaaaatgccggcctgaatcccatttctacagtaacagaactaagaaaccggcatgcccagggagaaaaaactgcaggcattaatgtccgaaagggtggtatttccaacattttggaggaactggttgtccagcctctgttggtatcagtcagtgctctgactcttgcaactgaaactgttcggagcattctgaaaatagatgatgtggtaaacactcgataatctggataactgactagcaccattatgatcaccagtattgtggctggaatggaagaagatcaccttggtgttccttgtttggaagattatttcctctgaatttctgggcttggtcttccagttggcatttgcctgaagttgtattgaaacaatttaatgaaaatattaaatatttggtttcaaaaggcagatttatcttctcccaacattctgttatttctgatacttttgaaaaactaataaaaactaataaaagaagcgtaaaaagtgagtttacatgttgaggaaaaaaatggcccaatatgctcatcactgataaatgctccctggccttaaaaactaccaacatataatatatatgctgtcttaaaagttaatgatccaagtggcacctctctgaacctactttggcttgggaggctgcccagttaaaacaaaaataagttaatggtacagaaagagaatgaaaaatgaaagcctccttttatcctatcatcctaattccttttcccagtaataatgactgctgtgttggattccttctgcaaataaaagtgtatacagtaaaaaaaaacgaagaaaaaaaaaaaacaaaaaaaaacacaaaaagaacaaaagaaaagaaacaaagaaaaaaaaaaagacaatcaagaaaaaaacaaaaaagaacatcaaaacacaaacaacaaaaaaaaaaaagaaagggggggggccaacatgaaaaccaacaggaggagacgcaaaagagacaacgcgagaggagaaaagccgcaaa

SEQ ID NO: 279169 - DNA, 2566 bp, Homo sapiens
aagctaggtacgaggctgcgtttaatcggcagagggcttcctcccgtacgcaggagcgctttctggaaggttcgtgaaggcagtgagggcttaccgttattacactgcggccggccagaatccgggtccatccgtccttcccgagccaacccagacacagcggagtttgccatgcccgagaatgtggcaccccggagcggggcgactgccggggctgccggcggccgcgggaaaggcgcctatcaggaccgcgacaagccagcccagatccgcttcagcaacatttccgccgccaaagcggttgctgatgctattagaacaagccttggaccaaaaggaatggataaaatgattcaagatggaaaaggtgatgtaaccattacaaatgatggtgctaccattctgaaacaaatgcaagtattacatccagcagccagaatgctggtggagctgtctaaggctcaagatatagaagcaggagatggcaccacatcagtagtcatcattgctggctccctcttagattcttgtaccaagcttcttcagaaagggattcatccaaccatcatttctgagtcattccagaaggccctggaaaagggcattgaaatcttgactgacatgtctcgacctgtggaactgagtgacagagaaactttgttaaatagtgcaaccacttcactgaactcaaaggtggtttctcagtattcaagtctgctttctccaatgagtgtaaatgcagtgatgaaagtgattgacccagccacagccaccagtgtagatcttagagatattaaaatagttaagaagcttggtgggacaattgatgactgtgagttggtggaagggctggttctcacccaaaaagtgtcaaattctggcataaccagagttgaaaaggccaagattgggcttattcagttttgcttatctgctcccaaaacagacatggataatcaaatagtggtttctgactatgcccagatggaccgagtgctgcgagaagagagagcctatattttaaatttagtgaagcaaattaaaaaaacaggatgtaatgtccttctcatacagaaatctattctaagagatgctcttagtgatcttgcattacactttctgaataaaatgaagatcatggtgattaaggatattgaaagagaagacattgaattcatttgtaagacaattggaaccaagccagttgctcatattgaccaatttactgctgacatgctgggttctgctgagttagctgaggaggtcaatttaaatggttctggcaaactgctcaagattacaggctgtgccagccctggaaaaacagttacaattgttgttcgtggttctaacaaactggtgattgaagaagctgagcgctccattcatgatgccctatgtgttattcgttgtttagtgaagaagagggctcttattgcaggaggtggtgctccagaaatagagttggccctacgattaactgaatattcacgaacactgagtggtatggaatcctactgcgttcgtgcttttgcagatgctatggaggtcattccatctacactagctgaaaatgccggcctgaatcccatttctacagtaacagaactaagaaaccggcatgcccagggagaaaaaactgcaggcattaatgtccgaaagggtggtatttccaacattttggaggaactggttgtccagcctctgttggtatcagtcagtgctctgactcttgcaactgaaactgttcggagcattctgaaaatagatgatgtggtaaacactcgataatctggataactgactagcaccattatgatcaccagtattgtggctggaatggaagaagatcaccttggtgttccttgtttggaagattatttcctctgaatttctgggcttggtcttccagttggcatttgcctgaagttgtattgaaacaatttaatgaaaatattaaatatttggtttcaaaaggcagatttatcttctcccaacattctgttatttctgatacttttgaaaaactaataaaaactaataaaagaagcgtaaaaagtgagtttacatgttgaggaaaaaaatggcccaatatgctcatcactgataaatgctccctggccttaaaaactaccaacatataatatatatgctgtcttaaaagttaatgatccaagtggcacctctctgaacctactttggcttgggaggctgcccagttaaaacaaaaataagttaatggtacagaaagagaatgaaaaatgaaagcctccttttatcctatcatcctaattccttttcccagtaataatgactgctgtgttggattccttctgcaaataaaagtgtatacagtaaaaaaaaacgaagaaaaaaaaaaaacaaaaaaaaacacaaaaagaacaaaagaaaagaaacaaagaaaaaaaaaaagacaatcaagaaaaaaacaaaaaagaacatcaaaacacaaacaacaaaaaaaaaaaagaaagggggggggccaacatgaaaaccaacaggaggagacgcaaaagagacaacgcgagaggagaaaagccgcaaa

SEQ ID NO: 279170 - DNA, 2493 bp, Homo sapiens
tcgtgacttgtagtacttctgtgcagttcgcttcagtctggccagaatccgggtccatccgtccttcccgagccaacccagacacagcggagtttgccatgcccgagaatgtggcaccccggagcggggcgactgccggggctgccggcggccgcgggaaaggcgcctatcaggaccgcgacaagccagcccagatccgcttcagcaacatttccgccgccaaagcggttgctgatgctattagaacaagccttggaccaaaaggaatggataaaatgattcaagatggaaaaggtgatgtaaccattacaaatgatggtgctaccattctgaaacaaatgcaagtattacatccagcagccagaatgctggtggagctgtctaaggctcaagatatagaagcaggagatggcaccacatcagtagtcatcattgctggctccctcttagattcttgtaccaagcttcttcagaaagggattcatccaaccatcatttctgagtcattccagaaggccctggaaaagggcattgaaatcttgactgacatgtctcgacctgtggaactgagtgacagagaaactttgttaaatagtgcaaccacttcactgaactcaaaggtggtttctcagtattcaagtctgctttctccaatgagtgtaaatgcagtgatgaaagtgattgacccagccacagccaccagtgtagatcttagagatattaaaatagttaagaagcttggtgggacaattgatgactgtgagttggtggaagggctggttctcacccaaaaagtgtcaaattctggcataaccagagttgaaaaggccaagattgggcttattcagttttgcttatctgctcccaaaacagacatggataatcaaatagtggtttctgactatgcccagatggaccgagtgctgcgagaagagagagcctatattttaaatttagtgaagcaaattaaaaaaacaggatgtaatgtccttctcatacagaaatctattctaagagatgctcttagtgatcttgcattacactttctgaataaaatgaagatcatggtgattaaggatattgaaagagaagacattgaattcatttgtaagacaattggaaccaagccagttgctcatattgaccaatttactgctgacatgctgggttctgctgagttagctgaggaggtcaatttaaatggttctggcaaactgctcaagattacaggctgtgccagccctggaaaaacagttacaattgttgttcgtggttctaacaaactggtgattgaagaagctgagcgctccattcatgatgccctatgtgttattcgttgtttagtgaagaagagggctcttattgcaggaggtggtgctccagaaatagagttggccctacgattaactgaatattcacgaacactgagtggtatggaatcctactgcgttcgtgcttttgcagatgctatggaggtcattccatctacactagctgaaaatgccggcctgaatcccatttctacagtaacagaactaagaaaccggcatgcccagggagaaaaaactgcaggcattaatgtccgaaagggtggtatttccaacattttggaggaactggttgtccagcctctgttggtatcagtcagtgctctgactcttgcaactgaaactgttcggagcattctgaaaatagatgatgtggtaaacactcgataatctggataactgactagcaccattatgatcaccagtattgtggctggaatggaagaagatcaccttggtgttccttgtttggaagattatttcctctgaatttctgggcttggtcttccagttggcatttgcctgaagttgtattgaaacaatttaatgaaaatattaaatatttggtttcaaaaggcagatttatcttctcccaacattctgttatttctgatacttttgaaaaactaataaaaactaataaaagaagcgtaaaaagtgagtttacatgttgaggaaaaaaatggcccaatatgctcatcactgataaatgctccctggccttaaaaactaccaacatataatatatatgctgtcttaaaagttaatgatccaagtggcacctctctgaacctactttggcttgggaggctgcccagttaaaacaaaaataagttaatggtacagaaagagaatgaaaaatgaaagcctccttttatcctatcatcctaattccttttcccagtaataatgactgctgtgttggattccttctgcaaataaaagtgtatacagtaaaaaaaaacgaagaaaaaaaaaaaacaaaaaaaaacacaaaaagaacaaaagaaaagaaacaaagaaaaaaaaaaagacaatcaagaaaaaaacaaaaaagaacatcaaaacacaaacaacaaaaaaaaaaaagaaagggggggggccaacatgaaaaccaacaggaggagacgcaaaagagacaacgcgagaggagaaaagccgcaaa

SEQ ID NO: 279171 - DNA, 2077 bp, Homo sapiens
agcggcttctccgcctccgcctcctcccgacgccggcgccgctttctggaaggttcgtgaaggcagtgagggcttaccgttattacactgcggccggccagaatccgggtccatccgtccttcccgagccaacccagacacagcggagtttgccatgcccgagaatgtggcaccccggagcggggcgactgccggggctgccggcggccgcgggaaaggcgcctatcaggaccgcgacaagccagcccagatccgcttcagcaacatttccgccgccaaagcggttgctgatgctattagaacaagccttggaccaaaaggaatggataaaatgattcaagatggaaaaggtgatgtaaccattacaaatgatggtgctaccattctgaaacaaatgcaagtattacatccagcagccagaatgctggtggagctgtctaaggctcaagatatagaagcaggagatggcaccacatcagtagtcatcattgctggctccctcttagattcttgtaccaagcttcttcagaaagggattcatccaaccatcatttctgagtcattccagaaggccctggaaaagggcattgaaatcttgactgacatgtctcgacctgtggaactgagtgacagagaaactttgttaaatagtgcaaccacttcactgaactcaaaggtggtttctcagtattcaagtctgctttctccaatgagtgtaaatgcagtgatgaaagtgattgacccagccacagccaccagtgtagatcttagagatattaaaatagttaagaagcttggtgggacaattgatgactgtgagttggtggaagggctggttctcacccaaaaagtgtcaaattctggcataaccagagttgaaaaggccaagattgggcttattcagttttgcttatctgctcccaaaacagacatggataatcaaatagtggtttctgactatgcccagatggaccgagtgctgcgagaagagagagcctatattttaaatttagtgaagcaaattaaaaaaacaggatgtaatgtccttctcatacagaaatctattctaagagatgctcttagtgatcttgcattacactttctgaataaaatgaagatcatggtgattaaggatattgaaagagaagacattgaattcatttgtaagacaattggaaccaagccagttgctcatattgaccaatttactgctgacatgctgggttctgctgagttagctgaggaggtcaatttaaatggttctggcaaactgctcaagattacaggctgtgccagccctggaaaaacagttacaattgttgttcgtggttctaacaaactggtgattgaagaagctgagcgctccattcatgatgccctatgtgttattcgttgtttagtgaagaagagggctcttattgcaggaggtggtgctccagaaatagagttggccctacgattaactgaatattcacgaacactgagtggtatggaatcctactgcgttcgtgcttttgcagatgctatggaggtcattccatctacactagctgaaaatgccggcctgaatcccatttctacagtaacagaactaagaaaccggcatgcccagggagaaaaaactgcaggcattaatgtccgaaagggtggtatttccaacattttggaggaactggttgtccagcctctgttggtatcagtcagtgctctgactcttgcaactgaaactgttcggagcattctgaaaatagatgatgtggtaaacactcgataatctggataactgactagcaccattatgatcaccagtattgtggctggaatggaagaagatcaccttggtgttccttgtttggaagattatttcctctgaatttctgggcttggtcttccagttggcatttgcctgaagttgtattgaaacaatttaatgaaaatattaaatatttggtttcaaaaggcagatttatcttctcccaacattctgttatttctgatacttttgaaaaactaataaaaactaataaaagaagcgtaaaaagtgtaaaaaacctctagcgtcccaaaaccaacatgt

SEQ ID NO: 279172 - DNA, 2666 bp, Homo sapiens
agcggcttctccgcctccgcctcctcccgacgccggcgccgctttctggaaggttcgtgaaggcagtgagggcttaccgttattacactgcggccggccagaatccgggtccatccgtccttcccgagccaacccagacacagcggagtttgccatgcccgagaatgtggcaccccggagcggggcgactgccggggctgccggcggccgcgggaaaggcgcctatcaggaccgcgacaagccagcccagatccgcttcagcaacatttccgccgccaaagcggttgctgatgctattagaacaagccttggaccaaaaggaatggataaaatgattcaagatggaaaaggtgatgtaaccattacaaatgatggtgctaccattctgaaacaaatgcaagtattacatccagcagccagaatgctggtggagctgtctaaggctcaagatatagaagcaggagatggcaccacatcagtagtcatcattgctggctccctcttagattcttgtaccaagcttcttcagaaagggattcatccaaccatcatttctgagtcattccagaaggccctggaaaagggcattgaaatcttgactgacatgtctcgacctgtggaactgagtgacagagaaactttgttaaatagtgcaaccacttcactgaactcaaaggtggtttctcagtattcaagtctgctttctccaatgagtgtaaatgcagtgatgaaagtgattgacccagccacagccaccagtgtagatcttagagatattaaaatagttaagaagcttggtgggacaattgatgactgtgagttggtggaagggctggttctcacccaaaaagtgtcaaattctggcataaccagagttgaaaaggccaagattgggcttattcagttttgcttatctgctcccaaaacagacatggataatcaaatagtggtttctgactatgcccagatggaccgagtgctgcgagaagagagagcctatattttaaatttagtgaagcaaattaaaaaaacaggatgtaatgtccttctcatacagaaatctattctaagagatgctcttagtgatcttgcattacactttctgaataaaatgaagatcatggtgattaaggatattgaaagagaagacattgaattcatttgtaagacaattggaaccaagccagttgctcatattgaccaatttactgctgacatgctgggttctgctgagttagctgaggaggtcaatttaaatggttctggcaaactgctcaagattacaggctgtgccagccctggaaaaacagttacaattgttgttcgtggttctaacaaactggtgattgaagaagctgagcgctccattcatgatgccctatgtgttattcgttgtttagtgaagaagagggctcttattgcaggaggtggtgctccagaaatagagttggccctacgattaactgaatattcacgaacactgagtggtatggaatcctactgcgttcgtgcttttgcagatgctatggaggtcattccatctacactagctgaaaatgccggcctgaatcccatttctacagtaacagaactaagaaaccggcatgcccagggagaaaaaactgcaggcattaatgtccgaaagggtggtatttccaacattttggaggaactggttgtccagcctctgttggtatcagtcagtgctctgactcttgcaactgaaactgttcggagcattctgaaaatagatgatgtggtaaacactcgataatctggataactgactagcaccattatgatcaccagtattgtggctggaatggaagaagatcaccttggtgttccttgtttggaagattatttcctctgaatttctgggcttggtcttccagttggcatttgcctgaagttgtattgaaacaatttaatgaaaatattaaatatttggtttcaaaaggcagatttatcttctcccaacattctgttatttctgatacttttgaaaaactaataaaaactaataaaagaagcaaaaaaaaaaaaaaaaaaaaaaaaaaaaaaaaaaaaaaaaaaaaaaaaaaaaaaaaaaaaaaaaaaaaaaaaaaaaaaaaaaaagaaaaaacaaaaaaaaagaaggggggcgcggcgcactataaatccacccccgggggggcgacacaagtagcagacgacacacacattatagaacaaaagaggggcccccaaagaatgaggaagtgttcatataaaaagcagagcgaagagaaggggcgagcaggataaaaacaaaagatcgagaggaggagaaacaaaacgaggacaagagaggaaaaacatgtgtgaataaaagaacaaccccatccagaaggggggggcgaaaacacaaaaagaggcgcagacaatccaccctcaccaaccgagagacaaatacaaaggacacccaacgagagagcgacgaagcacaaataatccgccacaccacagacaggacggaatgacatcaggcgagtggtgtaccaaaacgaccacacgggcaggatacgaaacgacgcggagggcaagcacgcgaagacacagcacggctgccgccacccctaacggcgaaacgatcagctctactagcgccgacgacaaaatattacaacacacagcaagagagacca

SEQ ID NO: 279173 - DNA, 2551 bp, Homo sapiens
agcggcttctccgcctccgcctcctcccgacgccggcgccgctttctggaaggttcgtgaaggcagtgagggcttaccgttattacactgcggccggccagaatccgggtccatccgtccttcccgagccaacccagacacagcggagtttgccatgcccgagaatgtggcaccccggagcggggcgactgccggggctgccggcggccgcgggaaaggcgcctatcaggaccgcgacaagccagcccagatccgcttcagcaacatttccgccgccaaagcggttgctgatgctattagaacaagccttggaccaaaaggaatggataaaatgattcaagatggaaaaggtgatgtaaccattacaaatgatggtgctaccattctgaaacaaatgcaagtattacatccagcagccagaatgctggtggagctgtctaaggctcaagatatagaagcaggagatggcaccacatcagtagtcatcattgctggctccctcttagattcttgtaccaagcttcttcagaaagggattcatccaaccatcatttctgagtcattccagaaggccctggaaaagggcattgaaatcttgactgacatgtctcgacctgtggaactgagtgacagagaaactttgttaaatagtgcaaccacttcactgaactcaaaggtggtttctcagtattcaagtctgctttctccaatgagtgtaaatgcagtgatgaaagtgattgacccagccacagccaccagtgtagatcttagagatattaaaatagttaagaagcttggtgggacaattgatgactgtgagttggtggaagggctggttctcacccaaaaagtgtcaaattctggcataaccagagttgaaaaggccaagattgggcttattcagttttgcttatctgctcccaaaacagacatggataatcaaatagtggtttctgactatgcccagatggaccgagtgctgcgagaagagagagcctatattttaaatttagtgaagcaaattaaaaaaacaggatgtaatgtccttctcatacagaaatctattctaagagatgctcttagtgatcttgcattacactttctgaataaaatgaagatcatggtgattaaggatattgaaagagaagacattgaattcatttgtaagacaattggaaccaagccagttgctcatattgaccaatttactgctgacatgctgggttctgctgagttagctgaggaggtcaatttaaatggttctggcaaactgctcaagattacaggctgtgccagccctggaaaaacagttacaattgttgttcgtggttctaacaaactggtgattgaagaagctgagcgctccattcatgatgccctatgtgttattcgttgtttagtgaagaagagggctcttattgcaggaggtggtgctccagaaatagagttggccctacgattaactgaatattcacgaacactgagtggtatggaatcctactgcgttcgtgcttttgcagatgctatggaggtcattccatctacactagctgaaaatgccggcctgaatcccatttctacagtaacagaactaagaaaccggcatgcccagggagaaaaaactgcaggcattaatgtccgaaagggtggtatttccaacattttggaggaactggttgtccagcctctgttggtatcagtcagtgctctgactcttgcaactgaaactgttcggagcattctgaaaatagatgatgtggtaaacactcgataatctggataactgactagcaccattatgatcaccagtattgtggctggaatggaagaagatcaccttggtgttccttgtttggaagattatttcctctgaatttctgggcttggtcttccagttggcatttgcctgaagttgtattgaaacaatttaatgaaaatattaaatatttggtttcaaaaggcagatttatcttctcccaacattctgttatttctgatacttttgaaaaactaataaaaactaataaaagaagcaaaaaaaaaaaaaaaaaaaaaaaaaaaaaaaaaaaaaaaaaaaaaaaaaaaaaaaaaaaaaaaaaaaaaaaaaaaaaaaaaaaagggggggggggggaaaatcacactccccggcggggggcgaaagaacatgagatggacacccacaaactagttggttgagtagaaaaaagagggagcccccacaatgagagggcccgacgctatatactatttacaacgaagagacgaggcgcgcggcgatgaaaactaacgaacggtggtgagggcggggaaaagcaagcgactcatatcagtcgagtattctgtgggagagacgagaaacacaacactactgtggggtggggaacaaaataattgttggggaaaaccaccccgccacagaaattaatgacggtctcgggagagtgataataaaaaaacaatgttggtgttgtatagttgtgaaaaaccggcggtagtgactgtggcgagtaaaaatgtgccatcgatgttgttttccaaaaaatttacgggg

SEQ ID NO: 279174 - DNA, 2412 bp, Homo sapiens
agcggcttctccgcctccgcctcctcccgacgccggcgccgctttctggaaggttcgtgaaggcagtgagggcttaccgttattacactgcggccggccagaatccgggtccatccgtccttcccgagccaacccagacacagcggagtttgccatgcccgagaatgtggcaccccggagcggggcgactgccggggctgccggcggccgcgggaaaggcgcctatcaggaccgcgacaagccagcccagatccgcttcagcaacatttccgccgccaaagcggttgctgatgctattagaacaagccttggaccaaaaggaatggataaaatgattcaagatggaaaaggtgatgtaaccattacaaatgatggtgctaccattctgaaacaaatgcaagtattacatccagcagccagaatgctggtggagctgtctaaggctcaagatatagaagcaggagatggcaccacatcagtagtcatcattgctggctccctcttagattcttgtaccaagcttcttcagaaagggattcatccaaccatcatttctgagtcattccagaaggccctggaaaagggcattgaaatcttgactgacatgtctcgacctgtggaactgagtgacagagaaactttgttaaatagtgcaaccacttcactgaactcaaaggtggtttctcagtattcaagtctgctttctccaatgagtgtaaatgcagtgatgaaagtgattgacccagccacagccaccagtgtagatcttagagatattaaaatagttaagaagcttggtgggacaattgatgactgtgagttggtggaagggctggttctcacccaaaaagtgtcaaattctggcataaccagagttgaaaaggccaagattgggcttattcagttttgcttatctgctcccaaaacagacatggataatcaaatagtggtttctgactatgcccagatggaccgagtgctgcgagaagagagagcctatattttaaatttagtgaagcaaattaaaaaaacaggatgtaatgtccttctcatacagaaatctattctaagagatgctcttagtgatcttgcattacactttctgaataaaatgaagatcatggtgattaaggatattgaaagagaagacattgaattcatttgtaagacaattggaaccaagccagttgctcatattgaccaatttactgctgacatgctgggttctgctgagttagctgaggaggtcaatttaaatggttctggcaaactgctcaagattacaggctgtgccagccctggaaaaacagttacaattgttgttcgtggttctaacaaactggtgattgaagaagctgagcgctccattcatgatgccctatgtgttattcgttgtttagtgaagaagagggctcttattgcaggaggtggtgctccagaaatagagttggccctacgattaactgaatattcacgaacactgagtggtatggaatcctactgcgttcgtgcttttgcagatgctatggaggtcattccatctacactagctgaaaatgccggcctgaatcccatttctacagtaacagaactaagaaaccggcatgcccagggagaaaaaactgcaggcattaatgtccgaaagggtggtatttccaacattttggaggaactggttgtccagcctctgttggtatcagtcagtgctctgactcttgcaactgaaactgttcggagcattctgaaaatagatgatgtggtaaacactcgataatctggataactgactagcaccattatgatcaccagtattgtggctggaatggaagaagatcaccttggtgttccttgtttggaagattatttcctctgaatttctgggcttggtcttccagttggcatttgcctgaagttgtattgaaacaatttaatgaaaatattaaatatttggtttcaaaaggcagatttatcttctcccaacattctgttatttctgatacttttgaaaaactaataaaaactaataaaagaagcaaaaaaaaaaaaaaaaaaaaaaaaaaaaaaatgtgtgtgggcgcgcgcgcttggggccctcgaggagaagagttttttaaacaccatttcggtgtggggcggcgggggcgcccggtagggtaaggggaaactggggccaataacggggggtccccataaggagaaatctccgggggacatagagacaaacgggcgtgggagattccccacccaaaaataaaaaaagcgcccgggggggggaaccgagagggcggttgctgggaacacattccccaagagggggagtgtccggagagggatcaatcacgggggatccaacacaaacagggggtgccacaacgaagaggctcggatattaaaattaacgcccggactggg

SEQ ID NO: 279175 - DNA, 2089 bp, Homo sapiens
agcggcttctccgcctccgcctcctcccgacgccggcgccgctttctggaaggttcgtgaaggcagtgagggcttaccgttattacactgcggccggccagaatccgggtccatccgtccttcccgagccaacccagacacagcggagtttgccatgcccgagaatgtggcaccccggagcggggcgactgccggggctgccggcggccgcgggaaaggcgcctatcaggaccgcgacaagccagcccagatccgcttcagcaacatttccgccgccaaagcggttgctgatgctattagaacaagccttggaccaaaaggaatggataaaatgattcaagatggaaaaggtgatgtaaccattacaaatgatggtgctaccattctgaaacaaatgcaagtattacatccagcagccagaatgctggtggagctgtctaaggctcaagatatagaagcaggagatggcaccacatcagtagtcatcattgctggctccctcttagattcttgtaccaagcttcttcagaaagggattcatccaaccatcatttctgagtcattccagaaggccctggaaaagggcattgaaatcttgactgacatgtctcgacctgtggaactgagtgacagagaaactttgttaaatagtgcaaccacttcactgaactcaaaggtggtttctcagtattcaagtctgctttctccaatgagtgtaaatgcagtgatgaaagtgattgacccagccacagccaccagtgtagatcttagagatattaaaatagttaagaagcttggtgggacaattgatgactgtgagttggtggaagggctggttctcacccaaaaagtgtcaaattctggcataaccagagttgaaaaggccaagattgggcttattcagttttgcttatctgctcccaaaacagacatggataatcaaatagtggtttctgactatgcccagatggaccgagtgctgcgagaagagagagcctatattttaaatttagtgaagcaaattaaaaaaacaggatgtaatgtccttctcatacagaaatctattctaagagatgctcttagtgatcttgcattacactttctgaataaaatgaagatcatggtgattaaggatattgaaagagaagacattgaattcatttgtaagacaattggaaccaagccagttgctcatattgaccaatttactgctgacatgctgggttctgctgagttagctgaggaggtcaatttaaatggttctggcaaactgctcaagattacaggctgtgccagccctggaaaaacagttacaattgttgttcgtggttctaacaaactggtgattgaagaagctgagcgctccattcatgatgccctatgtgttattcgttgtttagtgaagaagagggctcttattgcaggaggtggtgctccagaaatagagttggccctacgattaactgaatattcacgaacactgagtggtatggaatcctactgcgttcgtgcttttgcagatgctatggaggtcattccatctacactagctgaaaatgccggcctgaatcccatttctacagtaacagaactaagaaaccggcatgcccagggagaaaaaactgcaggcattaatgtccgaaagggtggtatttccaacattttggaggaactggttgtccagcctctgttggtatcagtcagtgctctgactcttgcaactgaaactgttcggagcattctgaaaatagatgatgtggtaaacactcgataatctggataactgactagcaccattatgatcaccagtattgtggctggaatggaagaagatcaccttggtgttccttgtttggaagattatttcctctgaatttctgggcttggtcttccagttggcatttgcctgaagttgtattgaaacaatttaatgaaaatattaaatatttggtttcaaaaggcagatttatcttctcccaacattctgttatttctgatacttttgaaaaactaataaaaactaataaaagaatctcggatgcgcccagctatattaaaaggaaggtaaaaaagtgaatacgataagtgg

SEQ ID NO: 279176 - DNA, 2097 bp, Homo sapiens
agcggcttctccgcctccgcctcctcccgacgccggcgccgctttctggaaggttcgtgaaggcagtgagggcttaccgttattacactgcggccggccagaatccgggtccatccgtccttcccgagccaacccagacacagcggagtttgccatgcccgagaatgtggcaccccggagcggggcgactgccggggctgccggcggccgcgggaaaggcgcctatcaggaccgcgacaagccagcccagatccgcttcagcaacatttccgccgccaaagcggttgctgatgctattagaacaagccttggaccaaaaggaatggataaaatgattcaagatggaaaaggtgatgtaaccattacaaatgatggtgctaccattctgaaacaaatgcaagtattacatccagcagccagaatgctggtggagctgtctaaggctcaagatatagaagcaggagatggcaccacatcagtagtcatcattgctggctccctcttagattcttgtaccaagcttcttcagaaagggattcatccaaccatcatttctgagtcattccagaaggccctggaaaagggcattgaaatcttgactgacatgtctcgacctgtggaactgagtgacagagaaactttgttaaatagtgcaaccacttcactgaactcaaaggtggtttctcagtattcaagtctgctttctccaatgagtgtaaatgcagtgatgaaagtgattgacccagccacagccaccagtgtagatcttagagatattaaaatagttaagaagcttggtgggacaattgatgactgtgagttggtggaagggctggttctcacccaaaaagtgtcaaattctggcataaccagagttgaaaaggccaagattgggcttattcagttttgcttatctgctcccaaaacagacatggataatcaaatagtggtttctgactatgcccagatggaccgagtgctgcgagaagagagagcctatattttaaatttagtgaagcaaattaaaaaaacaggatgtaatgtccttctcatacagaaatctattctaagagatgctcttagtgatcttgcattacactttctgaataaaatgaagatcatggtgattaaggatattgaaagagaagacattgaattcatttgtaagacaattggaaccaagccagttgctcatattgaccaatttactgctgacatgctgggttctgctgagttagctgaggaggtcaatttaaatggttctggcaaactgctcaagattacaggctgtgccagccctggaaaaacagttacaattgttgttcgtggttctaacaaactggtgattgaagaagctgagcgctccattcatgatgccctatgtgttattcgttgtttagtgaagaagagggctcttattgcaggaggtggtgctccagaaatagagttggccctacgattaactgaatattcacgaacactgagtggtatggaatcctactgcgttcgtgcttttgcagatgctatggaggtcattccatctacactagctgaaaatgccggcctgaatcccatttctacagtaacagaactaagaaaccggcatgcccagggagaaaaaactgcaggcattaatgtccgaaagggtggtatttccaacattttggaggaactggttgtccagcctctgttggtatcagtcagtgctctgactcttgcaactgaaactgttcggagcattctgaaaatagatgatgtggtaaacactcgataatctggataactgactagcaccattatgatcaccagtattgtggctggaatggaagaagatcaccttggtgttccttgtttggaagattatttcctctgaatttctgggcttggtcttccagttggcatttgcctgaagttgtattgaaacaatttaatgaaaatattaaatatttggtttcaaaaggcagatttatcttctcccaacattctgttatttctgatacttttgaaaaactaataaaaactaataaaagaacgatgcagcccagaccccccccctactttaatacacaataaatataaaaatccgcgcgcgcgcgc

SEQ ID NO: 279177 - DNA, 2085 bp, Homo sapiens
agcggcttctccgcctccgcctcctcccgacgccggcgccgctttctggaaggttcgtgaaggcagtgagggcttaccgttattacactgcggccggccagaatccgggtccatccgtccttcccgagccaacccagacacagcggagtttgccatgcccgagaatgtggcaccccggagcggggcgactgccggggctgccggcggccgcgggaaaggcgcctatcaggaccgcgacaagccagcccagatccgcttcagcaacatttccgccgccaaagcggttgctgatgctattagaacaagccttggaccaaaaggaatggataaaatgattcaagatggaaaaggtgatgtaaccattacaaatgatggtgctaccattctgaaacaaatgcaagtattacatccagcagccagaatgctggtggagctgtctaaggctcaagatatagaagcaggagatggcaccacatcagtagtcatcattgctggctccctcttagattcttgtaccaagcttcttcagaaagggattcatccaaccatcatttctgagtcattccagaaggccctggaaaagggcattgaaatcttgactgacatgtctcgacctgtggaactgagtgacagagaaactttgttaaatagtgcaaccacttcactgaactcaaaggtggtttctcagtattcaagtctgctttctccaatgagtgtaaatgcagtgatgaaagtgattgacccagccacagccaccagtgtagatcttagagatattaaaatagttaagaagcttggtgggacaattgatgactgtgagttggtggaagggctggttctcacccaaaaagtgtcaaattctggcataaccagagttgaaaaggccaagattgggcttattcagttttgcttatctgctcccaaaacagacatggataatcaaatagtggtttctgactatgcccagatggaccgagtgctgcgagaagagagagcctatattttaaatttagtgaagcaaattaaaaaaacaggatgtaatgtccttctcatacagaaatctattctaagagatgctcttagtgatcttgcattacactttctgaataaaatgaagatcatggtgattaaggatattgaaagagaagacattgaattcatttgtaagacaattggaaccaagccagttgctcatattgaccaatttactgctgacatgctgggttctgctgagttagctgaggaggtcaatttaaatggttctggcaaactgctcaagattacaggctgtgccagccctggaaaaacagttacaattgttgttcgtggttctaacaaactggtgattgaagaagctgagcgctccattcatgatgccctatgtgttattcgttgtttagtgaagaagagggctcttattgcaggaggtggtgctccagaaatagagttggccctacgattaactgaatattcacgaacactgagtggtatggaatcctactgcgttcgtgcttttgcagatgctatggaggtcattccatctacactagctgaaaatgccggcctgaatcccatttctacagtaacagaactaagaaaccggcatgcccagggagaaaaaactgcaggcattaatgtccgaaagggtggtatttccaacattttggaggaactggttgtccagcctctgttggtatcagtcagtgctctgactcttgcaactgaaactgttcggagcattctgaaaatagatgatgtggtaaacactcgataatctggataactgactagcaccattatgatcaccagtattgtggctggaatggaagaagatcaccttggtgttccttgtttggaagattatttcctctgaatttctgggcttggtcttccagttggcatttgcctgaagttgtattgaaacaatttaatgaaaatattaaatatttggtttcaaaaggcagatttatcttctcccaacattctgttatttctgatacttttgaaaaactaataaaaactaataaaagaacgatgcggccgtttattgtttggcataaattaggcgaggaaatataataatag

SEQ ID NO: 279178 - DNA, 2081 bp, Homo sapiens
agcggcttctccgcctccgcctcctcccgacgccggcgccgctttctggaaggttcgtgaaggcagtgagggcttaccgttattacactgcggccggccagaatccgggtccatccgtccttcccgagccaacccagacacagcggagtttgccatgcccgagaatgtggcaccccggagcggggcgactgccggggctgccggcggccgcgggaaaggcgcctatcaggaccgcgacaagccagcccagatccgcttcagcaacatttccgccgccaaagcggttgctgatgctattagaacaagccttggaccaaaaggaatggataaaatgattcaagatggaaaaggtgatgtaaccattacaaatgatggtgctaccattctgaaacaaatgcaagtattacatccagcagccagaatgctggtggagctgtctaaggctcaagatatagaagcaggagatggcaccacatcagtagtcatcattgctggctccctcttagattcttgtaccaagcttcttcagaaagggattcatccaaccatcatttctgagtcattccagaaggccctggaaaagggcattgaaatcttgactgacatgtctcgacctgtggaactgagtgacagagaaactttgttaaatagtgcaaccacttcactgaactcaaaggtggtttctcagtattcaagtctgctttctccaatgagtgtaaatgcagtgatgaaagtgattgacccagccacagccaccagtgtagatcttagagatattaaaatagttaagaagcttggtgggacaattgatgactgtgagttggtggaagggctggttctcacccaaaaagtgtcaaattctggcataaccagagttgaaaaggccaagattgggcttattcagttttgcttatctgctcccaaaacagacatggataatcaaatagtggtttctgactatgcccagatggaccgagtgctgcgagaagagagagcctatattttaaatttagtgaagcaaattaaaaaaacaggatgtaatgtccttctcatacagaaatctattctaagagatgctcttagtgatcttgcattacactttctgaataaaatgaagatcatggtgattaaggatattgaaagagaagacattgaattcatttgtaagacaattggaaccaagccagttgctcatattgaccaatttactgctgacatgctgggttctgctgagttagctgaggaggtcaatttaaatggttctggcaaactgctcaagattacaggctgtgccagccctggaaaaacagttacaattgttgttcgtggttctaacaaactggtgattgaagaagctgagcgctccattcatgatgccctatgtgttattcgttgtttagtgaagaagagggctcttattgcaggaggtggtgctccagaaatagagttggccctacgattaactgaatattcacgaacactgagtggtatggaatcctactgcgttcgtgcttttgcagatgctatggaggtcattccatctacactagctgaaaatgccggcctgaatcccatttctacagtaacagaactaagaaaccggcatgcccagggagaaaaaactgcaggcattaatgtccgaaagggtggtatttccaacattttggaggaactggttgtccagcctctgttggtatcagtcagtgctctgactcttgcaactgaaactgttcggagcattctgaaaatagatgatgtggtaaacactcgataatctggataactgactagcaccattatgatcaccagtattgtggctggaatggaagaagatcaccttggtgttccttgtttggaagattatttcctctgaatttctgggcttggtcttccagttggcatttgcctgaagttgtattgaaacaatttaatgaaaatattaaatatttggtttcaaaaggcagatttatcttctcccaacattctgttatttctgatacttttgaaaaactaataaaaactaataaaagaatgcggcagcgcacaataaacattaaatgaagcggaattaaataatgcag

SEQ ID NO: 279179 - DNA, 2090 bp, Homo sapiens
agcggcttctccgcctccgcctcctcccgacgccggcgccgctttctggaaggttcgtgaaggcagtgagggcttaccgttattacactgcggccggccagaatccgggtccatccgtccttcccgagccaacccagacacagcggagtttgccatgcccgagaatgtggcaccccggagcggggcgactgccggggctgccggcggccgcgggaaaggcgcctatcaggaccgcgacaagccagcccagatccgcttcagcaacatttccgccgccaaagcggttgctgatgctattagaacaagccttggaccaaaaggaatggataaaatgattcaagatggaaaaggtgatgtaaccattacaaatgatggtgctaccattctgaaacaaatgcaagtattacatccagcagccagaatgctggtggagctgtctaaggctcaagatatagaagcaggagatggcaccacatcagtagtcatcattgctggctccctcttagattcttgtaccaagcttcttcagaaagggattcatccaaccatcatttctgagtcattccagaaggccctggaaaagggcattgaaatcttgactgacatgtctcgacctgtggaactgagtgacagagaaactttgttaaatagtgcaaccacttcactgaactcaaaggtggtttctcagtattcaagtctgctttctccaatgagtgtaaatgcagtgatgaaagtgattgacccagccacagccaccagtgtagatcttagagatattaaaatagttaagaagcttggtgggacaattgatgactgtgagttggtggaagggctggttctcacccaaaaagtgtcaaattctggcataaccagagttgaaaaggccaagattgggcttattcagttttgcttatctgctcccaaaacagacatggataatcaaatagtggtttctgactatgcccagatggaccgagtgctgcgagaagagagagcctatattttaaatttagtgaagcaaattaaaaaaacaggatgtaatgtccttctcatacagaaatctattctaagagatgctcttagtgatcttgcattacactttctgaataaaatgaagatcatggtgattaaggatattgaaagagaagacattgaattcatttgtaagacaattggaaccaagccagttgctcatattgaccaatttactgctgacatgctgggttctgctgagttagctgaggaggtcaatttaaatggttctggcaaactgctcaagattacaggctgtgccagccctggaaaaacagttacaattgttgttcgtggttctaacaaactggtgattgaagaagctgagcgctccattcatgatgccctatgtgttattcgttgtttagtgaagaagagggctcttattgcaggaggtggtgctccagaaatagagttggccctacgattaactgaatattcacgaacactgagtggtatggaatcctactgcgttcgtgcttttgcagatgctatggaggtcattccatctacactagctgaaaatgccggcctgaatcccatttctacagtaacagaactaagaaaccggcatgcccagggagaaaaaactgcaggcattaatgtccgaaagggtggtatttccaacattttggaggaactggttgtccagcctctgttggtatcagtcagtgctctgactcttgcaactgaaactgttcggagcattctgaaaatagatgatgtggtaaacactcgataatctggataactgactagcaccattatgatcaccagtattgtggctggaatggaagaagatcaccttggtgttccttgtttggaagattatttcctctgaatttctgggcttggtcttccagttggcatttgcctgaagttgtattgaaacaatttaatgaaaatattaaatatttggtttcaaaaggcagatttatcttctcccaacattctgttatttctgatacttttgaaaaactaataaaaactaataaaagaatctcgcatgcgggccggcggccccccccgtacgtctcttacatacacgacattattga

SEQ ID NO: 279180 - DNA, 2559 bp, Homo sapiens
  misc_feature (162)..(162): n is a, c, g, or t
gcagaccgtcgtgatctgaccaggcccatcgagacgcatccgtggtcttgtcgctgtatcagtgggcgcgctcacatgtccatcatgtattccactttcactaacctctcctgacataatgaactctgtgcatgtctcgcataatgtaaggctaaccttggnaggctcactcgacctcgtggtggcgtggcggtccgcgcccgttggtgacaggcagccatcaatcatgtgaccagttacaaagcacaagacccaagaatccagcattcagcaacatttccgccgccaaagcggttgctgatgctattagaacaagccttggaccaaaaggaatggataaaatgattcaagatggaaaaggtgatgtaaccattacaaatgatggtgctaccattctgaaacaaatgcaagtattacatccagcagccagaatgctggtggagctgtctaaggctcaagatatagaagcaggagatggcaccacatcagtagtcatcattgctggctccctcttagattcttgtaccaagcttcttcagaaagggattcatccaaccatcatttctgagtcattccagaaggccctggaaaagggcattgaaatcttgactgacatgtctcgacctgtggaactgagtgacagagaaactttgttaaatagtgcaaccacttcactgaactcaaaggtggtttctcagtattcaagtctgctttctccaatgagtgtaaatgcagtgatgaaagtgattgacccagccacagccaccagtgtagatcttagagatattaaaatagttaagaagcttggtgggacaattgatgactgtgagttggtggaagggctggttctcacccaaaaagtgtcaaattctggcataaccagagttgaaaaggccaagattgggcttattcagttttgcttatctgctcccaaaacagacatggataatcaaatagtggtttctgactatgcccagatggaccgagtgctgcgagaagagagagcctatattttaaatttagtgaagcaaattaaaaaaacaggatgtaatgtccttctcatacagaaatctattctaagagatgctcttagtgatcttgcattacactttctgaataaaatgaagatcatggtgattaaggatattgaaagagaagacattgaattcatttgtaagacaattggaaccaagccagttgctcatattgaccaatttactgctgacatgctgggttctgctgagttagctgaggaggtcaatttaaatggttctggcaaactgctcaagattacaggctgtgccagccctggaaaaacagttacaattgttgttcgtggttctaacaaactggtgattgaagaagctgagcgctccattcatgatgccctatgtgttattcgttgtttagtgaagaagagggctcttattgcaggaggtggtgctccagaaatagagttggccctacgattaactgaatattcacgaacactgagtggtatggaatcctactgcgttcgtgcttttgcagatgctatggaggtcattccatctacactagctgaaaatgccggcctgaatcccatttctacagtaacagaactaagaaaccggcatgcccagggagaaaaaactgcaggcattaatgtccgaaagggtggtatttccaacattttggaggaactggttgtccagcctctgttggtatcagtcagtgctctgactcttgcaactgaaactgttcggagcattctgaaaatagatgatgtggtaaacactcgataatctggataactgactagcaccattatgatcaccagtattgtggctggaatggaagaagatcaccttggtgttccttgtttggaagattatttcctctgaatttctgggcttggtcttccagttggcatttgcctgaagttgtattgaaacaatttaatgaaaatattaaatatttggtttcaaaaggcagatttatcttctcccaacattctgttatttctgatacttttgaaaaactaataaaaactaataaaagaagcgtaaaaagtgagtttacatgttgaggaaaaaaatggcccaatatgctcatcactgataaatgctccctggccttaaaaactaccaacatataatatatatgctgtcttaaaagttaatgatccaagtggcacctctctgaacctactttggcttgggaggctgcccagttaaaacaaaaataagttaatggtacagaaagagaatgaaaaatgaaagcctccttttatcctatcatcctaattccttttcccagtaataatgactgctgtgttggattccttctgcaaataaaagtgtatacagtaaaaaaaaacgaagaaaaaaaaaaaacaaaaaaaaacacaaaaagaacaaaagaaaagaaacaaagaaaaaaaaaaagacaatcaagaaaaaaacaaaaaagaacatcaaaacacaaacaacaaaaaaaaaaaagaaagggggggggccaacatgaaaaccaacaggaggagacgcaaaagagacaacgcgagaggagaaaagccgcaaa

SEQ ID NO: 279181 - DNA, 1962 bp, Homo sapiens
agcggcttctccgcctccgcctcctcccgacgccggcgccgctttctggaaggttcgtgaaggcagtgagggcttaccgttattacactgcggccggccagaatccgggtccatccgtccttcccgagccaacccagacacagcggagtttgccatgcccgagaatgtggcaccccggagcggggcgactgccggggctgccggcggccgcgggaaaggcgcctatcaggaccgcgacaagccagcccagatccgcttcagcaacatttccgccgccaaagcggttgctgatgctattagaacaagccttggaccaaaaggaatggataaaatgattcaagatggaaaaggtgatgtaaccattacaaatgatggtgctaccattctgaaacaaatgcaagtattacatccagcagccagaatgctggtggagctgtctaaggctcaagatatagaagcaggagatggcaccacatcagtagtcatcattgctggctccctcttagattcttgtaccaagcttcttcagaaagggattcatccaaccatcatttctgagtcattccagaaggccctggaaaagggcattgaaatcttgactgacatgtctcgacctgtggaactgagtgacagagaaactttgttaaatagtgcaaccacttcactgaactcaaaggtggtttctcagtattcaagtctgctttctccaatgagtgtaaatgcagtgatgaaagtgattgacccagccacagccaccagtgtagatcttagagatattaaaatagttaagaagcttggtgggacaattgatgactgtgagttggtggaagggctggttctcacccaaaaagtgtcaaattctggcataaccagagttgaaaaggccaagattgggcttattcagttttgcttatctgctcccaaaacagacatggataatcaaatagtggtttctgactatgcccagatggaccgagtgctgcgagaagagagagcctatattttaaatttagtgaagcaaattaaaaaaacaggatgtaatgtccttctcatacagaaatctattctaagagatgctcttagtgatcttgcattacactttctgaataaaatgaagatcatggtgattaaggatattgaaagagaagacattgaattcatttgtaagacaattggaaccaagccagttgctcatattgaccaatttactgctgacatgctgggttctgctgagttagctgaggaggtcaatttaaatggttctggcaaactgctcaagattacaggctgtgccagccctggaaaaacagttacaattgttgttcgtggttctaacaaactggtgattgaagaagctgagcgctccattcatgatgccctatgtgttattcgttgtttagtgaagaagagggctcttattgcaggaggtggtgctccagaaatagagttggccctacgattaactgaatattcacgaacactgagtggtatggaatcctactgcgttcgtgcttttgcagatgctatggaggtcattccatctacactagctgaaaatgccggcctgaatcccatttctacagtaacagaactaagaaaccggcatgcccagggagaaaaaactgcaggcattaatgtccgaaagggtggtatttccaacattttggaggaactggttgtccagcctctgttggtatcagtcagtgctctgactcttgcaactgaaactgttcggagcattctgaaaatagatgatgtggtaaacactcgataatctggataactgactagcaccattatgatcaccagtattgtggctggaatggaagaagatcaccttggtgttccttgtttggaagattatttcctctgaatttctgggcttggtcttccagttggcatttgcctgaagttgtattgaaacaatttaatgaaaatattaaatatttggtttcaaaaggc

SEQ ID NO: 279182 - DNA, 2446 bp, Homo sapiens
agcggcttctccgcctccgcctcctcccgacgccggcgccgctttctggaaggttcgtgaaggcagtgagggcttaccgttattacactgcggccggccagaatccgggtccatccgtccttcccgagccaacccagacacagcggagtttgccatgcccgagaatgtggcaccccggagcggggcgactgccggggctgccggcggccgcgggaaaggcgcctatcaggaccgcgacaagccagcccagatccgcttcagcaacatttccgccgccaaagcggttgctgatgctattagaacaagccttggaccaaaaggaatggataaaatgattcaagatggaaaaggtgatgtaaccattacaaatgatggtgctaccattctgaaacaaatgcaagtattacatccagcagccagaatgctggtgggattcatccaaccatcatttctgagtcattccagaaggccctggaaaagggcattgaaatcttgactgacatgtctcgacctgtggaactgagtgacagagaaactttgttaaatagtgcaaccacttcactgaactcaaaggtggtttctcagtattcaagtctgctttctccaatgagtgtaaatgcagtgatgaaagtgattgacccagccacagccaccagtgtagatcttagagatattaaaatagttaagaagcttggtgggacaattgatgactgtgagttggtggaagggctggttctcacccaaaaagtgtcaaattctggcataaccagagttgaaaaggccaagattgggcttattcagttttgcttatctgctcccaaaacagacatggataatcaaatagtggtttctgactatgcccagatggaccgagtgctgcgagaagagagagcctatattttaaatttagtgaagcaaattaaaaaaacaggatgtaatgtccttctcatacagaaatctattctaagagatgctcttagtgatcttgcattacactttctgaataaaatgaagatcatggtgattaaggatattgaaagagaagacattgaattcatttgtaagacaattggaaccaagccagttgctcatattgaccaatttactgctgacatgctgggttctgctgagttagctgaggaggtcaatttaaatggttctggcaaactgctcaagattacaggctgtgccagccctggaaaaacagttacaattgttgttcgtggttctaacaaactggtgattgaagaagctgagcgctccattcatgatgccctatgtgttattcgttgtttagtgaagaagagggctcttattgcaggaggtggtgctccagaaatagagttggccctacgattaactgaatattcacgaacactgagtggtatggaatcctactgcgttcgtgcttttgcagatgctatggaggtcattccatctacactagctgaaaatgccggcctgaatcccatttctacagtaacagaactaagaaaccggcatgcccagggagaaaaaactgcaggcattaatgtccgaaagggtggtatttccaacattttggaggaactggttgtccagcctctgttggtatcagtcagtgctctgactcttgcaactgaaactgttcggagcattctgaaaatagatgatgtggtaaacactcgataatctggataactgactagcaccattatgatcaccagtattgtggctggaatggaagaagatcaccttggtgttccttgtttggaagattatttcctctgaatttctgggcttggtcttccagttggcatttgcctgaagttgtattgaaacaatttaatgaaaatattaaatatttggtttcaaaaggcagatttatcttctcccaacattctgttatttctgatacttttgaaaaactaataaaaactaataaaagaagcgtaaaaagtgagtttacatgttgaggaaaaaaatggcccaatatgctcatcactgataaatgctccctggccttaaaaactaccaacatataatatatatgctgtcttaaaagttaatgatccaagtggcacctctctgaacctactttggcttgggaggctgcccagttaaaacaaaaataagttaatggtacagaaagagaatgaaaaatgaaagcctccttttatcctatcatcctaattccttttcccagtaataatgactgctgtgttggattccttctgcaaataaaagtgtatacagtaaaaaaaaacgaagaaaaaaaaaaaacaaaaaaaaacacaaaaagaacaaaagaaaagaaacaaagaaaaaaaaaaagacaatcaagaaaaaaacaaaaaagaacatcaaaacacaaacaacaaaaaaaaaaaagaaagggggggggccaacatgaaaaccaacaggaggagacgcaaaagagacaacgcgagaggagaaaagccgcaaa

SEQ ID NO: 279183 - DNA, 2017 bp, Homo sapiens
agcggcttctccgcctccgcctcctcccgacgccggcgccgctttctggaaggttcgtgaaggcagtgagggcttaccgttattacactgcggccggccagaatccgggtccatccgtccttcccgagccaacccagacacagcggagtttgccatgcccgagaatgtggcaccccggagcggggcgactgccggggctgccggcggccgcgggaaaggcgcctatcaggaccgcgacaagccagcccagatccgcttcagcaacatttccgccgccaaagcggttgctgatgctattagaacaagccttggaccaaaaggaatggataaaatgattcaagatggaaaaggtgatgtaaccattacaaatgatggtgctaccattctgaaacaaatgcaagtattacatccagcagccagaatgctggtggagctgtctaaggctcaagatatagaagcaggagatggcaccacatcagtagtcatcattgctggctccctcttagattcttgtaccaagcttcttcagaaagggattcatccaaccatcatttctgagtcattccagaaggccctggaaaagggcattgaaatcttgactgacatgtctcgacctgtggaactgagtgacagagaaactttgttaaatagtgcaaccacttcactgaactcaaaggtggtttctcagtattcaagtctgctttctccaatgagtgtaaatgcagtgatgaaagtgattgacccagccacagccaccagtgtagatcttagagatattaaaatagttaagaagcttggtgggacaattgatgactgtgagttggtggaagggctggttctcacccaaaaagtgtcaaattctggcataaccagagttgaaaaggccaagattgggcttattcagttttgcttatctgctcccaaaacagacatggataatcaaatagtggtttctgactatgcccagatggaccgagtgctgcgagaagagagagcctatattttaaatttagtgaagcaaattaaaaaaacaggatgtaatgtccttctcatacagaaatctattctaagagatgctcttagtgatcttgcattacactttctgaataaaatgaagatcatggtgattaaggatattgaaagagaagacattgaattcatttgtaagacaattggaaccaagccagttgctcatattgaccaatttactgctgacatgctgggttctgctgagttagctgaggaggtcaatttaaatggttctggcaaactgctcaagattacaggctgtgccagccctggaaaaacagttacaattgttgttcgtggttctaacaaactggtgattgaagaagctgagcgctccattcatgatgccctatgtgttattcgttgtttagtgaagaagagggctcttattgcaggaggtggtgctccagaaatagagttggccctacgattaactgaatattcacgaacactgagtggtatggaatcctactgcgttcgtgcttttgcagatgctatggaggtcattccatctacactagctgaaaatgccggcctgaatcccatttctacagtaacagaactaagaaaccggcatgcccagggagaaaaaactgcaggcattaatgtccgaaagggtggtatttccaacattttggaggaactggttgtccagcctctgttggtatcagtcagtgctctgactcttgcaactgaaactgttcggagcattctgaaaatagatgatgtggtaaacactcgataatctggataactgactagcaccattatgatcaccagtattgtggctggaatggaagaagatcaccttggtgttccttgtttggaagattatttcctctgaatttctgggcttggtcttccagttggcatttgcctgaagttgtattgaaacaatttaatgaaaatattaaatatttggtttcaaaaggccaaaaaaaaaaaaaagggagccgctcgcgatctagaactagtcgacgcgtgggtc

SEQ ID NO: 279184 - DNA, 1556 bp, Homo sapiens
  misc_feature (65)..(65): n is a, c, g, or t
tttaagggtggatattatttaagaaagaagagggaaggaccatagctgaacgactctcttaatcntccaccgctacagagatgctcttagtgatcttgcattacactttctgaataaaatgaagatcatggtgattaaggatattgaaagagaagacattgaattcatttgtaagacaattggaaccaagccagttgctcatattgaccaatttactgctgacatgctgggttctgctgagttagctgaggaggtcaatttaaatggttctggcaaactgctcaagattacaggctgtgccagccctggaaaaacagttacaattgttgttcgtggttctaacaaactggtgattgaagaagctgagcgctccattcatgatgccctatgtgttattcgttgtttagtgaagaagagggctcttattgcaggaggtggtgctccagaaatagagttggccctacgattaactgaatattcacgaacactgagtggtatggaatcctactgcgttcgtgcttttgcagatgctatggaggtcattccatctacactagctgaaaatgccggcctgaatcccatttctacagtaacagaactaagaaaccggcatgcccagggagaaaaaactgcaggcattaatgtccgaaagggtggtatttccaacattttggaggaactggttgtccagcctctgttggtatcagtcagtgctctgactcttgcaactgaaactgttcggagcattctgaaaatagatgatgtggtaaacactcgataatctggataactgactagcaccattatgatcaccagtattgtggctggaatggaagaagatcaccttggtgttccttgtttggaagattatttcctctgaatttctgggcttggtcttccagttggcatttgcctgaagttgtattgaaacaatttaatgaaaatattaaatatttggtttcaaaaggcagatttatcttctcccaacattctgttatttctgatacttttgaaaaactaataaaaactaataaaagaagcgtaaaaagtgagtttacatgttgaggaaaaaaatggcccaatatgctcatcactgataaatgctccctggccttaaaaactaccaacatataatatatatgctgtcttaaaagttaatgatccaagtggcacctctctgaacctactttggcttgggaggctgcccagttaaaacaaaaataagttaatggtacagaaagagaatgaaaaatgaaagcctccttttatcctatcatcctaattccttttcccagtaataatgactgctgtgttggattccttctgcaaataaaagtgtatacagtaaaaaaaaacgaagaaaaaaaaaaaacaaaaaaaaacacaaaaagaacaaaagaaaagaaacaaagaaaaaaaaaaagacaatcaagaaaaaaacaaaaaagaacatcaaaacacaaacaacaaaaaaaaaaaagaaagggggggggccaacatgaaaaccaacaggaggagacgcaaaagagacaacgcgagaggagaaaagccgcaaa

SEQ ID NO: 279185 - DNA, 2509 bp, Homo sapiens
agcggcttctccgcctccgcctcctcccgacgccggcgccgctttctggaaggttcgtgaaggcagtgagggcttaccgttattacactgcggccggccagaatccgggtccatccgtccttcccgagccaacccagacacagcggagtttgccatgcccgagaatgtggcaccccggagcggggcgactgccggggctgccggcggccgcgggaaaggcgcctatcaggaccgcgacaagccagcccagatccgcttcagcaacatttccgccgccaaagcggttgctgatgctattagaacaagccttggaccaaaaggaatggataaaatgattcaagatggaaaaggtgatgtaaccattacaaatgatggtgctaccattctgaaacaaatgcaagtattacatccagcagccagaatgctggtggagctgtctaaggctcaagatatagaagcaggagatggcaccacatcagtagtcatcattgctggctccctcttagattcttgtaccaagcttcttcagaaagggattcatccaaccatcatttctgagtcattccagaaggccctggaaaagggcattgaaatcttgactgacatgtctcgacctgtggaactgagtgacagagaaactttgttaaatagtgcaaccacttcactgaactcaaaggtggtttctcagtattcaagtctgctttctccaatgagtgtaaatgcagtgatgaaagtgattgacccagccacagccaccagtgtagatcttagagatattaaaatagttaagaagcttggtgggacaattgatgactgtgagttggtggaagggctggttctcacccaaaaagtgtcaaattctggcataaccagagttgaaaaggccaagattgggcttattcagttttgcttatctgctcccaaaacagacatggataatcaaatagtggtttctgactatgcccagatggaccgagtgctgcgagaagagagagcctatattttaaatttagtgaagcaaattaaaaaaacaggatgtaatgtccttctcatacagaaatctattctaagagatgctcttagtgatcttgcattacactttctgaataaaatgaagatcatggtgattaaggatattgaaagagaagacattgaattcatttgtaagacaattggaaccaagccagttgctcatattgaccaatttactgctgacatgctgggttctgctgagttagctgaggaggtcaatttaaatggttctggcaaactgctcaagattacaggctgtgccagccctggaaaaacagttacaattgttgttcgtggttctaacaaactggtgattgaagaagctgagcgctccattcatgatgccctatgtgttattcgttgtttagtgaagaagagggctcttattgcaggaggtggtgctccagaaatagagttggccctacgattaactgaatattcacgaacactgagtggtatggaatcctactgcgttcgtgcttttgcagatgctatggaggtcattccatctacactagctgaaaatgccggcctgaatcccatttctacagtaacagaactaagaaaccggcatgcccagggagaaaaaactgcaggcattaatgtccgaaagggtggtatttccaacattttggaggaactggttgtccagcctctgttggtatcagtcagtgctctgactcttgcaactgaaactgttcggagcattctgaaaatagatgatgtatgatcaccagtattgtggctggaatggaagaagatcaccttggtgttccttgtttggaagattatttcctctgaatttctgggcttggtcttccagttggcatttgcctgaagttgtattgaaacaatttaatgaaaatattaaatatttggtttcaaaaggcagatttatcttctcccaacattctgttatttctgatacttttgaaaaactaataaaaactaataaaagaagcgtaaaaagtgagtttacatgttgaggaaaaaaatggcccaatatgctcatcactgataaatgctccctggccttaaaaactaccaacatataatatatatgctgtcttaaaagttaatgatccaagtggcacctctctgaacctactttggcttgggaggctgcccagttaaaacaaaaataagttaatggtacagaaagagaatgaaaaatgaaagcctccttttatcctatcatcctaattccttttcccagtaataatgactgctgtgttggattccttctgcaaataaaagtgtatacagtaaaaaaaaacgaagaaaaaaaaaaaacaaaaaaaaacacaaaaagaacaaaagaaaagaaacaaagaaaaaaaaaaagacaatcaagaaaaaaacaaaaaagaacatcaaaacacaaacaacaaaaaaaaaaaagaaagggggggggccaacatgaaaaccaacaggaggagacgcaaaagagacaacgcgagaggagaaaagccgcaaa

SEQ ID NO: 279186 - DNA, 1500 bp, Homo sapiens
tatacggctagtgcgaggccagagatgctcttagtgatcttgcattacactttctgaataaaatgaagatcatggtgattaaggatattgaaagagaagacattgaattcatttgtaagacaattggaaccaagccagttgctcatattgaccaatttactgctgacatgctgggttctgctgagttagctgaggaggtcaatttaaatggttctggcaaactgctcaagattacaggctgtgccagccctggaaaaacagttacaattgttgttcgtggttctaacaaactggtgattgaagaagctgagcgctccattcatgatgccctatgtgttattcgttgtttagtgaagaagagggctcttattgcaggaggtggtgctccagaaatagagttggccctacgattaactgaatattcacgaacactgagtggtatggaatcctactgcgttcgtgcttttgcagatgctatggaggtcattccatctacactagctgaaaatgccggcctgaatcccatttctacagtaacagaactaagaaaccggcatgcccagggagaaaaaactgcaggcattaatgtccgaaagggtggtatttccaacattttggaggaactggttgtccagcctctgttggtatcagtcagtgctctgactcttgcaactgaaactgttcggagcattctgaaaatagatgatgtggtaaacactcgataatctggataactgactagcaccattatgatcaccagtattgtggctggaatggaagaagatcaccttggtgttccttgtttggaagattatttcctctgaatttctgggcttggtcttccagttggcatttgcctgaagttgtattgaaacaatttaatgaaaatattaaatatttggtttcaaaaggcagatttatcttctcccaacattctgttatttctgatacttttgaaaaactaataaaaactaataaaagaagcgtaaaaagtgagtttacatgttgaggaaaaaaatggcccaatatgctcatcactgataaatgctccctggccttaaaaactaccaacatataatatatatgctgtcttaaaagttaatgatccaagtggcacctctctgaacctactttggcttgggaggctgcccagttaaaacaaaaataagttaatggtacagaaagagaatgaaaaatgaaagcctccttttatcctatcatcctaattccttttcccagtaataatgactgctgtgttggattccttctgcaaataaaagtgtatacagtaaaaaaaaacgaagaaaaaaaaaaaacaaaaaaaaacacaaaaagaacaaaagaaaagaaacaaagaaaaaaaaaaagacaatcaagaaaaaaacaaaaaagaacatcaaaacacaaacaacaaaaaaaaaaaagaaagggggggggccaacatgaaaaccaacaggaggagacgcaaaagagacaacgcgagaggagaaaagccgcaaa

SEQ ID NO: 279187 - DNA, 1767 bp, Homo sapiens
gtacattttaatactggaattgtactaaaatttccaatagaattggaaatcttaattttgaccttacgaacttagtaaactaaagcatttttcttcagaaataatgattggccatttaagaaacagtaattaaaaccttaaaggcatttgaagagcaaaatttttttaatctagcattgacataatcactgattttgtattttagagatgctcttagtgatcttgcattacactttctgaataaaatgaagatcatggtgattaaggatattgaaagagaagacattgaattcatttgtaaggtaaaacattaacatctgtatttgtggaaaatgtctgataattagataaatgtcttaatttgtggatttgactgttttttccagacaattggaaccaagccagttgctcatattgaccaatttactgctgacatgctgggttctgctgagttagctgaggaggtcaatttaaatggttctggcaaactgctcaagattacaggctgtgccagccctggaaaaacagttacaattgttgttcgtggttctaacaaactggtgattgaagaagctgagcgctccattcatgatgccctatgtgttattcgttgtttagtgaagaagagggctcttattgcaggaggtggtgctccagaaatagagttggccctacgattaactgaatattcacgaacactgagtggtatggaatcctactgcgttcgtgcttttgcagatgctatggaggtcattccatctacactagctgaaaatgccggcctgaatcccatttctacagtaacagaactaagaaaccggcatgcccagggagaaaaaactgcaggcattaatgtccgaaagggtggtatttccaacattttggaggaactggttgtccagcctctgttggtatcagtcagtgctctgactcttgcaactgaaactgttcggagcattctgaaaatagatgatgtggtaaacactcgataatctggataactgactagcaccattatgatcaccagtattgtggctggaatggaagaagatcaccttggtgttccttgtttggaagattatttcctctgaatttctgggcttggtcttccagttggcatttgcctgaagttgtattgaaacaatttaatgaaaatattaaatatttggtttcaaaaggcagatttatcttctcccaacattctgttatttctgatacttttgaaaaactaataaaaactaataaaagaagcgtaaaaagtgagtttacatgttgaggaaaaaaatggcccaatatgctcatcactgataaatgctccctggccttaaaaactaccaacatataatatatatgctgtcttaaaagttaatgatccaagtggcacctctctgaacctactttggcttgggaggctgcccagttaaaacaaaaataagttaatggtacagaaagagaatgaaaaatgaaagcctccttttatcctatcatcctaattccttttcccagtaataatgactgctgtgttggattccttctgcaaataaaagtgtatacagtaaaaaaaaacgaagaaaaaaaaaaaacaaaaaaaaacacaaaaagaacaaaagaaaagaaacaaagaaaaaaaaaaagacaatcaagaaaaaaacaaaaaagaacatcaaaacacaaacaacaaaaaaaaaaaagaaagggggggggccaacatgaaaaccaacaggaggagacgcaaaagagacaacgcgagaggagaaaagccgcaaa

SEQ ID NO: 279188 - DNA, 1518 bp, Homo sapiens
  misc_feature (1381)..(1381): n is a, c, g, or t
  misc_feature (1383)..(1383): n is a, c, g, or t
agcggcttctccgcctccgcctcctcccgacgccggcgccgctttctggaaggttcgtgaaggcagtgagggcttaccgttattacactgcggccggccagaatccgggtccatccgtccttcccgagccaacccagacacagcggagtttgccatgcccgagaatgtggcaccccggagcggggcgactgccggggctgccggcggccgcgggaaaggcgcctatcaggaccgcgacaagccagcccagatccgcttcagcaacatttccgccgccaaagcggttgctgatgctattagaacaagccttggaccaaaaggaatggataaaatgattcaagatggaaaaggtgatgtaaccattacaaatgatggtgctaccattctgaaacaaatgcaagtattacatccagcagccagaatgctggtggagctgtctaaggctcaagatatagaagcaggagatggcaccacatcagtagtcatcattgctggctccctcttagattcttgtaccaagcttcttcagaaagggattcatccaaccatcatttctgagtcattccagaaggccctggaaaagggcattgaaatcttgactgacatgtctcgacctgtggaactgagtgacagagaaactttgttaaatagtgcaaccacttcactgaactcaaaggtggtttctcagtattcaagtctgctttctccaatgagtgtaaatgcagtgatgaaagtgattgacccagccacagccaccagtgtagatcttagagatattaaaatagttaagaagcttggtgggacaattgatgactgtgagttggtggaagggctggttctcacccaaaaagtgtcaaattctggcataaccagagttgaaaaggccaagattgggcttattcagttttgcttatctgctcccaaaacagacatggataatcaaatagtggtttctgactatgcccagatggaccgagtgctgcgagaagagagagcctatattttaaatttagtgaagcaaattaaaaaaacaggatgtaatgtccttctcatacagaaatctattctaagagatgctcttagtgatcttgcattacactttctgaataaaatgaagatcatggtgattaaggatattgaaagagaagacattgaattcatttgtaagacaattggaaccaagccagttgctcatattgaccaatttactgctgacatgctgggttctgctgagttagctgaggaggtcaatttaaatggttctggcaaactgctcaagattacaggctgtgccagccctggaaaaacagttacaattgttgttcgtggttctaacaaactggtgattgaagaagctgagcgctccattcatgatgcccangngtatcggggttaggcacacaagggcctatgggggagggggcccaaaatgagttgcccgatacgagattcaaaagacggttggaccaagggcggctgaagcggggaccccacaggcaaggggaaccttcgcaaacg

SEQ ID NO: 279189 - DNA, 1382 bp, Homo sapiens
  misc_feature (77)..(77): n is a, c, g, or t
  misc_feature (80)..(80): n is a, c, g, or t
  misc_feature (91)..(91): n is a, c, g, or t
  misc_feature (105)..(105): n is a, c, g, or t
  misc_feature (108)..(109): n is a, c, g, or t
aagtcttccatcttgtaccaagtggtcaagcagtggtgatggtcccatttttgtggcaggcggttcggttgagtagngangaggtcaattnaatggtttggcaantgnnaagattacaggctgtgccagccctggaaaaacagttacaattgttgttcgtggttctaacaaactggtgattgaagaagctgagcgctccattcatgatgccctatgtgttattcgttgtttagtgaagaagagggctcttattgcaggaggtggtgctccagaaatagagttggccctacgattaactgaatattcacgaacactgagtggtatggaatcctactgcgttcgtgcttttgcagatgctatggaggtcattccatctacactagctgaaaatgccggcctgaatcccatttctacagtaacagaactaagaaaccggcatgcccagggagaaaaaactgcaggcattaatgtccgaaagggtggtatttccaacattttggaggaactggttgtccagcctctgttggtatcagtcagtgctctgactcttgcaactgaaactgttcggagcattctgaaaatagatgatgtggtaaacactcgataatctggataactgactagcaccattatgatcaccagtattgtggctggaatggaagaagatcaccttggtgttccttgtttggaagattatttcctctgaatttctgggcttggtcttccagttggcatttgcctgaagttgtattgaaacaatttaatgaaaatattaaatatttggtttcaaaaggcagatttatcttctcccaacattctgttatttctgatacttttgaaaaactaataaaaactaataaaagaagcgtaaaaagtgagtttacatgttgaggaaaaaaatggcccaatatgctcatcactgataaatgctccctggccttaaaaactaccaacatataatatatatgctgtcttaaaagttaatgatccaagtggcacctctctgaacctactttggcttgggaggctgcccagttaaaacaaaaataagttaatggtacagaaagagaatgaaaaatgaaagcctccttttatcctatcatcctaattccttttcccagtaataatgactgctgtgttggattccttctgcaaataaaagtgtatacagtaaaaaaaaacgaagaaaaaaaaaaaacaaaaaaaaacacaaaaagaacaaaagaaaagaaacaaagaaaaaaaaaaagacaatcaagaaaaaaacaaaaaagaacatcaaaacacaaacaacaaaaaaaaaaaagaaagggggggggccaacatgaaaaccaacaggaggagacgcaaaagagacaacgcgagaggagaaaagccgcaaa

SEQ ID NO: 279190 - DNA, 1010 bp, Homo sapiens
agcggcttctccgcctccgcctcctcccgacgccggcgccgctttctggaaggttcgtgaaggcagtgagggcttaccgttattacactgcggccggccagaatccgggtccatccgtccttcccgagccaacccagacacagcggagtttgccatgcccgagaatgtggcaccccggagcggggcgactgccggggctgccggcggccgcgggaaaggcgcctatcaggaccgcgacaagccagcccagatccgcttcagcaacatttccgccgccaaagcggttgctgatgctattagaacaagccttggaccaaaaggaatggataaaatgattcaagatggaaaaggtgatgtaaccattacaaatgatggtgctaccattctgaaacaaatgcaagtattacatccagcagccagaatgctggtggagctgtctaaggctcaagatatagaagcaggagatggcaccacatcagtagtcatcattgctggctccctcttagattcttgtaccaagcttcttcagaaagggattcatccaaccatcatttctgagtcattccagaaggccctggaaaagggcattgaaatcttgactgacatgtctcgacctgtggaactgagtgacagagaaactttgttaaatagtgcaaccacttcactgaactcaaaggtggtttctcagtattcaagtctgctttctccaatgagtgtaaatgcagtgatgaaagtgattgacccagccacagccaccagtgtagatcttagagatattaaaatagttaagaagcttggtgggacaattgatgactgtgagttggtggaagggctggttctcacccaaaaagtgtcaaattctggcataaccagagttgaaaaggccaagattgggcttattcagttttgcttatctgctcccaaaacagacatggataatcaaatagtggtttctgactatgcccagatggaccgaatgttcaggtaccagctcgattctatcatgtcta

SEQ ID NO: 279191 - DNA, 1036 bp, Homo sapiens
gcggccgcctactactactaaattcgcggccgcgtcgacgaaaatgccggcctgaatcccatttctacagtaacagaactaagaaaccggcatgcccagggagaaaaaactgcaggcattaatgtccgaaagggtggtatttccaacattttggaggaactggttgtccagcctctgttggtatcagtcagtgctctgactcttgcaactgaaactgttcggagcattctgaaaatagatgatgtggtaaacactcgataatctggataactgactagcaccattatgatcaccagtattgtggctggaatggaagaagatcaccttggtgttccttgtttggaagattatttcctctgaatttctgggcttggtcttccagttggcatttgcctgaagttgtattgaaacaatttaatgaaaatattaaatatttggtttcaaaaggcagatttatcttctcccaacattctgttatttctgatacttttgaaaaactaataaaaactaataaaagaagcgtaaaaagtgagtttacatgttgaggaaaaaaatggcccaatatgctcatcactgataaatgctccctggccttaaaaactaccaacatataatatatatgctgtcttaaaagttaatgatccaagtggcacctctctgaacctactttggcttgggaggctgcccagttaaaacaaaaataagttaatggtacagaaagagaatgaaaaatgaaagcctccttttatcctatcatcctaattccttttcccagtaataatgactgctgtgttggattccttctgcaaataaaagtgtatacagtaaaaaaaaacgaagaaaaaaaaaaaacaaaaaaaaacacaaaaagaacaaaagaaaagaaacaaagaaaaaaaaaaagacaatcaagaaaaaaacaaaaaagaacatcaaaacacaaacaacaaaaaaaaaaaagaaagggggggggccaacatgaaaaccaacaggaggagacgcaaaagagacaacgcgagaggagaaaagccgcaaa

SEQ ID NO: 279192 - DNA, 990 bp, Homo sapiens
ccggaccaatgcatattactgacagtacagaactaagaaaccggcatgcccagggagaaaaaactgcaggcattaatgtccgaaagggtggtatttccaacattttggaggaactggttgtccagcctctgttggtatcagtcagtgctctgactcttgcaactgaaactgttcggagcattctgaaaatagatgatgtggtaaacactcgataatctggataactgactagcaccattatgatcaccagtattgtggctggaatggaagaagatcaccttggtgttccttgtttggaagattatttcctctgaatttctgggcttggtcttccagttggcatttgcctgaagttgtattgaaacaatttaatgaaaatattaaatatttggtttcaaaaggcagatttatcttctcccaacattctgttatttctgatacttttgaaaaactaataaaaactaataaaagaagcgtaaaaagtgagtttacatgttgaggaaaaaaatggcccaatatgctcatcactgataaatgctccctggccttaaaaactaccaacatataatatatatgctgtcttaaaagttaatgatccaagtggcacctctctgaacctactttggcttgggaggctgcccagttaaaacaaaaataagttaatggtacagaaagagaatgaaaaatgaaagcctccttttatcctatcatcctaattccttttcccagtaataatgactgctgtgttggattccttctgcaaataaaagtgtatacagtaaaaaaaaacgaagaaaaaaaaaaaacaaaaaaaaacacaaaaagaacaaaagaaaagaaacaaagaaaaaaaaaaagacaatcaagaaaaaaacaaaaaagaacatcaaaacacaaacaacaaaaaaaaaaaagaaagggggggggccaacatgaaaaccaacaggaggagacgcaaaagagacaacgcgagaggagaaaagccgcaaa

SEQ ID NO: 279193 - DNA, 1120 bp, Homo sapiens
  misc_feature (133)..(133): n is a, c, g, or t
gtagttaggattgggtgacaccagcattaattcagttttccaaattttaattgaaataacatcccacagtgtagagaaaagcttagtagagtatcatattctaatcttcttagaaagaaaactagatttaggncttgaggtacactggtaaccacgtggctgctgatgtgtattatcacagacactaaaagcaacttgtgctgatttgatttgcagggtggtatttccaacattttggaggaactggttgtccagcctctgttggtatcagtcagtgctctgactcttgcaactgaaactgttcggagcattctgaaaatagatgatgtggtaaacactcgataatctggataactgactagcaccattatgatcaccagtattgtggctggaatggaagaagatcaccttggtgttccttgtttggaagattatttcctctgaatttctgggcttggtcttccagttggcatttgcctgaagttgtattgaaacaatttaatgaaaatattaaatatttggtttcaaaaggcagatttatcttctcccaacattctgttatttctgatacttttgaaaaactaataaaaactaataaaagaagcgtaaaaagtgagtttacatgttgaggaaaaaaatggcccaatatgctcatcactgataaatgctccctggccttaaaaactaccaacatataatatatatgctgtcttaaaagttaatgatccaagtggcacctctctgaacctactttggcttgggaggctgcccagttaaaacaaaaataagttaatggtacagaaagagaatgaaaaatgaaagcctccttttatcctatcatcctaattccttttcccagtaataatgactgctgtgttggattccttctgcaaataaaagtgtatacagtaaaaaaaaacgaagaaaaaaaaaaaacaaaaaaaaacacaaaaagaacaaaagaaaagaaacaaagaaaaaaaaaaagacaatcaagaaaaaaacaaaaaagaacatcaaaacacaaacaacaaaaaaaaaaaagaaagggggggggccaacatgaaaaccaacaggaggagacgcaaaagagacaacgcgagaggagaaaagccgcaaa

SEQ ID NO: 279194 - DNA, 1315 bp, Homo sapiens
  misc_feature (137)..(137): n is a, c, g, or t
  misc_feature (140)..(140): n is a, c, g, or t
  misc_feature (157)..(157): n is a, c, g, or t
  misc_feature (169)..(169): n is a, c, g, or t
  misc_feature (184)..(184): n is a, c, g, or t
  misc_feature (186)..(186): n is a, c, g, or t
  misc_feature (236)..(236): n is a, c, g, or t
  misc_feature (258)..(258): n is a, c, g, or t
  misc_feature (282)..(282): n is a, c, g, or t
gtggtttgcgcttttggcggtgttggcgggccacctatctaccatgttcacattagtgaacaaaagtctttgctctcagagattacatactagacagagtaaacaaataagtgaattatctgtaaattgagcattcntantttgaatactccaaaantcaaaacacttnggtcctaatcatttngnaaaaaggatactcctccatcagtattttagatctagacagttctgttgcngcttgtcctgttttaggaatgnaggaaatagcattctcagagctcntaactagattgtaccattttgacatctgaaggaagatgagatgaatcctcaaaatgtattctgccataagctgattacaaataccgtgcccggccaagtttttacttttgataaatatttgctagtcatcaaggtgacagcagttcttaatacaggttttccttttattaattgccttaaacattttccagctttaaaattctgtcattacaggttttgaaatctaagtttttctcttatcaggtaaacactcgataatctggataactgactagcaccattatgatcaccagtattgtggctggaatggaagaagatcaccttggtgttccttgtttggaagattatttcctctgaatttctgggcttggtcttccagttggcatttgcctgaagttgtattgaaacaatttaatgaaaatattaaatatttggtttcaaaaggcagatttatcttctcccaacattctgttatttctgatacttttgaaaaactaataaaaactaataaaagaagcgtaaaaagtgagtttacatgttgaggaaaaaaatggcccaatatgctcatcactgataaatgctccctggccttaaaaactaccaacatataatatatatgctgtcttaaaagttaatgatccaagtggcacctctctgaacctactttggcttgggaggctgcccagttaaaacaaaaataagttaatggtacagaaagagaatgaaaaatgaaagcctccttttatcctatcatcctaattccttttcccagtaataatgactgctgtgttggattccttctgcaaataaaagtgtatacagtaaaaaaaaacgaagaaaaaaaaaaaacaaaaaaaaacacaaaaagaacaaaagaaaagaaacaaagaaaaaaaaaaagacaatcaagaaaaaaacaaaaaagaacatcaaaacacaaacaacaaaaaaaaaaaagaaagggggggggccaacatgaaaaccaacaggaggagacgcaaaagagacaacgcgagaggagaaaagccgcaaa

SEQ ID NO: 279195 - DNA, 160 bp, Homo sapiens
taataaatgtgaggctgaatcatattttattggactgatgacttttaatctgttcatctattaaacgtacagatgtccactccctcttaactacccctctttgttttcttttatccttagtgggacaattgatgactgtgagttggtggaagggctggtt

SEQ ID NO: 279196 - DNA, 2090 bp, Homo sapiens
  misc_feature (2055)..(2055): n is a, c, g, or t
  misc_feature (2059)..(2059): n is a, c, g, or t
  misc_feature (2066)..(2066): n is a, c, g, or t
agcggcttctccgcctccgcctcctcccgacgccggcgccgctttctggaaggttcgtgaaggcagtgagggcttaccgttattacactgcggccggccagaatccgggtccatccgtccttcccgagccaacccagacacagcggagtttgccatgcccgagaatgtggcaccccggagcggggcgactgccggggctgccggcggccgcgggaaaggcgcctatcaggaccgcgacaagccagcccagatccgcttcagcaacatttccgccgccaaagcggttgctgatgctattagaacaagccttggaccaaaaggaatggataaaatgattcaagatggaaaaggtgatgtaaccattacaaatgatggtgctaccattctgaaacaaatgcaagtattacatccagcagccagaatgctggtggagctgtctaaggctcaagatatagaagcaggagatggcaccacatcagtagtcatcattgctggctccctcttagattcttgtaccaagcttcttcagaaagggattcatccaaccatcatttctgagtcattccagaaggccctggaaaagggcattgaaatcttgactgacatgtctcgacctgtggaactgagtgacagagaaactttgttaaatagtgcaaccacttcactgaactcaaaggtggtttctcagtattcaagtctgctttctccaatgagtgtaaatgcagtgatgaaagtgattgacccagccacagccaccagtgtagatcttagagatattaaaatagttaagaagcttggtgggacaattgatgactgtgagttggtggaagggctggttctcacccaaaaagtgtcaaattctggcataaccagagttgaaaaggccaagattgggcttattcagttttgcttatctgctcccaaaacagacatggataatcaaatagtggtttctgactatgcccagatggaccgagtgctgcgagaagagagagcctatattttaaatttagtgaagcaaattaaaaaaacaggatgtaatgtccttctcatacagaaatctattctaagagatgctcttagtgatcttgcattacactttctgaataaaatgaagatcatggtgattaaggatattgaaagagaagacattgaattcatttgtaagacaattggaaccaagccagttgctcatattgaccaatttactgctgacatgctgggttctgctgagttagctgaggaggtcaatttaaatggttctggcaaactgctcaagattacaggctgtgccagccctggaaaaacagttacaattgttgttcgtggttctaacaaactggtgattgaagaagctgagcgctccattcatgatgccctatgtgttattcgttgtttagtgaagaagagggctcttattgcaggaggtggtgctccagaaatagagttggccctacgattaactgaatattcacgaacactgagtggtatggaatcctactgcgttcgtgcttttgcagatgctatggaggtcattccatctacactagctgaaaatgccggcctgaatcccatttctacagtaacagaactaagaaaccggcatgcccagggagaaaaaactgcaggcattaatgtccgaaagggtggtatttccaacattttggaggaactggttgtccagcctctgttggtatcagtcagtgctctgactcttgcaactgaaactgttcggagcattctgaaaatagatgatgtggtaaacactcgataatctggataactgactagcaccattatgatcaccagtattgtggctggaatggaagaagatcaccttggtgttccttgtttggaagattatttcctctgaatttctgggcttggtcttccagttggcatttgcctgaagttgtattgaaacaatttaatgaaaatattaaatatttggtttcaaaaggcagatttatcttctcccaacattctgttatttctgatacttttgaaaaactaataaaaactaataaaagaagatgcggccagaaataaaaacangggngtgcagnaaatgtgaacagtcaattactgcg

SEQ ID NO: 279197 - DNA, 2082 bp, Homo sapiens
agcggcttctccgcctccgcctcctcccgacgccggcgccgctttctggaaggttcgtgaaggcagtgagggcttaccgttattacactgcggccggccagaatccgggtccatccgtccttcccgagccaacccagacacagcggagtttgccatgcccgagaatgtggcaccccggagcggggcgactgccggggctgccggcggccgcgggaaaggcgcctatcaggaccgcgacaagccagcccagatccgcttcagcaacatttccgccgccaaagcggttgctgatgctattagaacaagccttggaccaaaaggaatggataaaatgattcaagatggaaaaggtgatgtaaccattacaaatgatggtgctaccattctgaaacaaatgcaagtattacatccagcagccagaatgctggtggagctgtctaaggctcaagatatagaagcaggagatggcaccacatcagtagtcatcattgctggctccctcttagattcttgtaccaagcttcttcagaaagggattcatccaaccatcatttctgagtcattccagaaggccctggaaaagggcattgaaatcttgactgacatgtctcgacctgtggaactgagtgacagagaaactttgttaaatagtgcaaccacttcactgaactcaaaggtggtttctcagtattcaagtctgctttctccaatgagtgtaaatgcagtgatgaaagtgattgacccagccacagccaccagtgtagatcttagagatattaaaatagttaagaagcttggtgggacaattgatgactgtgagttggtggaagggctggttctcacccaaaaagtgtcaaattctggcataaccagagttgaaaaggccaagattgggcttattcagttttgcttatctgctcccaaaacagacatggataatcaaatagtggtttctgactatgcccagatggaccgagtgctgcgagaagagagagcctatattttaaatttagtgaagcaaattaaaaaaacaggatgtaatgtccttctcatacagaaatctattctaagagatgctcttagtgatcttgcattacactttctgaataaaatgaagatcatggtgattaaggatattgaaagagaagacattgaattcatttgtaagacaattggaaccaagccagttgctcatattgaccaatttactgctgacatgctgggttctgctgagttagctgaggaggtcaatttaaatggttctggcaaactgctcaagattacaggctgtgccagccctggaaaaacagttacaattgttgttcgtggttctaacaaactggtgattgaagaagctgagcgctccattcatgatgccctatgtgttattcgttgtttagtgaagaagagggctcttattgcaggaggtggtgctccagaaatagagttggccctacgattaactgaatattcacgaacactgagtggtatggaatcctactgcgttcgtgcttttgcagatgctatggaggtcattccatctacactagctgaaaatgccggcctgaatcccatttctacagtaacagaactaagaaaccggcatgcccagggagaaaaaactgcaggcattaatgtccgaaagggtggtatttccaacattttggaggaactggttgtccagcctctgttggtatcagtcagtgctctgactcttgcaactgaaactgttcggagcattctgaaaatagatgatgtggtaaacactcgataatctggataactgactagcaccattatgatcaccagtattgtggctggaatggaagaagatcaccttggtgttccttgtttggaagattatttcctctgaatttctgggcttggtcttccagttggcatttgcctgaagttgtattgaaacaatttaatgaaaatattaaatatttggtttcaaaaggcagatttatcttctcccaacattctgttatttctgatacttttgaaaaactaataaaaactaataaaagaagattgcggctggctttcataccttaacacatcctccgcggccaacgttga

SEQ ID NO: 279198 - DNA, 2495 bp, Homo sapiens
agcggcttctccgcctccgcctcctcccgacgccggcgccgctttctggaaggttcgtgaaggcagtgagggcttaccgttattacactgcggccggccagaatccgggtccatccgtccttcccgagccaacccagacacagcggagtttgccatgcccgagaatgtggcaccccggagcggggcgactgccggggctgccggcggccgcgggaaaggcgcctatcaggaccgcgacaagccagcccagatccgcttcagcaacatttccgccgccaaagcggttgctgatgctattagaacaagccttggaccaaaaggaatggataaaatgattcaagatggaaaaggtgatgtaaccattacaaatgatggtgctaccattctgaaacaaatgcaagtattacatccagcagccagaatgctggtggagctgtctaaggctcaagatatagaagcaggagatggcaccacatcagtagtcatcattgctggctccctcttagattcttgtaccaagcttcttcagaaagggattcatccaaccatcatttctgagtcattccagaaggccctggaaaagggcattgaaatcttgactgacatgtctcgacctgtggaactgagtgacagagaaactttgttaaatagtgcaaccacttcactgaactcaaaggtggtttctcagtattcaagtctgctttctccaatgagtgtaaatgcagtgatgaaagtgattgacccagccacagccaccagtgtagatcttagagatattaaaatagttaagaagcttggtgggacaattgatgactgtgagttggtggaagggctggttctcacccaaaaagtgtcaaattctggcataaccagagttgaaaaggccaagattgggcttattcagttttgcttatctgctcccgtgctgcgagaagagagagcctatattttaaatttagtgaagcaaattaaaaaaacaggatgtaatgtccttctcatacagaaatctattctaagagatgctcttagtgatcttgcattacactttctgaataaaatgaagatcatggtgattaaggatattgaaagagaagacattgaattcatttgtaagacaattggaaccaagccagttgctcatattgaccaatttactgctgacatgctgggttctgctgagttagctgaggaggtcaatttaaatggttctggcaaactgctcaagattacaggctgtgccagccctggaaaaacagttacaattgttgttcgtggttctaacaaactggtgattgaagaagctgagcgctccattcatgatgccctatgtgttattcgttgtttagtgaagaagagggctcttattgcaggaggtggtgctccagaaatagagttggccctacgattaactgaatattcacgaacactgagtggtatggaatcctactgcgttcgtgcttttgcagatgctatggaggtcattccatctacactagctgaaaatgccggcctgaatcccatttctacagtaacagaactaagaaaccggcatgcccagggagaaaaaactgcaggcattaatgtccgaaagggtggtatttccaacattttggaggaactggttgtccagcctctgttggtatcagtcagtgctctgactcttgcaactgaaactgttcggagcattctgaaaatagatgatgtggtaaacactcgataatctggataactgactagcaccattatgatcaccagtattgtggctggaatggaagaagatcaccttggtgttccttgtttggaagattatttcctctgaatttctgggcttggtcttccagttggcatttgcctgaagttgtattgaaacaatttaatgaaaatattaaatatttggtttcaaaaggcagatttatcttctcccaacattctgttatttctgatacttttgaaaaactaataaaaactaataaaagaagcgtaaaaagtgagtttacatgttgaggaaaaaaatggcccaatatgctcatcactgataaatgctccctggccttaaaaactaccaacatataatatatatgctgtcttaaaagttaatgatccaagtggcacctctctgaacctactttggcttgggaggctgcccagttaaaacaaaaataagttaatggtacagaaagagaatgaaaaatgaaagcctccttttatcctatcatcctaattccttttcccagtaataatgactgctgtgttggattccttctgcaaataaaagtgtatacagtaaaaaaaaacgaagaaaaaaaaaaaacaaaaaaaaacacaaaaagaacaaaagaaaagaaacaaagaaaaaaaaaaagacaatcaagaaaaaaacaaaaaagaacatcaaaacacaaacaacaaaaaaaaaaaagaaagggggggggccaacatgaaaaccaacaggaggagacgcaaaagagacaacgcgagaggagaaaagccgcaaa

SEQ ID NO: 279199 - DNA, 2147 bp, Homo sapiens
cggacgcgtgggtcgacccacgcgtccggagctgtctaaggctcaagatatagaagcaggagatggcaccacatcagtagtcatcattgctggctccctcttagattcttgtaccaagcttcttcagaaagggattcatccaaccatcatttctgagtcattccagaaggccctggaaaagggcattgaaatcttgactgacatgtctcgacctgtggaactgagtgacagagaaactttgttaaatagtgcaaccacttcactgaactcaaaggtggtttctcagtattcaagtctgctttctccaatgagtgtaaatgcagtgatgaaagtgattgacccagccacagccaccagtgtagatcttagagatattaaaatagttaagaagcttggtgggacaattgatgactgtgagttggtggaagggctggttctcacccaaaaagtgtcaaattctggcataaccagagttgaaaaggccaagattgggcttattcagttttgcttatctgctcccaaaacagacatggataatcaaatagtggtttctgactatgcccagatggaccgagtgctgcgagaagagagagcctatattttaaatttagtgaagcaaattaaaaaaacaggatgtaatgtccttctcatacagaaatctattctaagagatgctcttagtgatcttgcattacactttctgaataaaatgaagatcatggtgattaaggatattgaaagagaagacattgaattcatttgtaagacaattggaaccaagccagttgctcatattgaccaatttactgctgacatgctgggttctgctgagttagctgaggaggtcaatttaaatggttctggcaaactgctcaagattacaggctgtgccagccctggaaaaacagttacaattgttgttcgtggttctaacaaactggtgattgaagaagctgagcgctccattcatgatgccctatgtgttattcgttgtttagtgaagaagagggctcttattgcaggaggtggtgctccagaaatagagttggccctacgattaactgaatattcacgaacactgagtggtatggaatcctactgcgttcgtgcttttgcagatgctatggaggtcattccatctacactagctgaaaatgccggcctgaatcccatttctacagtaacagaactaagaaaccggcatgcccagggagaaaaaactgcaggcattaatgtccgaaagggtggtatttccaacattttggaggaactggttgtccagcctctgttggtatcagtcagtgctctgactcttgcaactgaaactgttcggagcattctgaaaatagatgatgtggtaaacactcgataatctggataactgactagcaccattatgatcaccagtattgtggctggaatggaagaagatcaccttggtgttccttgtttggaagattatttcctctgaatttctgggcttggtcttccagttggcatttgcctgaagttgtattgaaacaatttaatgaaaatattaaatatttggtttcaaaaggcagatttatcttctcccaacattctgttatttctgatacttttgaaaaactaataaaaactaataaaagaagcgtaaaaagtgagtttacatgttgaggaaaaaaatggcccaatatgctcatcactgataaatgctccctggccttaaaaactaccaacatataatatatatgctgtcttaaaagttaatgatccaagtggcacctctctgaacctactttggcttgggaggctgcccagttaaaacaaaaataagttaatggtacagaaagagaatgaaaaatgaaagcctccttttatcctatcatcctaattccttttcccagtaataatgactgctgtgttggattccttctgcaaataaaagtgtatacagtaaaaaaaaacgaagaaaaaaaaaaaacaaaaaaaaacacaaaaagaacaaaagaaaagaaacaaagaaaaaaaaaaagacaatcaagaaaaaaacaaaaaagaacatcaaaacacaaacaacaaaaaaaaaaaagaaagggggggggccaacatgaaaaccaacaggaggagacgcaaaagagacaacgcgagaggagaaaagccgcaaa

SEQ ID NO: 279200 - DNA, 2495 bp, Homo sapiens
agcggcttctccgcctccgcctcctcccgacgccggcgccgctttctggaaggttcgtgaaggcagtgagggcttaccgttattacactgcggccggccagaatccgggtccatccgtccttcccgagccaacccagacacagcggagtttgccatgcccgagaatgtggcaccccggagcggggcgactgccggggctgccggcggccgcgggaaaggcgcctatcaggaccgcgacaagccagcccagatccgcttcagcaacatttccgccgccaaagcggttgctgatgctattagaacaagccttggaccaaaaggaatggataaaatgattcaagatggaaaaggtgatgtaaccattacaaatgatggtgctaccattctgaaacaaatgcaagtattacatccagcagccagaatgctggtggagctgtctaaggctcaagatatagaagcaggagatggcaccacatcagtagtcatcattgctggctccctcttagattcttgtaccaagcttcttcagaaagggattcatccaaccatcatttctgagtcattccagaaggccctgggagaaactttgttaaatagtgcaaccacttcactgaactcaaaggtggtttctcagtattcaagtctgctttctccaatgagtgtaaatgcagtgatgaaagtgattgacccagccacagccaccagtgtagatcttagagatattaaaatagttaagaagcttggtgggacaattgatgactgtgagttggtggaagggctggttctcacccaaaaagtgtcaaattctggcataaccagagttgaaaaggccaagattgggcttattcagttttgcttatctgctcccaaaacagacatggataatcaaatagtggtttctgactatgcccagatggaccgagtgctgcgagaagagagagcctatattttaaatttagtgaagcaaattaaaaaaacaggatgtaatgtccttctcatacagaaatctattctaagagatgctcttagtgatcttgcattacactttctgaataaaatgaagatcatggtgattaaggatattgaaagagaagacattgaattcatttgtaagacaattggaaccaagccagttgctcatattgaccaatttactgctgacatgctgggttctgctgagttagctgaggaggtcaatttaaatggttctggcaaactgctcaagattacaggctgtgccagccctggaaaaacagttacaattgttgttcgtggttctaacaaactggtgattgaagaagctgagcgctccattcatgatgccctatgtgttattcgttgtttagtgaagaagagggctcttattgcaggaggtggtgctccagaaatagagttggccctacgattaactgaatattcacgaacactgagtggtatggaatcctactgcgttcgtgcttttgcagatgctatggaggtcattccatctacactagctgaaaatgccggcctgaatcccatttctacagtaacagaactaagaaaccggcatgcccagggagaaaaaactgcaggcattaatgtccgaaagggtggtatttccaacattttggaggaactggttgtccagcctctgttggtatcagtcagtgctctgactcttgcaactgaaactgttcggagcattctgaaaatagatgatgtggtaaacactcgataatctggataactgactagcaccattatgatcaccagtattgtggctggaatggaagaagatcaccttggtgttccttgtttggaagattatttcctctgaatttctgggcttggtcttccagttggcatttgcctgaagttgtattgaaacaatttaatgaaaatattaaatatttggtttcaaaaggcagatttatcttctcccaacattctgttatttctgatacttttgaaaaactaataaaaactaataaaagaagcgtaaaaagtgagtttacatgttgaggaaaaaaatggcccaatatgctcatcactgataaatgctccctggccttaaaaactaccaacatataatatatatgctgtcttaaaagttaatgatccaagtggcacctctctgaacctactttggcttgggaggctgcccagttaaaacaaaaataagttaatggtacagaaagagaatgaaaaatgaaagcctccttttatcctatcatcctaattccttttcccagtaataatgactgctgtgttggattccttctgcaaataaaagtgtatacagtaaaaaaaaacgaagaaaaaaaaaaaacaaaaaaaaacacaaaaagaacaaaagaaaagaaacaaagaaaaaaaaaaagacaatcaagaaaaaaacaaaaaagaacatcaaaacacaaacaacaaaaaaaaaaaagaaagggggggggccaacatgaaaaccaacaggaggagacgcaaaagagacaacgcgagaggagaaaagccgcaaa

SEQ ID NO: 279201 - DNA, 1949 bp, Homo sapiens
agttaactcgaccagtgcgttcgcgacgcgtgcgacctcctgtcatgtctcctgatcatggtcattgctgtgatctaaagtagatccgagcctacatcgacatagctagcctatgtggatatcattcattcaaatgaataatatacgacactcaggtgagagaaaccgtatgcgtggctagcaactaagatcgcacagttgagttcttgagagatcgtcatgtggcatcatactcaaacaggtagtccaattcgtaggctctatactcgagttgacagcccggcaccgtgttgggcttattcagttttgcttatctgctcccaaaacagacatggataatcaaatagtggtttctgactatgcccagatggaccgagtgctgcgagaagagagagcctatattttaaatttagtgaagcaaattaaaaaaacaggatgtaatgtccttctcatacagaaatctattctaagagatgctcttagtgatcttgcattacactttctgaataaaatgaagatcatggtgattaaggatattgaaagagaagacattgaattcatttgtaagacaattggaaccaagccagttgctcatattgaccaatttactgctgacatgctgggttctgctgagttagctgaggaggtcaatttaaatggttctggcaaactgctcaagattacaggctgtgccagccctggaaaaacagttacaattgttgttcgtggttctaacaaactggtgattgaagaagctgagcgctccattcatgatgccctatgtgttattcgttgtttagtgaagaagagggctcttattgcaggaggtggtgctccagaaatagagttggccctacgattaactgaatattcacgaacactgagtggtatggaatcctactgcgttcgtgcttttgcagatgctatggaggtcattccatctacactagctgaaaatgccggcctgaatcccatttctacagtaacagaactaagaaaccggcatgcccagggagaaaaaactgcaggcattaatgtccgaaagggtggtatttccaacattttggaggaactggttgtccagcctctgttggtatcagtcagtgctctgactcttgcaactgaaactgttcggagcattctgaaaatagatgatgtggtaaacactcgataatctggataactgactagcaccattatgatcaccagtattgtggctggaatggaagaagatcaccttggtgttccttgtttggaagattatttcctctgaatttctgggcttggtcttccagttggcatttgcctgaagttgtattgaaacaatttaatgaaaatattaaatatttggtttcaaaaggcagatttatcttctcccaacattctgttatttctgatacttttgaaaaactaataaaaactaataaaagaagcgtaaaaagtgagtttacatgttgaggaaaaaaatggcccaatatgctcatcactgataaatgctccctggccttaaaaactaccaacatataatatatatgctgtcttaaaagttaatgatccaagtggcacctctctgaacctactttggcttgggaggctgcccagttaaaacaaaaataagttaatggtacagaaagagaatgaaaaatgaaagcctccttttatcctatcatcctaattccttttcccagtaataatgactgctgtgttggattccttctgcaaataaaagtgtatacagtaaaaaaaaacgaagaaaaaaaaaaaacaaaaaaaaacacaaaaagaacaaaagaaaagaaacaaagaaaaaaaaaaagacaatcaagaaaaaaacaaaaaagaacatcaaaacacaaacaacaaaaaaaaaaaagaaagggggggggccaacatgaaaaccaacaggaggagacgcaaaagagacaacgcgagaggagaaaagccgcaaa

SEQ ID NO: 279202 - DNA, 1516 bp, Homo sapiens
  misc_feature (22)..(23): n is a, c, g, or t
  misc_feature (29)..(30): n is a, c, g, or t
  misc_feature (34)..(35): n is a, c, g, or t
ggctagcgggactgctctcttnntaaccnncgcnncagagatgctcttagtgatcttgcattacactttctgaataaaatgaagatcatggtgattaaggatattgaaagagaagacattgaattcatttgtaagacaattggaaccaagccagttgctcatattgaccaatttactgctgacatgctgggttctgctgagttagctgaggaggtcaatttaaatggttctggcaaactgctcaagattacaggctgtgccagccctggaaaaacagttacaattgttgttcgtggttctaacaaactggtgattgaagaagctgagcgctccattcatgatgccctatgtgttattcgttgtttagtgaagaagagggctcttattgcaggaggtggtgctccagaaatagagttggccctacgattaactgaatattcacgaacactgagtggtatggaatcctactgcgttcgtgcttttgcagatgctatggaggtcattccatctacactagctgaaaatgccggcctgaatcccatttctacagtaacagaactaagaaaccggcatgcccagggagaaaaaactgcaggcattaatgtccgaaagggtggtatttccaacattttggaggaactggttgtccagcctctgttggtatcagtcagtgctctgactcttgcaactgaaactgttcggagcattctgaaaatagatgatgtggtaaacactcgataatctggataactgactagcaccattatgatcaccagtattgtggctggaatggaagaagatcaccttggtgttccttgtttggaagattatttcctctgaatttctgggcttggtcttccagttggcatttgcctgaagttgtattgaaacaatttaatgaaaatattaaatatttggtttcaaaaggcagatttatcttctcccaacattctgttatttctgatacttttgaaaaactaataaaaactaataaaagaagcgtaaaaagtgagtttacatgttgaggaaaaaaatggcccaatatgctcatcactgataaatgctccctggccttaaaaactaccaacatataatatatatgctgtcttaaaagttaatgatccaagtggcacctctctgaacctactttggcttgggaggctgcccagttaaaacaaaaataagttaatggtacagaaagagaatgaaaaatgaaagcctccttttatcctatcatcctaattccttttcccagtaataatgactgctgtgttggattccttctgcaaataaaagtgtatacagtaaaaaaaaacgaagaaaaaaaaaaaacaaaaaaaaacacaaaaagaacaaaagaaaagaaacaaagaaaaaaaaaaagacaatcaagaaaaaaacaaaaaagaacatcaaaacacaaacaacaaaaaaaaaaaagaaagggggggggccaacatgaaaaccaacaggaggagacgcaaaagagacaacgcgagaggagaaaagccgcaaa

SEQ ID NO: 279203 - DNA, 2300 bp, Homo sapiens
agcggcttctccgcctccgcctcctcccgacgccggcgccgctttctggaaggttcgtgaaggcagtgagggcttaccgttattacactgcggccggccagaatccgggtccatccgtccttcccgagccaacccagacacagcggagtttgccatgcccgagaatgtggcaccccggagcggggcgactgccggggctgccggcggccgcgggaaaggcgcctatcaggaccgcgacaagccagcccagatccgcttcagcaacatttccgccgccaaagcggttgctgatgctattagaacaagccttggaccaaaaggaatggataaaatgattcaagatggaaaaggtgatgtaaccattacaaatgatggtgctaccattctgaaacaaatgcaagtattacatccagcagccagaatgctggtggagctgtctaaggctcaagatatagaagcaggagatggcaccacatcagtagtcatcattgctggctccctcttagattcttgtaccaagcttcttcagaaagggattcatccaaccatcatttctgagtcattccagaaggccctggaaaagggcattgaaatcttgactgacatgtctcgacctgtggaactgagtgacagagaaactttgttaaatagtgcaaccacttcactgaactcaaaggtggtttctcagtattcaagtctgctttctccaatgagtgtaaatgcagtgatgaaagtgattgacccagccacagccaccagtgtagatcttagagatattaaaatagttaagaagcttggtgggacaattgatgactgtgagttggtggaagggctggttctcacccaaaaagtgtcaaattctggcataaccagagttgaaaaggccaagattgggcttattcagttttgcttatctgctcccaaaacagacatggataatcaaatagtggtttctgactatgcccagatggaccgagtgctgcgagaagagagagcctatattttaaatttagtgaagcaaattaaaaaaacaggatgtaatgtccttctcatacagaaatctattctaagagatgctcttagtgatcttgcattacactttctgaataaaatgaagatcatggtgattaaggatattgaaagagaagacattgaattcatttgtaagacaattggaaccaagccagttgctcatattgaccaatttactgctgacatgctgggttctgctgagttagctgaggaggtcaatttaaatggttctggcaaactgctcaagggtggtatttccaacattttggaggaactggttgtccagcctctgttggtatcagtcagtgctctgactcttgcaactgaaactgttcggagcattctgaaaatagatgatgtggtaaacactcgataatctggataactgactagcaccattatgatcaccagtattgtggctggaatggaagaagatcaccttggtgttccttgtttggaagattatttcctctgaatttctgggcttggtcttccagttggcatttgcctgaagttgtattgaaacaatttaatgaaaatattaaatatttggtttcaaaaggcagatttatcttctcccaacattctgttatttctgatacttttgaaaaactaataaaaactaataaaagaagcaaaaaaaaaaaaaaaaaaaaaaaaaaaaaaaaaaaaaaaaaaaaaaaaaaaaaaaaaaaaaaaaaaaaaaaaaaaaaaaaaaaagaaaaaacaaaaaaaaagaaggggggcgcggcgcactataaatccacccccgggggggcgacacaagtagcagacgacacacacattatagaacaaaagaggggcccccaaagaatgaggaagtgttcatataaaaagcagagcgaagagaaggggcgagcaggataaaaacaaaagatcgagaggaggagaaacaaaacgaggacaagagaggaaaaacatgtgtgaataaaagaacaaccccatccagaaggggggggcgaaaacacaaaaagaggcgcagacaatccaccctcaccaaccgagagacaaatacaaaggacacccaacgagagagcgacgaagcacaaataatccgccacaccacagacaggacggaatgacatcaggcgagtggtgtaccaaaacgaccacacgggcaggatacgaaacgacgcggagggcaagcacgcgaagacacagcacggctgccgccacccctaacggcgaaacgatcagctctactagcgccgacgacaaaatattacaacacacagcaagagagacca

SEQ ID NO: 279204 - DNA, 678 bp, Homo sapiens
agcggcttctccgcctccgcctcctcccgacgccggcgccgctttctggaaggttcgtgaaggcagtgagggcttaccgttattacactgcggccggccagaatccgggtccatccgtccttcccgagccaacccagacacagcggagtttgccatgcccgagaatgtggcaccccggagcggggcgactgccggggctgccggcggccgcgggaaaggcgcctatcaggaccgcgacaagccagcccagatccgcttcagcaacatttccgccgccaaagcggttgctgatgctattagaacaagccttggaccaaaaggaatggataaaatgattcaagatggaaaaggtgatgtaaccattacaaatgatggtgctaccattctgaaacaaatgcaagtattacatccagcagccagaatgctggtggagctgtctaaggctcaagatatagaagcaggagatggcaccacatcagtagtcatcattgctggctccctcttagattcttgtaccaagcttcttcagaaaagatttgtgatattttgagaagtatcggccaggtgcggtgactcatacttgtaatcccagcactttgggaggctgaggctggcagaacaattgagcccaaggagttgagaccagactgggcaacatggcaaaaccctgtctccacc

SEQ ID NO: 279205 - DNA, 581 bp, Homo sapiens
agcggcttctccgcctccgcctcctcccgacgccggcgccgctttctggaaggttcgtgaaggcagtgagggcttaccgttattacactgcggccggccagaatccgggtccatccgtccttcccgagccaacccagacacagcggagtttgccatgcccgagaatgtggcaccccggagcggggcgactgccggggctgccggcggccgcgggaaaggcgcctatcaggaccgcgacaagccagcccagatccgcttcagcaacatttccgccgccaaagcggttgctgatgctattagaacaagccttggaccaaaaggaatggataaaatgattcaagatggaaaaggtgatgtaaccattacaaatgatggtgctaccattctgaaacaaatgcaagtattacatccagcagccagaatgctggtggagctgtctaaggctcaagatatagaagcaggagatggcaccacatcagtagtcatcattgctggctccctcttagattcttgtaccaagcttcttcagaaagattctccaccatattcgaggattccgaggcctggaagggcttgaatct

SEQ ID NO: 279206 - DNA, 1066 bp, Homo sapiens
agcggcttctccgcctccgcctcctcccgacgccggcgccgctttctggaaggttcgtgaaggcagtgagggcttaccgttattacactgcggccggccagaatccgggtccatccgtccttcccgagccaacccagacacagcggagtttgccatgcccgagaatgtggcaccccggagcggggcgactgccggggctgccggcggccgcgggaaaggcgcctatcaggaccgcgacaagccagcccagatccgcttcagcaacatttccgccgccaaagcggttgctgatgctattagaacaagccttggaccaaaaggaatggataaaatgattcaagatggaaaaggtgatgtaaccattacaaatgatggtgctaccattctgaaacaaatgcaagtattacatccagcagccagaatgctggtggtaagtgtaattttaggtgagtctttttttttttttttttttgagacagagtcttgctctgtcatccaggctagagtgccgtggcacaatctcagctcactgcaacctctgcctcccagattcatttctcctgcctcagcctcctgagtagctgggattacaggctcgtgccaccatgcctggttgatttttgtattttcagtagagacgggtttcaccatgttggtcaggctgttctcaaactcctgaccttgtgatccacctacgttggcctcccaaagtgctgggattacagacatgagctactgcgcccggccagatgagtcttcttttttaagtgtatttgatacttggtaaacagttaaatttatttgatcacatgatatttaagcacgatgaacacttttcgtgctgaacaggcatatttttaggatacattgtgtgcctaacattgtgctttttggtgtgaggtgataataaaacacaaatcaagccaggcatagtggtgcatgcctttagtcccagccactccataggctgacatgggaggattatttgagcccaagagtttgtggctgcagagagctataatcacaccacaacactccattctgagtgacagagtgaaaccccaga

SEQ ID NO: 279207 - DNA, 2036 bp, Homo sapiens
acccaactcccccgcccgccccgtgcaggctgtggagactcccttcccgggggagggggcccccactgccgcaggtgccccctctgcctccaccccggctcctggccagaagctggagggggcttggccaaaaagagggagaaacaactcagctgttctttctagctctgaaatagaaaatgtctgcagacggcggaggcatccaggacacccaggacaaggagacacccccggaggttccagatcgtggacatcctcatcaggaaatgccttctaagctgggggaggcggtaccttcaggggacactcaggagtcactgcacattaagatggagcccgaagagccacactccgagggggcatcgcaggaggatggggctcaaggtgcctggggctgggcacccctaagtcacggctctaaggagaaagctctcttcctgcctggcggagccctcccctccccccggatccccgtgctttcccgagaggggaggaccagagaccggcagatggctgcagcgctcctcactgcctggtcccagatgccagtgactttcgaggatgtggccttgtacctctcccgggaggagtggggacggctggaccacacgcagcagaacttctacagggatgtcctgcagaagaaaaatgggctgtcactgggctttcccttcagcaggcctttctgggcccctcaagcgcacggcaagggtgaggcctcgggctccagccggcaggcaggagatgagaaggagtggagaggcgcgtgcacaggagccgtcgaggtggggcagagggtgcagacctcatccgtggcagcccttgggaatgtgaagcccttcagaaccagggcagggagagtccagtggggcgtcccgcagtgcgcgcaggaagcagcctgcggccggagctcagggccggccaaagactccgggcagccggctgagccagatcgcaccccggatgcagctccgccagaccccagtcccacggagccccaggagtaccgcgtcccggagaagcccaacgaggaggagaagggcgccccggagagtggcgaggagggcctggcccctgacagtgaggtgggcaggaagagctaccggtgcgagcagtgcggcaagggcttcagctggcactcgcacctggtgacgcaccggcgcacgcacacgggcgagaagccctacgcctgcactgactgcgggaagcgcttcggccgcagctcgcacctcatccagcaccagatcatccacacgggcgagaagccctacacctgccccgcctgccggaagagcttcagccaccactccacgctgattcagcaccagcgcatccacaccggagagaagccctacgtgtgcgaccgctgcgccaagcgcttcacccgccgctcggacttggtcacccaccagggcacccacacgggcgccaagccgcacaagtgccccatctgcgccaagtgcttcacgcagagctcggcgctagtcacccaccagcgcacccacactggggtcaagccctatccgtgccccgagtgcggcaagtgcttcagccagcgttccaacctcatcgcgcacaaccgcacacacacaggcgagaagccctaccactgcctcgactgcggcaagagcttcagccacagctcgcacctcaccgcgcaccagcgcacccaccgtggcgtgcggccctacgcctgcccgttgtgtggcaagagcttcagccggcgctccaacctgcaccggcacgagaagatccacaccaccgggcccaaggccctggccatgctgatgctgggggcggcggcggcgggggctctggccacacccccacccgctcccacctaggaggccaggaaagggggagcggggcgcccagggccactggaacagccccactggagtcaaggctccgagggaggagagaggggctcgggaagggagctggggcggtgagggcatggggtgaggcatggcgatgggggagggcgagggcgagaaagggcaggcactctgcgaattaaaggccttggacttgaa

SEQ ID NO: 279208 - DNA, 2317 bp, Homo sapiens
  misc_feature (1975)..(1975): n is a, c, g, or t
  misc_feature (1979)..(1979): n is a, c, g, or t
  misc_feature (1988)..(1988): n is a, c, g, or t
  misc_feature (1993)..(1993): n is a, c, g, or t
  misc_feature (1995)..(1995): n is a, c, g, or t
  misc_feature (2002)..(2002): n is a, c, g, or t
acccaactcccccgcccgccccgtgcaggctgtggagactcccttcccgggggagggggcccccactgccgcaggtgccccctctgcctccaccccgctctgaaatagaaaatgtctgcagacggcggaggcatccaggacacccaggacaaggagacacccccggaggttccagatcgtggacatcctcatcaggaaatgccttctaagctgggggaggcggtaccttcaggggacactcaggagtcactgcacattaagatggagcccgaagagccacactccgagggggcatcgcaggaggatggggctcaaggtgcctggggctgggcacccctaagtcacggctctaaggagaaagctctcttcctgcctggcggagccctcccctccccccggatccccgtgctttcccgagaggggaggaccagagaccggcagatggctgcagcgctcctcactgcctggtcccagatgccagtgactttcgaggatgtggccttgtacctctcccgggaggagtggggacggctggaccacacgcagcagaacttctacagggatgtcctgcagaagaaaaatgggctgtcactgggctttcccttcagcaggcctttctgggcccctcaagcgcacggcaagggtgaggcctcgggctccagccggcaggcaggagatgagaaggagtggagaggcgcgtgcacaggagccgtcgaggtggggcagagggtgcagacctcatccgtggcagcccttgggaatgtgaagcccttcagaaccagggcagggagagtccagtggggcgtcccgcagtgcgcgcaggaagcagcctgcggccggagctcagggccggccaaagactccgggcagccggctgagccagatcgcaccccggatgcagctccgccagaccccagtcccacggagccccaggagtaccgcgtcccggagaagcccaacgaggaggagaagggcgccccggagagtggcgaggagggcctggcccctgacagtgaggtgggcaggaagagctaccggtgcgagcagtgcggcaagggcttcagctggcactcgcacctggtgacgcaccggcgcacgcacacgggcgagaagccctacgcctgcactgactgcgggaagcgcttcggccgcagctcgcacctcatccagcaccagatcatccacacgggcgagaagccctacacctgccccgcctgccggaagagcttcagccaccactccacgctgattcagcaccagcgcatccacaccggagagaagccctacgtgtgcgaccgctgcgccaagcgcttcacccgccgctcggacttggtcacccaccagggcacccacacgggcgccaagccgcacaagtgccccatctgcgccaagtgcttcacgcagagctcggcgctagtcacccaccagcgcacccacactggggtcaagccctatccgtgccccgagtgcggcaagtgcttcagccagcgttccaacctcatcgcgcacaaccgcacacacacaggcgagaagccctaccactgcctcgactgcggcaagagcttcagccacagctcgcacctcaccgcgcaccagcgcacccaccgtggcgtgcggccctacgcctgcccgttgtgtggcaagagcttcagccggcgctccaacctgcaccggcacgagaagatccacaccaccgggcccaaggccctggccatgctgatgctgggggcggcggcggcgggggctctggccacacccccacccgctcccacctaggaggccaggaaagggggagcggggcgcccagggccactggaacagccccactggagtcaaggctccgagggaggagagaggggctcgggaagggagctggggcggtgagggcatggggtgaggcatggcgatgggggagggcgagggcgagaaagggcaggcactctgcgaattaaaggccttggacttgaaaaaaaanaaanaaaaaaaanaaaananaaaaaanaaaaaaaaacaacaaaaaaggggggggggcccaaaaattactaccgcggaggggggcacccagagagtgctggccaccccctatagtgtgtacaagaggggcccccataaggaaggacccataaaaacaccaaggacgggggaccgcggtaacaaccagcctcgaggggaaaaaacgcccccggggaccttttggagagaccccccatcgtgggtggcacaggggtcaccaccccaaagatatgacgccgcgagaaatacagcggggttggtgcacacaccattgtctcgggaaaggcccgggataatggagtcc

SEQ ID NO: 279209 - DNA, 2495 bp, Homo sapiens
acccaactcccccgcccgccccgtgcaggctgtggagactcccttcccgggggagggggcccccactgccgcaggtgccccctctgcctccaccccgctctgaaatagaaaatgtctgcagacggcggaggcatccaggacacccaggacaaggagacacccccggaggttccagatcgtggacatcctcatcaggaaatgccttctaagctgggggaggcggtaccttcaggggacactcaggagtcactgcacattaagatggagcccgaagagccacactccgagggggcatcgcaggaggatggggctcaaggtgcctggggctgggcacccctaagtcacggctctaaggagaaagctctcttcctgcctggcggagccctcccctccccccggatccccgtgctttcccgagaggggaggaccagagaccggcagatggctgcagcgctcctcactgcctggtcccagatgccagtgactttcgaggatgtggccttgtacctctcccgggaggagtggggacggctggaccacacgcagcagaacttctacagggatgtcctgcagaagaaaaatgggctgtcactgggctttcccttcagcaggcctttctgggcccctcaagcgcacggcaagggtgaggcctcgggctccagccggcaggcaggagatgagaaggagtggagaggcgcgtgcacaggagccgtcgaggtggggcagagggtgcagacctcatccgtggcagcccttgggaatgtgaagcccttcagaaccagggcagggagagtccagtggggcgtcccgcagtgcgcgcaggaagcagcctgcggccggagctcagggccggccaaagactccgggcagccggctgagccagatcgcaccccggatgcagctccgccagaccccagtcccacggagccccaggagtaccgcgtcccggagaagcccaacgaggaggagaagggcgccccggagagtggcgaggagggcctggcccctgacagtgaggtgggcaggaagagctaccggtgcgagcagtgcggcaagggcttcagctggcactcgcacctggtgacgcaccggcgcacgcacacgggcgagaagccctacgcctgcactgactgcgggaagcgcttcggccgcagctcgcacctcatccagcaccagatcatccacacgggcgagaagccctacacctgccccgcctgccggaagagcttcagccaccactccacgctgattcagcaccagcgcatccacaccggagagaagccctacgtgtgcgaccgctgcgccaagcgcttcacccgccgctcggacttggtcacccaccagggcacccacacgggcgccaagccgcacaagtgccccatctgcgccaagtgcttcacgcagagctcggcgctagtcacccaccagcgcacccacactggggtcaagccctatccgtgccccgagtgcggcaagtgcttcagccagcgttccaacctcatcgcgcacaaccgcacacacacaggcgagaagccctaccactgcctcgactgcggcaagagcttcagccacagctcgcacctcaccgcgcaccagcgcacccaccgtggcgtgcggccctacgcctgcccgttgtgtggcaagagcttcagccggcgctccaacctgcaccggcacgagaagatccacaccaccgggcccaaggccctggccatgctgatgctgggggcggcggcggcgggggctctggccacacccccacccgctcccacctaggaggccaggaaagggggagcggggcgcccagggccactggaacagccccactggagtcaaggctccgagggaggagagaggggctcgggaagggagctggggcggtgagggcatggggtgaggcatggcgatgggggagggcgagggcgagaaagggcaggcactctgcgaattaaaggccttggacttgaagcgcccgcctacacagctttgtctcctggtgccctggcgctgattccccgagcgtgggggagctcctgggctaatcccctgtcctcattgaggcatccccgcatcaccactcttggcttgggtctccaccagggttggggtcccttttgccaaaggcccattccaaagcgttgcacacattggcaagcaaaggcttcaagtacagagaggtttccagggctgaagccagtcagccgctcctggacctggggaccccttgccggccgtctgctgctgacgccacttgtcccaagggcactgcttactgagcccgcactctcccttggctcttctctttggaagccaggagcaggcagaactggtccggaaattcctgcctgccccatctcccactcaggcatcggtggctgggttttgtgactggcctttgccatttgctcccaccatggcctgcctgtggtcctgcgagggctcctcactcaccaggggccactttccttcttggcccatgctgcagctgctgtcac

SEQ ID NO: 279210 - DNA, 2436 bp, Homo sapiens
acccaactcccccgcccgccccgtgcaggctgtggagactcccttcccgggggagggggcccccactgccgcaggtgccccctctgcctccaccccgctctgaaatagaaaatgtctgcagacggcggaggcatccaggacacccaggacaaggagacacccccggaggttccagatcgtggacatcctcatcaggaaatgccttctaagctgggggaggcggtaccttcaggggacactcaggagtcactgcacattaagatggagcccgaagagccacactccgagggggcatcgcaggaggatggggctcaaggtgcctggggctgggcacccctaagtcacggctctaaggagaaagctctcttcctgcctggcggagccctcccctccccccggatccccgtgctttcccgagaggggaggaccagagaccggcagatggctgcagcgctcctcactgcctggtcccagatgccagtgactttcgaggatgtggccttgtacctctcccgggaggagtggggacggctggaccacacgcagcagaacttctacagggatgtcctgcagaagaaaaatgggctgtcactgggctttcccttcagcaggcctttctgggcccctcaagcgcacggcaagggtgaggcctcgggctccagccggcaggcaggagatgagaaggagtggagaggcgcgtgcacaggagccgtcgaggtggggcagagggtgcagacctcatccgtggcagcccttgggaatgtgaagcccttcagaaccagggcagggagagtccagtggggcgtcccgcagtgcgcgcaggaagcagcctgcggccggagctcagggccggccaaagactccgggcagccggctgagccagatcgcaccccggatgcagctccgccagaccccagtcccacggagccccaggagtaccgcgtcccggagaagcccaacgaggaggagaagggcgccccggagagtggcgaggagggcctggcccctgacagtgaggtgggcaggaagagctaccggtgcgagcagtgcggcaagggcttcagctggcactcgcacctggtgacgcaccggcgcacgcacacgggcgagaagccctacgcctgcactgactgcgggaagcgcttcggccgcagctcgcacctcatccagcaccagatcatccacacgggcgagaagccctacacctgccccgcctgccggaagagcttcagccaccactccacgctgattcagcaccagcgcatccacaccggagagaagccctacgtgtgcgaccgctgcgccaagcgcttcacccgccgctcggacttggtcacccaccagggcacccacacgggcgccaagccgcacaagtgccccatctgcgccaagtgcttcacgcagagctcggcgctagtcacccaccagccgttccaacctcatcgcgcacaaccgcacacacacaggcgagaagccctaccactgcctcgactgcggcaagagcttcagccacagctcgcacctcaccgcgcaccagcgcacccaccgtggcgtgcggccctacgcctgcccgttgtgtggcaagagcttcagccggcgctccaacctgcaccggcacgagaagatccacaccaccgggcccaaggccctggccatgctgatgctgggggcggcggcggcgggggctctggccacacccccacccgctcccacctaggaggccaggaaagggggagcggggcgcccagggccactggaacagccccactggagtcaaggctccgagggaggagagaggggctcgggaagggagctggggcggtgagggcatggggtgaggcatggcgatgggggagggcgagggcgagaaagggcaggcactctgcgaattaaaggccttggacttgaagcgcccgcctacacagctttgtctcctggtgccctggcgctgattccccgagcgtgggggagctcctgggctaatcccctgtcctcattgaggcatccccgcatcaccactcttggcttgggtctccaccagggttggggtcccttttgccaaaggcccattccaaagcgttgcacacattggcaagcaaaggcttcaagtacagagaggtttccagggctgaagccagtcagccgctcctggacctggggaccccttgccggccgtctgctgctgacgccacttgtcccaagggcactgcttactgagcccgcactctcccttggctcttctctttggaagccaggagcaggcagaactggtccggaaattcctgcctgccccatctcccactcaggcatcggtggctgggttttgtgactggcctttgccatttgctcccaccatggcctgcctgtggtcctgcgagggctcctcactcaccaggggccactttccttcttggcccatgctgcagctgctgtcac

SEQ ID NO: 279211 - DNA, 2206 bp, Homo sapiens
  misc_feature (1864)..(1864): n is a, c, g, or t
  misc_feature (1868)..(1868): n is a, c, g, or t
  misc_feature (1877)..(1877): n is a, c, g, or t
  misc_feature (1882)..(1882): n is a, c, g, or t
  misc_feature (1884)..(1884): n is a, c, g, or t
  misc_feature (1891)..(1891): n is a, c, g, or t
acccaactcccccgcccgccccgtgcaggctgtggagactcccttcccgggggagggggcccccactgccgcaggtgccccctctgcctccaccccgctctgaaatagaaaatgtctgcagacggcggaggcatccaggacacccaggacaaggagacacccccggaggttccagatcgtggacatcctcatcaggaaatgccttctaagctgggggaggcggtaccttcaggggacactcaggagtcactgcacattaagatggagcccgaagagccacactccgagggggcatcgcaggaggatggggctcaaggtgcctggggctgggcacccctaagtcacggctctaaggagaaagctctcttcctgcctggcggagccctcccctccccccggatccccgtgctttcccgagaggggaggaccagagaccggcagatggctgcagcgctcctcactgcctggtcccagatgccagtgactttcgaggatgtggccttgtacctctcccgggaggagtggggacggctggaccacacgcagcagaacttctacagggatgtcctgcagaagaaaaatgggctgtcactgggagccgtcgaggtggggcagagggtgcagacctcatccgtggcagcccttgggaatgtgaagcccttcagaaccagggcagggagagtccagtggggcgtcccgcagtgcgcgcaggaagcagcctgcggccggagctcagggccggccaaagactccgggcagccggctgagccagatcgcaccccggatgcagctccgccagaccccagtcccacggagccccaggagtaccgcgtcccggagaagcccaacgaggaggagaagggcgccccggagagtggcgaggagggcctggcccctgacagtgaggtgggcaggaagagctaccggtgcgagcagtgcggcaagggcttcagctggcactcgcacctggtgacgcaccggcgcacgcacacgggcgagaagccctacgcctgcactgactgcgggaagcgcttcggccgcagctcgcacctcatccagcaccagatcatccacacgggcgagaagccctacacctgccccgcctgccggaagagcttcagccaccactccacgctgattcagcaccagcgcatccacaccggagagaagccctacgtgtgcgaccgctgcgccaagcgcttcacccgccgctcggacttggtcacccaccagggcacccacacgggcgccaagccgcacaagtgccccatctgcgccaagtgcttcacgcagagctcggcgctagtcacccaccagcgcacccacactggggtcaagccctatccgtgccccgagtgcggcaagtgcttcagccagcgttccaacctcatcgcgcacaaccgcacacacacaggcgagaagccctaccactgcctcgactgcggcaagagcttcagccacagctcgcacctcaccgcgcaccagcgcacccaccgtggcgtgcggccctacgcctgcccgttgtgtggcaagagcttcagccggcgctccaacctgcaccggcacgagaagatccacaccaccgggcccaaggccctggccatgctgatgctgggggcggcggcggcgggggctctggccacacccccacccgctcccacctaggaggccaggaaagggggagcggggcgcccagggccactggaacagccccactggagtcaaggctccgagggaggagagaggggctcgggaagggagctggggcggtgagggcatggggtgaggcatggcgatgggggagggcgagggcgagaaagggcaggcactctgcgaattaaaggccttggacttgaaaaaaaanaaanaaaaaaaanaaaananaaaaaanaaaaaaaaacaacaaaaaaggggggggggcccaaaaattactaccgcggaggggggcacccagagagtgctggccaccccctatagtgtgtacaagaggggcccccataaggaaggacccataaaaacaccaaggacgggggaccgcggtaacaaccagcctcgaggggaaaaaacgcccccggggaccttttggagagaccccccatcgtgggtggcacaggggtcaccaccccaaagatatgacgccgcgagaaatacagcggggttggtgcacacaccattgtctcgggaaaggcccgggataatggagtcc

SEQ ID NO: 279212 - DNA, 411 bp, Homo sapiens
cctagtcagctttggcagccgccaggcagggggcggacccccgacccagggggccttcttgaaactgctttattttaccccctgtttccagagcctcaccccctacttgggcccatcagtttgggggagatgctgtctgcagctgggcagcgccagaaggcctgtgacagcacagcatctctttctgggcaggctttcccttcagcaggcctttctgggcccctcaagcgcacggcaagggtgaggcctcgggctccagccggcaggcaggagatgagaaggagtggagaggcgcgtgcacaggtgagggacgggcgcgcgcctttgtctgcgggagtggggcgcagacgcaggccttctggctgttgtctgtgggagtggggcagggccaccagaccccctcctgggcgg

SEQ ID NO: 279213 - DNA, 314 bp, Homo sapiens
  misc_feature (283)..(283): n is a, c, g, or t
  misc_feature (299)..(299): n is a, c, g, or t
  misc_feature (309)..(309): n is a, c, g, or t
gggctctctcctctcttctctttcaggctccagggagcagtgtcagggccagggagacgatggtctccgtgactatggccacttccgagtggatccagttctttaaggaagccggcattcctccaggacctgccgtcaattatgccgtgatgtttgtggataataggattcagaagagcatgctgctggatctcaataaggagataatgaatgagctgggcgtgaccgtggtgggtgacatcatcgccattctcaagcatgccaaagtggtgcaccgtcaggnccaattgttcaaaagnttgccacttnaggta

SEQ ID NO: 279214 - DNA, 2496 bp, Homo sapiens
ctgacttcaggtgatctgcccgcctctgcctcccaaagtgctgggattacaggtgtgagccaccgtgcccggcgcattgctgtcttcaatggaaaactagcattgctggccatgagaggaaggaaaagttcaggctccagggagcagtgtcagggccagggagacgatggtctccgtgactatggccacttccgagtggatccagttctttaaggaagccggcattcctccaggacctgccgtcaattatgccgtgatgtttgtggataataggattcagaagagcatgctgctggatctcaataaggagataatgaatgagctgggcgtgaccgtggtgggtgacatcatcgccattctcaagcatgccaaagtggtgcaccgtcaggacatgtgcaaagctgccactgagtcagtaccctgcagccctagcccccttgcaggcgaaattcgccgtggcaccagtgctgcctcccgaatgatcaccaacagcctgaaccatgactctccacccagcacaccccccaggcgcccggacaccagcacctccaagatctcggtcactgtgtccaacaagatggcagcaaagagtgccaaggccactgcagccctggcccgccgggaggaggagagcctggctgttcctgccaagcggcgccgggtcactgctgagatggaggggaagtacgtcatcaacatgcccaaaggcaccacaccccgcacccgcaagatcctggagcagcagcaggctgcaaaaggtctccataggacgtctgtgtttgaccgcctcggcgccgagaccaaggcagacaccacgacagggagtaaacccacaggagtcttcagccgcctgggggccaccccagaaacggacgaggatctggcttgggacagcgacaatgacagcagcagctctgtcttgcagtatgccggggtcctgaagaagctaggacggggcccagccaaggccagtccccagccagcactgactgtcaaagccaaggccacaagctcagcgacaacggctgctgccccgacactgcggcgcctggcgctttcctcacggtctgggcttgagaggaagccggagtccttgtctaaagtcagcatcatcaagagactgggcgcagctgcccttgtgcccgaggcccaggacagccaggtcaccagcaccaagagtaagtcctcagccgaggtcaaggtcaccattaagaggactctggtggggccccgggggagcagctccagcgagggccttggtgcccagatggaccacgcgggcactgtgagcgtgttcaaaagactgggccgcaggaccttctagcccacctgtgggcggggtgcaggcagcagagcctgcgggcatctgccctggccgccccaggctcctggcttcatcacgcctcccaccagctcctggatgacacagcttgtctccctcgggctctagagctaggcccgagcattcgggggatcaccccatttctcctagcctgggatggtcgtcgcagctggcctggcctgctccaggactccccttctctcatgtcctctgtgctttcttctctggctgtggccttggcagaacccacttttctacctctcccaagtgccagggggcttcttcctctcctacattccccttcttcccctgagcagggtctgctgcctcagaccccagctcatcagcctccctgtccccctcaactaagtgggtgtcacctggtgggcctcccttcccccactccccactgacctccctcactcctctgcgcctccccccactgctgtgacttctctctctccctgtcttcactttgttcatttctcttctgttttctgtccccgtggcaaggcccgactgtccgctgcgtcctgcccgaccctcctgtacctccggcctcccagcggccccctcgtcggcggtggcgtcgagcctgttgagactgttagccgccctctactcccaggctggagggacctctccagaccctgggctgcggctgaggcgcatccgttttcctgccctgggcatctgtctctgaaagtgtatggcgggtggtgggcaaggggcactgggaagggaggccagtgcctagagtgaagacagctgctgttttaatatatttttgtgactttcaaatcatttcccccactccttcagggtgagttgcaggactgtttcacactatgcgcagctgggctggggatggtggcagaggattgggctgtgtctctaaaggtcaggcttcctgcacacacatggtccatgtccctgctgcaagccctgagtcagggggagtaatggccacagtcaccattcagttaggccgccccctgcccccaataagccgtagtggttttgtcactctatcccctccccccatggatttcacctgcctgctggcacctttccaaatgatgggctccgtttgtgagaccatgagtttccactggtttggtcgcccacccctccctgctgcacagcgcccctga

SEQ ID NO: 279215 - DNA, 2443 bp, Homo sapiens
ggatggttatggccgcactctcgctggtggcggcctgttggggtagagcggccgcggacgagtcagttcagcttccggcggctccagggagcagtgtcagggccagggagacgatggtctccgtgactatggccacttccgagtggatccagttctttaaggaagccggcattcctccaggacctgccgtcaattatgccgtgatgtttgtggataataggattcagaagagcatgctgctggatctcaataaggagataatgaatgagctgggcgtgaccgtggtgggtgacatcatcgccattctcaagcatgccaaagtggtgcaccgtcaggacatgtgcaaagctgccactgagtcagtaccctgcagccctagcccccttgcaggcgaaattcgccgtggcaccagtgctgcctcccgaatgatcaccaacagcctgaaccatgactctccacccagcacaccccccaggcgcccggacaccagcacctccaagatctcggtcactgtgtccaacaagatggcagcaaagagtgccaaggccactgcagccctggcccgccgggaggaggagagcctggctgttcctgccaagcggcgccgggtcactgctgagatggaggggaagtacgtcatcaacatgcccaaaggcaccacaccccgcacccgcaagatcctggagcagcagcaggctgcaaaaggtctccataggacgtctgtgtttgaccgcctcggcgccgagaccaaggcagacaccacgacagggagtaaacccacaggagtcttcagccgcctgggggccaccccagaaacggacgaggatctggcttgggacagcgacaatgacagcagcagctctgtcttgcagtatgccggggtcctgaagaagctaggacggggcccagccaaggccagtccccagccagcactgactgtcaaagccaaggccacaagctcagcgacaacggctgctgccccgacactgcggcgcctggcgctttcctcacggtctgggcttgagaggaagccggagtccttgtctaaagtcagcatcatcaagagactgggcgcagctgcccttgtgcccgaggcccaggacagccaggtcaccagcaccaagagtaagtcctcagccgaggtcaaggtcaccattaagaggactctggtggggccccgggggagcagctccagcgagggccttggtgcccagatggaccacgcgggcactgtgagcgtgttcaaaagactgggccgcaggaccttctagcccacctgtgggcggggtgcaggcagcagagcctgcgggcatctgccctggccgccccaggctcctggcttcatcacgcctcccaccagctcctggatgacacagcttgtctccctcgggctctagagctaggcccgagcattcgggggatcaccccatttctcctagcctgggatggtcgtcgcagctggcctggcctgctccaggactccccttctctcatgtcctctgtgctttcttctctggctgtggccttggcagaacccacttttctacctctcccaagtgccagggggcttcttcctctcctacattccccttcttcccctgagcagggtctgctgcctcagaccccagctcatcagcctccctgtccccctcaactaagtgggtgtcacctggtgggcctcccttcccccactccccactgacctccctcactcctctgcgcctccccccactgctgtgacttctctctctccctgtcttcactttgttcatttctcttctgttttctgtccccgtggcaaggcccgactgtccgctgcgtcctgcccgaccctcctgtacctccggcctcccagcggccccctcgtcggcggtggcgtcgagcctgttgagactgttagccgccctctactcccaggctggagggacctctccagaccctgggctgcggctgaggcgcatccgttttcctgccctgggcatctgtctctgaaagtgtatggcgggtggtgggcaaggggcactgggaagggaggccagtgcctagagtgaagacagctgctgttttaatatatttttgtgactttcaaatcatttcccccactccttcagggtgagttgcaggactgtttcacactatgcgcagctgggctggggatggtggcagaggattgggctgtgtctctaaaggtcaggcttcctgcacacacatggtccatgtccctgctgcaagccctgagtcagggggagtaatggccacagtcaccattcagttaggccgccccctgcccccaataagccgtagtggttttgtcactctatcccctccccccatggatttcacctgcctgctggcacctttccaaatgatgggctccgtttgtgagaccatgagtttccactggtttggtcgcccacccctccctgctgcacagcgcccctga

SEQ ID NO: 279216 - DNA, 2502 bp, Homo sapiens
cccgggccgggggaggagtgtctgacagttggcgccgccgggagggagggcgggcggcgcgagtgggcgcgggcccggtgggccaggctccagggagcagtgtcagggccagggagacgatggtctccgtgactatgggtgagtctgtggccttctctccagggccccctctccccactgccctttttgagccacttccgagtggatccagttctttaaggaagccggcattcctccaggacctgccgtcaattatgccgtgatgtttgtggataataggattcagaagagcatgctgctggatctcaataaggagataatgaatgagctgggcgtgaccgtggtgggtgacatcatcgccattctcaagcatgccaaagtggtgcaccgtcaggacatgtgcaaagctgccactgagtcagtaccctgcagccctagcccccttgcaggcgaaattcgccgtggcaccagtgctgcctcccgaatgatcaccaacagcctgaaccatgactctccacccagcacaccccccaggcgcccggacaccagcacctccaagatctcggtcactgtgtccaacaagatggcagcaaagagtgccaaggccactgcagccctggcccgccgggaggaggagagcctggctgttcctgccaagcggcgccgggtcactgctgagatggaggggaagtacgtcatcaacatgcccaaaggcaccacaccccgcacccgcaagatcctggagcagcagcaggctgcaaaaggtctccataggacgtctgtgtttgaccgcctcggcgccgagaccaaggcagacaccacgacagggagtaaacccacaggagtcttcagccgcctgggggccaccccagaaacggacgaggatctggcttgggacagcgacaatgacagcagcagctctgtcttgcagtatgccggggtcctgaagaagctaggacggggcccagccaaggccagtccccagccagcactgactgtcaaagccaaggccacaagctcagcgacaacggctgctgccccgacactgcggcgcctggcgctttcctcacggtctgggcttgagaggaagccggagtccttgtctaaagtcagcatcatcaagagactgggcgcagctgcccttgtgcccgaggcccaggacagccaggtcaccagcaccaagagtaagtcctcagccgaggtcaaggtcaccattaagaggactctggtggggccccgggggagcagctccagcgagggccttggtgcccagatggaccacgcgggcactgtgagcgtgttcaaaagactgggccgcaggaccttctagcccacctgtgggcggggtgcaggcagcagagcctgcgggcatctgccctggccgccccaggctcctggcttcatcacgcctcccaccagctcctggatgacacagcttgtctccctcgggctctagagctaggcccgagcattcgggggatcaccccatttctcctagcctgggatggtcgtcgcagctggcctggcctgctccaggactccccttctctcatgtcctctgtgctttcttctctggctgtggccttggcagaacccacttttctacctctcccaagtgccagggggcttcttcctctcctacattccccttcttcccctgagcagggtctgctgcctcagaccccagctcatcagcctccctgtccccctcaactaagtgggtgtcacctggtgggcctcccttcccccactccccactgacctccctcactcctctgcgcctccccccactgctgtgacttctctctctccctgtcttcactttgttcatttctcttctgttttctgtccccgtggcaaggcccgactgtccgctgcgtcctgcccgaccctcctgtacctccggcctcccagcggccccctcgtcggcggtggcgtcgagcctgttgagactgttagccgccctctactcccaggctggagggacctctccagaccctgggctgcggctgaggcgcatccgttttcctgccctgggcatctgtctctgaaagtgtatggcgggtggtgggcaaggggcactgggaagggaggccagtgcctagagtgaagacagctgctgttttaatatatttttgtgactttcaaatcatttcccccactccttcagggtgagttgcaggactgtttcacactatgcgcagctgggctggggatggtggcagaggattgggctgtgtctctaaaggtcaggcttcctgcacacacatggtccatgtccctgctgcaagccctgagtcagggggagtaatggccacagtcaccattcagttaggccgccccctgcccccaataagccgtagtggttttgtcactctatcccctccccccatggatttcacctgcctgctggcacctttccaaatgatgggctccgtttgtgagaccatgagtttccactggtttggtcgcccacccctccctgctgcacagcgcccctga

SEQ ID NO: 279217 - DNA, 2895 bp, Homo sapiens
gggagagatgacagtgtttcctggcagaggagagtatgtagaaagttggtgaggcatgaaagaacattgtatgttcaagaagctgcaaagcagagtggtgtcacctgtgaagaggcacggggaagcagcagctgcaggagatggagcgtgagaagtcaagccacatcattcaagtctgtgggcttccaagacgattgagagatggtttttcaacaaatgtttctaggccaactggatgagaatatcagttcctgtgctggagagaaaggcagtcagaggagaaaatgaggtccagctcgtccctggctcccaaagtgctgggattacaggtgtgagccaccgtgcccggcgcattgctgtcttcaatggaaaactagcattgctggccatgagaggaaggaaaagttcaggctccagggagcagtgtcagggccagggagacgatggtctccgtgactatggccacttccgagtggatccagttctttaaggaagccggcattcctccaggacctgccgtcaattatgccgtgatgtttgtggataataggattcagaagagcatgctgctggatctcaataaggagataatgaatgagctgggcgtgaccgtggtgggtgacatcatcgccattctcaagcatgccaaagtggtgcaccgtcaggacatgtgcaaagctgccactgagtcagtaccctgcagccctagcccccttgcaggcgaaattcgccgtggcaccagtgatggagtctccctctgttgcccaggctggagtacagtggcgcgaccttggctcagtgcaacctccgcctcccgggttcaagcagttctcctgcctcagcctcccgagtagctgggattacagctgcctcccgaatgatcaccaacagcctgaaccatgactctccacccagcacaccccccaggcgcccggacaccagcacctccaagatctcggtcactgtgtccaacaagatggcagcaaagagtgccaaggccactgcagccctggcccgccgggaggaggagagcctggctgttcctgccaagcggcgccgggtcactgctgagatggaggggaagtacgtcatcaacatgcccaaaggcaccacaccccgcacccgcaagatcctggagcagcagcaggctgcaaaaggtctccataggacgtctgtgtttgaccgcctcggcgccgagaccaaggcagacaccacgacagggagtaaacccacaggagtcttcagccgcctgggggccaccccagaaacggacgaggatctggcttgggacagcgacaatgacagcagcagctctgtcttgcagtatgccggggtcctgaagaagctaggacggggcccagccaaggccagtccccagccagcactgactgtcaaagccaaggccacaagctcagcgacaacggctgctgccccgacactgcggcgcctggcgctttcctcacggtctgggcttgagaggaagccggagtccttgtctaaagtcagcatcatcaagagactgggcgcagctgcccttgtgcccgaggcccaggacagccaggtcaccagcaccaagagtaagtcctcagccgaggtcaaggtcaccattaagaggactctggtggggccccgggggagcagctccagcgagggccttggtgcccagatggaccacgcgggcactgtgagcgtgttcaaaagactgggccgcaggaccttctagcccacctgtgggcggggtgcaggcagcagagcctgcgggcatctgccctggccgccccaggctcctggcttcatcacgcctcccaccagctcctggatgacacagcttgtctccctcgggctctagagctaggcccgagcattcgggggatcaccccatttctcctagcctgggatggtcgtcgcagctggcctggcctgctccaggactccccttctctcatgtcctctgtgctttcttctctggctgtggccttggcagaacccacttttctacctctcccaagtgccagggggcttcttcctctcctacattccccttcttcccctgagcagggtctgctgcctcagaccccagctcatcagcctccctgtccccctcaactaagtgggtgtcacctggtgggcctcccttcccccactccccactgacctccctcactcctctgcgcctccccccactgctgtgacttctctctctccctgtcttcactttgttcatttctcttctgttttctgtccccgtggcaaggcccgactgtccgctgcgtcctgcccgaccctcctgtacctccggcctcccagcggccccctcgtcggcggtggcgtcgagcctgttgagactgttagccgccctctactcccaggctggagggacctctccagaccctgggctgcggctgaggcgcatccgttttcctgccctgggcatctgtctctgaaagtgtatggcgggtggtgggcaaggggcactgggaagggaggccagtgcctagagtgaagacagctgctgttttaatatatttttgtgactttcaaatcatttcccccactccttcagggtgagttgcaggactgtttcacactatgcgcagctgggctggggatggtggcagaggattgggctgtgtctctaaaggtcaggcttcctgcacacacatggtccatgtccctgctgcaagccctgagtcagggggagtaatggccacagtcaccattcagttaggccgccccctgcccccaataagccgtagtggttttgtcactctatcccctccccccatggatttcacctgcctgctggcacctttccaaatgatgggctccgtttgtgagaccatgagtttccactggtttggtcgcccacccctccctgctgcacagcgcccctga

SEQ ID NO: 279218 - DNA, 1764 bp, Homo sapiens
cccgggccgggggaggagtgtctgacagttggcgccgccgggagggagggcgggcggcgcgagtgggcgcgggcccggtgggccaggctccagggagcagtgtcagggccagggagacgatggtctccgtgactatggccacttccgagtggatccagttctttaaggaagccggcattcctccaggacctgccgtcaattatgccgtgatgtttgtggataataggattcagaagagcatgctgctggatctcaataaggagataatgaatgagctgggcgtgaccgtggtgggtgacatcatcgccattctcaagcatgccaaagtggtgcaccgtcaggacatgtgcaaagctgccactgagtcagtaccctgcagccctagcccccttgcaggcgaaattcgccgtggcaccagtgctgcctcccgaatgatcaccaacagcctgaaccatgactctccacccagcacaccccccaggcgcccggacaccagcacctccaagatctcggtcactgtgtccaacaagatggcagcaaagagtgccaaggccactgcagccctggcccgccgggaggaggagagcctggctgttcctgccaagcggcgccgggtcactgctgagatggaggggaagtacgtcatcaacatgcccaaaggcaccacaccccgcacccgcaagatcctggagcagcagcaggctgcaaaaggtctccataggacgtctgtgtttgaccgcctcggcgccgagaccaaggcagacaccacgacagggagtaaacccacaggagtcttcagccgcctgggggccaccccagaaacggacgaggatctggcttgggacagcgacaatgacagcagcagctctgtcttgcagtatgccggggtcctgaagaagctaggacggggcccagccaaggccagtccccagccagcactgactgtcaaagccaaggccacaagctcagcgacaacggctgctgccccgacactgcggcgcctggcgctttcctcacggtctgggcttgagaggaagccggagtccttgtctaaagtcagcatcatcaagagactgggcgcagctgcccttgtgcccgaggcccaggacagccaggtcaccaggcccgactgtccgctgcgtcctgcccgaccctcctgtacctccggcctcccagcggccccctcgtcggcggtggcgtcgagcctgttgagactgttagccgccctctactcccaggctggagggacctctccagaccctgggctgcggctgaggcgcatccgttttcctgccctgggcatctgtctctgaaagtgtatggcgggtggtgggcaaggggcactgggaagggaggccagtgcctagagtgaagacagctgctgttttaatatatttttgtgactttcaaatcatttcccccactccttcagggtgagttgcaggactgtttcacactatgcgcagctgggctggggatggtggcagaggattgggctgtgtctctaaaggtcaggcttcctgcacacacatggtccatgtccctgctgcaagccctgagtcagggggagtaatggccacagtcaccattcagttaggccgccccctgcccccaataagccgtagtggttttgtcactctatcccctccccccatggatttcacctgcctgctggcacctttccaaatgatgggctccgtttgtgagaccatgagtttccactggtttggtcgcccacccctccctgctgcacagcgcccctga

SEQ ID NO: 279219 - DNA, 1624 bp, Homo sapiens
cccgggccgggggaggagtgtctgacagttggcgccgccgggagggagggcgggcggcgcgagtgggcgcgggcccggtgggccaggctccagggagcagtgtcagggccagggagacgatggtctccgtgactatggccacttccgagtggatccagttctttaaggaagccggcattcctccaggacctgccgtcaattatgccgtgatgtttgtggataataggattcagaagagcatgctgctggatctcaataaggagataatgaatgagctgggcgtgaccgtggtgggtgacatcatcgccattctcaagcatgccaaagtggtgcaccgtcaggacatgtgcaaagctgccactgagtcagtaccctgcagccctagcccccttgcaggcgaaattcgccgtggcaccagtgctgcctcccgaatgatcaccaacagcctgaaccatgactctccacccagcacaccccccaggcgcccggacaccagcacctccaagatctcggtcactgtgtccaacaagatggcagcaaagagtgccaaggccactgcagccctggcccgccgggaggaggagagcctggctgttcctgccaagcggcgccgggtcactgctgagatggaggggaagtacgtcatcaacatgcccaaaggcaccacaccccgcacccgcaagatcctggagcagcagcaggctgcaaaaggtctccataggacgtctgtgtttgaccgcctcggcgccgagaccaaggcagacaccacgacagggagtaaacccacaggagtcttcagccgcctgggggccaccccagaaacggacgaggatctggcttgggacagcgacaatgacagcagcagctctgtcttgcagtatgccggggtcctgaagaagctaggacggggcccagccaaggccagtccccagccagcactgactgtcaaagccaaggccacaagctcagcgacaacggctgctgccccgacactgcggcgcctggcgctttcctcacggtctgggcttgagaggaagccggagtccttgtctaaagtcagcatcatcaagagaactgttagccgccctctactcccaggctggagggacctctccagaccctgggctgcggctgaggcgcatccgttttcctgccctgggcatctgtctctgaaagtgtatggcgggtggtgggcaaggggcactgggaagggaggccagtgcctagagtgaagacagctgctgttttaatatatttttgtgactttcaaatcatttcccccactccttcagggtgagttgcaggactgtttcacactatgcgcagctgggctggggatggtggcagaggattgggctgtgtctctaaaggtcaggcttcctgcacacacatggtccatgtccctgctgcaagccctgagtcagggggagtaatggccacagtcaccattcagttaggccgccccctgcccccaataagccgtagtggttttgtcactctatcccctccccccatggatttcacctgcctgctggcacctttccaaatgatgggctccgtttgtgagaccatgagtttccactggtttggtcgcccacccctccctgctgcacagcgcccctga

SEQ ID NO: 279220 - DNA, 620 bp, Homo sapiens
  misc_feature (580)..(580): n is a, c, g, or t
gggagagatgacagtgtttcctggcagaggagagtatgtagaaagttggtgaggcatgaaagaacattgtatgttcaagaagctgcaaagcagagtggtgtcacctgtgaagaggcacggggaagcagcagctgcaggagatggagcgtgagaagtcaagccacatcattcaagtctgtgggcttccaagacgattgagagatggtttttcaacaaatgtttctaggccaactggatgagaatatcagttcctgtgctggagagaaaggcagtcagaggagaaaatgaggtccagctcgtccctggctcccaaagtgctgggattacaggtgtgagccaccgtgcccggcgcattgctgtcttcaatggaaaactagcattgctggccatgagaggaaggaaaagttcaggctccagggagcagtgtcagggccagggagacgatggtctccgtgactatggccacttccgagtggatccagttctttaaggaagccggcattcctccaggacctgccgtcaattatgccgtgatgtttgtggataataggattcagaagagcatgctgctggatctcantaatggaggaggaggattcgcccgggatcctactcggtca

SEQ ID NO: 279221 - DNA, 2449 bp, Homo sapiens
cccgggccgggggaggagtgtctgacagttggcgccgccgggagggagggcgggcggcgcgagtgggcgcgggcccggtgggccaggctccagggagcagtgtcagggccagggagacgatggtctccgtgactatggccacttccgagtggatccagttctttaaggaagccggcattcctccaggacctgccgtcaattatgccgtgatgtttgtggataataggattcagaagagcatgctgctggatctcaataaggagataatgaatgagctgggcgtgaccgtggtgggtgacatcatcgccattctcaagcatgccaaagtggtgcaccgtcaggacatgtgcaaagctgccactgagtcagtaccctgcagccctagcccccttgcaggcgaaattcgccgtggcaccagtgctgcctcccgaatgatcaccaacagcctgaaccatgactctccacccagcacaccccccaggcgcccggacaccagcacctccaagatctcggtcactgtgtccaacaagatggcagcaaagagtgccaaggccactgcagccctggcccgccgggaggaggagagcctggctgttcctgccaagcggcgccgggtcactgctgagatggaggggaagtacgtcatcaacatgcccaaaggcaccacaccccgcacccgcaagatcctggagcagcagcaggctgcaaaaggtctccataggacgtctgtgtttgaccgcctcggcgccgagaccaaggcagacaccacgacagggagtaaacccacaggagtcttcagccgcctgggggccaccccagaaacggacgaggatctggcttgggacagcgacaatgacagcagcagctctgtcttgcagtatgccggggtcctgaagaagctaggacggggcccagccaaggccagtccccagccagcactgactgtcaaagccaaggccacaagctcagcgacaacggctgctgccccgacactgcggcgcctggcgctttcctcacggtctgggcttgagaggaagccggagtccttgtctaaagtcagcatcatcaagagactgggcgcagctgcccttgtgcccgaggcccaggacagccaggtcaccagcaccaagagtaagtcctcagccgaggtcaaggtcaccattaagaggactctggtggggccccgggggagcagctccagcgagggccttggtgcccagatggaccacgcgggcactgtgagcgtgttcaaaagactgggccgcaggaccttctagcccacctgtgggcggggtgcaggcagcagagcctgcgggcatctgccctggccgccccaggctcctggcttcatcacgcctcccaccagctcctggatgacacagcttgtctccctcgggctctagagctaggcccgagcattcgggggatcaccccatttctcctagcctgggatggtcgtcgcagctggcctggcctgctccaggactccccttctctcatgtcctctgtgctttcttctctggctgtggccttggcagaacccacttttctacctctcccaagtgccagggggcttcttcctctcctacattccccttcttcccctgagcagggtctgctgcctcagaccccagctcatcagcctccctgtccccctcaactaagtgggtgtcacctggtgggcctcccttcccccactccccactgacctccctcactcctctgcgcctccccccactgctgtgacttctctctctccctgtcttcactttgttcatttctcttctgttttctgtccccgtggcaaggcccgactgtccgctgcgtcctgcccgaccctcctgtacctccggcctcccagcggccccctcgtcggcggtggcgtcgagcctgttgagactgttagccgccctctactcccaggctggagggacctctccagaccctgggctgcggctgaggcgcatccgttttcctgccctgggcatctgtctctgaaagtgtatggcgggtggtgggcaaggggcactgggaagggaggccagtgcctagagtgaagacagctgctgttttaatatatttttgtgactttcaaatcatttcccccactccttcagggtgagttgcaggactgtttcacactatgcgcagctgggctggggatggtggcagaggattgggctgtgtctctaaaggtcaggcttcctgcacacacatggtccatgtccctgctgcaagccctgagtcagggggagtaatggccacagtcaccattcagttaggccgccccctgcccccaataagccgtagtggttttgtcactctatcccctccccccatggatttcacctgcctgctggcacctttccaaatgatgggctccgtttgtgagaccatgagtttccactggtttggtcgcccacccctccctgctgcacagcgcccctga

SEQ ID NO: 279222 - DNA, 2694 bp, Homo sapiens
aaaaaaaaaattgagcagaagccagagaagggcaagattaaccctagtgaggatagagaagagagtctcatatgtggggacttagggaaagtgtcacaaagtagatggcagtggagcagaaggaaggataggttgccaggaggagacaggcattccaggcacaggtgacatcctctaaaaactgggaggccggcaaagcacctgtgtggggaaggaggcctggaggatgagaccaggcacaacacctccagggtgcttagtaggcaccaagcactgtctcaagtgcttttattcatagaaactcatccagcccttatagcagtcctctaaggctccagggagcagtgtcagggccagggagacgatggtctccgtgactatggccacttccgagtggatccagttctttaaggaagccggcattcctccaggacctgccgtcaattatgccgtgatgtttgtggataataggattcagaagagcatgctgctggatctcaataaggagataatgaatgagctgggcgtgaccgtggtgggtgacatcatcgccattctcaagcatgccaaagtggtgcaccgtcaggacatgtgcaaagctgccactgagtcagtaccctgcagccctagcccccttgcaggcgaaattcgccgtggcaccagtgctgcctcccgaatgatcaccaacagcctgaaccatgactctccacccagcacaccccccaggcgcccggacaccagcacctccaagatctcggtcactgtgtccaacaagatggcagcaaagagtgccaaggccactgcagccctggcccgccgggaggaggagagcctggctgttcctgccaagcggcgccgggtcactgctgagatggaggggaagtacgtcatcaacatgcccaaaggcaccacaccccgcacccgcaagatcctggagcagcagcaggctgcaaaaggtctccataggacgtctgtgtttgaccgcctcggcgccgagaccaaggcagacaccacgacagggagtaaacccacaggagtcttcagccgcctgggggccaccccagaaacggacgaggatctggcttgggacagcgacaatgacagcagcagctctgtcttgcagtatgccggggtcctgaagaagctaggacggggcccagccaaggccagtccccagccagcactgactgtcaaagccaaggccacaagctcagcgacaacggctgctgccccgacactgcggcgcctggcgctttcctcacggtctgggcttgagaggaagccggagtccttgtctaaagtcagcatcatcaagagactgggcgcagctgcccttgtgcccgaggcccaggacagccaggtcaccagcaccaagagtaagtcctcagccgaggtcaaggtcaccattaagaggactctggtggggccccgggggagcagctccagcgagggccttggtgcccagatggaccacgcgggcactgtgagcgtgttcaaaagactgggccgcaggaccttctagcccacctgtgggcggggtgcaggcagcagagcctgcgggcatctgccctggccgccccaggctcctggcttcatcacgcctcccaccagctcctggatgacacagcttgtctccctcgggctctagagctaggcccgagcattcgggggatcaccccatttctcctagcctgggatggtcgtcgcagctggcctggcctgctccaggactccccttctctcatgtcctctgtgctttcttctctggctgtggccttggcagaacccacttttctacctctcccaagtgccagggggcttcttcctctcctacattccccttcttcccctgagcagggtctgctgcctcagaccccagctcatcagcctccctgtccccctcaactaagtgggtgtcacctggtgggcctcccttcccccactccccactgacctccctcactcctctgcgcctccccccactgctgtgacttctctctctccctgtcttcactttgttcatttctcttctgttttctgtccccgtggcaaggcccgactgtccgctgcgtcctgcccgaccctcctgtacctccggcctcccagcggccccctcgtcggcggtggcgtcgagcctgttgagactgttagccgccctctactcccaggctggagggacctctccagaccctgggctgcggctgaggcgcatccgttttcctgccctgggcatctgtctctgaaagtgtatggcgggtggtgggcaaggggcactgggaagggaggccagtgcctagagtgaagacagctgctgttttaatatatttttgtgactttcaaatcatttcccccactccttcagggtgagttgcaggactgtttcacactatgcgcagctgggctggggatggtggcagaggattgggctgtgtctctaaaggtcaggcttcctgcacacacatggtccatgtccctgctgcaagccctgagtcagggggagtaatggccacagtcaccattcagttaggccgccccctgcccccaataagccgtagtggttttgtcactctatcccctccccccatggatttcacctgcctgctggcacctttccaaatgatgggctccgtttgtgagaccatgagtttccactggtttggtcgcccacccctccctgctgcacagcgcccctga

SEQ ID NO: 279223 - DNA, 2773 bp, Homo sapiens
gggagagatgacagtgtttcctggcagaggagagtatgtagaaagttggtgaggcatgaaagaacattgtatgttcaagaagctgcaaagcagagtggtgtcacctgtgaagaggcacggggaagcagcagctgcaggagatggagcgtgagaagtcaagccacatcattcaagtctgtgggcttccaagacgattgagagatggtttttcaacaaatgtttctaggccaactggatgagaatatcagttcctgtgctggagagaaaggcagtcagaggagaaaatgaggtccagctcgtccctggctcccaaagtgctgggattacaggtgtgagccaccgtgcccggcgcattgctgtcttcaatggaaaactagcattgctggccatgagaggaaggaaaagttcaggctccagggagcagtgtcagggccagggagacgatggtctccgtgactatggccacttccgagtggatccagttctttaaggaagccggcattcctccaggacctgccgtcaattatgccgtgatgtttgtggataataggattcagaagagcatgctgctggatctcaataaggagataatgaatgagctgggcgtgaccgtggtgggtgacatcatcgccattctcaagcatgccaaagtggtgcaccgtcaggacatgtgcaaagctgccactgagtcagtaccctgcagccctagcccccttgcaggcgaaattcgccgtggcaccagtgctgcctcccgaatgatcaccaacagcctgaaccatgactctccacccagcacaccccccaggcgcccggacaccagcacctccaagatctcggtcactgtgtccaacaagatggcagcaaagagtgccaaggccactgcagccctggcccgccgggaggaggagagcctggctgttcctgccaagcggcgccgggtcactgctgagatggaggggaagtacgtcatcaacatgcccaaaggcaccacaccccgcacccgcaagatcctggagcagcagcaggctgcaaaaggtctccataggacgtctgtgtttgaccgcctcggcgccgagaccaaggcagacaccacgacagggagtaaacccacaggagtcttcagccgcctgggggccaccccagaaacggacgaggatctggcttgggacagcgacaatgacagcagcagctctgtcttgcagtatgccggggtcctgaagaagctaggacggggcccagccaaggccagtccccagccagcactgactgtcaaagccaaggccacaagctcagcgacaacggctgctgccccgacactgcggcgcctggcgctttcctcacggtctgggcttgagaggaagccggagtccttgtctaaagtcagcatcatcaagagactgggcgcagctgcccttgtgcccgaggcccaggacagccaggtcaccagcaccaagagtaagtcctcagccgaggtcaaggtcaccattaagaggactctggtggggccccgggggagcagctccagcgagggccttggtgcccagatggaccacgcgggcactgtgagcgtgttcaaaagactgggccgcaggaccttctagcccacctgtgggcggggtgcaggcagcagagcctgcgggcatctgccctggccgccccaggctcctggcttcatcacgcctcccaccagctcctggatgacacagcttgtctccctcgggctctagagctaggcccgagcattcgggggatcaccccatttctcctagcctgggatggtcgtcgcagctggcctggcctgctccaggactccccttctctcatgtcctctgtgctttcttctctggctgtggccttggcagaacccacttttctacctctcccaagtgccagggggcttcttcctctcctacattccccttcttcccctgagcagggtctgctgcctcagaccccagctcatcagcctccctgtccccctcaactaagtgggtgtcacctggtgggcctcccttcccccactccccactgacctccctcactcctctgcgcctccccccactgctgtgacttctctctctccctgtcttcactttgttcatttctcttctgttttctgtccccgtggcaaggcccgactgtccgctgcgtcctgcccgaccctcctgtacctccggcctcccagcggccccctcgtcggcggtggcgtcgagcctgttgagactgttagccgccctctactcccaggctggagggacctctccagaccctgggctgcggctgaggcgcatccgttttcctgccctgggcatctgtctctgaaagtgtatggcgggtggtgggcaaggggcactgggaagggaggccagtgcctagagtgaagacagctgctgttttaatatatttttgtgactttcaaatcatttcccccactccttcagggtgagttgcaggactgtttcacactatgcgcagctgggctggggatggtggcagaggattgggctgtgtctctaaaggtcaggcttcctgcacacacatggtccatgtccctgctgcaagccctgagtcagggggagtaatggccacagtcaccattcagttaggccgccccctgcccccaataagccgtagtggttttgtcactctatcccctccccccatggatttcacctgcctgctggcacctttccaaatgatgggctccgtttgtgagaccatgagtttccactggtttggtcgcccacccctccctgctgcacagcgcccctga

SEQ ID NO: 279224 - DNA, 1532 bp, Homo sapiens
cccgggccgggggaggagtgtctgacagttggcgccgccgggagggagggcgggcggcgcgagtgggcgcgggcccggtgggccaggctccagggagcagtgtcagggccagggagacgatggtctccgtgactatggccacttccgagtggatccagttctttaaggaagccggcattcctccaggacctgccgtcaattatgccgtgatgtttgtggataataggattcagaagagcatgctgctggatctcaataaggagataatgaatgagctgggcgtgaccgtggtgggtgacatcatcgccattctcaagcatgccaaagtggtgcaccgtcaggacatgtgcaaagctgccactgagtcagtaccctgcagccctagcccccttgcaggcgaaattcgccgtggcaccagtgctgcctcccgaatgatcaccaacagcctgaaccatgactctccacccagcacaccccccaggcgcccggacaccagcacctccaagatctcggtcactgtgtccaacaagatggcagcaaagagtgccaaggccactgcagccctggcccgccgggaggaggagagcctggctgttcctgccaagcggcgccgggtcactgctgagatggaggggaagtacgtcatcaacatgcccaaaggcaccacaccccgcacccgcaagatcctggagcagcagcaggctgcaaaaggtctccataggacgtctgtgtttgaccgcctcggcgccgagaccaaggcagacaccacgacagggagtaaacccacaggagtcttcagccgcctgggggccaccccagaaacggacgaggatctggcttgggacagcgacaatgacagcagcagctctgtcttgcagtatgccggggtcctgaagaagctaggacggggcccagccaaggccagtccccagccagcactgactgtcaaagccaaggccacaagctcagcgacaacggctgctgccccgacactgcggcgcctggcgctttcctcacggtctgggcttgagaggaagccggagtccttgtctaaagtcagcatcatcaagagactgggcgcagctgcccttgtgcccgaggcccaggacagccaggtcaccaggccagtgcctagagtgaagacagctgctgttttaatatatttttgtgactttcaaatcatttcccccactccttcagggtgagttgcaggactgtttcacactatgcgcagctgggctggggatggtggcagaggattgggctgtgtctctaaaggtcaggcttcctgcacacacatggtccatgtccctgctgcaagccctgagtcagggggagtaatggccacagtcaccattcagttaggccgccccctgcccccaataagccgtagtggttttgtcactctatcccctccccccatggatttcacctgcctgctggcacctttccaaatgatgggctccgtttgtgagaccatgagtttccactggtttggtcgcccacccctccctgctgcacagcgcccctga

SEQ ID NO: 279225 - DNA, 2193 bp, Homo sapiens
aaaaaaaaaattgagcagaagccagagaagggcaagattaaccctagtgaggatagagaagagagtctcatatgtggggacttagggaaagtgtcacaaagtagatggcagtggagcagaaggaaggataggttgccaggaggagacaggcattccaggcacaggtgacatcctctaaaaactgggaggccggcaaagcacctgtgtggggaaggaggcctggaggatgagaccaggcacaacacctccagggtgcttagtaggcaccaagcactgtctcaagtgcttttattcatagaaactcatccagcccttatagcagtcctctaaggctccagggagcagtgtcagggccagggagacgatggtctccgtgactatggccacttccgagtggatccagttctttaaggaagccggcattcctccaggacctgccgtcaattatgccgtgatgtttgtggataataggattcagaagagcatgctgctggatctcaataaggagataatgaatgagctgggcgtgaccgtggtgggtgacatcatcgccattctcaagcatgccaaagtggtgcaccgtcaggacatgtgcaaagctgccactgagtcagtaccctgcagccctagcccccttgcaggcgaaattcgccgtggcaccagtgctgcctcccgaatgatcaccaacagcctgaaccatgactctccacccagcacaccccccaggcgcccggacaccagcacctccaagatctcggtcactgtgtccaacaagatggcagcaaagagtgccaaggccactgcagccctggcccgccgggaggaggagagcctggctgttcctgccaagcggcgccgggtcactgctgagatggaggggaagtacgtcatcaacatgcccaaaggcaccacaccccgcacccgcaagatcctggacagctccagcgagggccttggtgcccagatggaccacgcgggcactgtgagcgtgttcaaaagactgggccgcaggaccttctagcccacctgtgggcggggtgcaggcagcagagcctgcgggcatctgccctggccgccccaggctcctggcttcatcacgcctcccaccagctcctggatgacacagcttgtctccctcgggctctagagctaggcccgagcattcgggggatcaccccatttctcctagcctgggatggtcgtcgcagctggcctggcctgctccaggactccccttctctcatgtcctctgtgctttcttctctggctgtggccttggcagaacccacttttctacctctcccaagtgccagggggcttcttcctctcctacattccccttcttcccctgagcagggtctgctgcctcagaccccagctcatcagcctccctgtccccctcaactaagtgggtgtcacctggtgggcctcccttcccccactccccactgacctccctcactcctctgcgcctccccccactgctgtgacttctctctctccctgtcttcactttgttcatttctcttctgttttctgtccccgtggcaaggcccgactgtccgctgcgtcctgcccgaccctcctgtacctccggcctcccagcggccccctcgtcggcggtggcgtcgagcctgttgagactgttagccgccctctactcccaggctggagggacctctccagaccctgggctgcggctgaggcgcatccgttttcctgccctgggcatctgtctctgaaagtgtatggcgggtggtgggcaaggggcactgggaagggaggccagtgcctagagtgaagacagctgctgttttaatatatttttgtgactttcaaatcatttcccccactccttcagggtgagttgcaggactgtttcacactatgcgcagctgggctggggatggtggcagaggattgggctgtgtctctaaaggtcaggcttcctgcacacacatggtccatgtccctgctgcaagccctgagtcagggggagtaatggccacagtcaccattcagttaggccgccccctgcccccaataagccgtagtggttttgtcactctatcccctccccccatggatttcacctgcctgctggcacctttccaaatgatgggctccgtttgtgagaccatgagtttccactggtttggtcgcccacccctccctgctgcacagcgcccctga

SEQ ID NO: 279226 - DNA, 1109 bp, Homo sapiens
  misc_feature (340)..(340): n is a, c, g, or t
ccgcgtccgcgcttacccaatacaagccgggctacgtccgagggtaacaacatgatcaaaaccacagcaggaaccacaataaggaacaagactcaggttaaagcaaacacagcgacagctcctgcgccgcatctcctggttccagtggcggcactgaactcgcggcaatttgtcccgcctctttcgcttcacggcagccaatcgcttccgccagagaaagaaaggcgccgaaatgaaacccgcctccgttcgccttcggaactgtcgtcacttccgtcctcagacttggaggggcggggatgaggagggcggggaggacgacgagggcgaagagggtggntgagagccccggagcccgagccgaagggcgagccgcaaacgctaagtcgctggccattggtggacatggcgcaggcgcgtttgctccgacgggccgaatgttttggggcagtgttttgagcgcggagaccgcgtgatactggatgcgcatgggcataccgtgctctgcggctgcttggcgttgcttcttcctccagaagtgggcgctgggcagtcacgcagggtttgaaccggaagcgggagtaggtagctgcgtggctaacggagaaaagaagccgtggccacgggaggaggcgagaggagtcgggatctgcgctgcagccaccgccgcggttgatactactttgaccttccgagtgcagtgacagtgatgtgtgttctgaaattgtgaaccatgagtctagtacttaatgatctgcttatctgctgccgtcaactagaacatgatagagctacagaacgaaagaaagaagttgagaaatttaagcgcctgattcgagatcctgaaacaattaaacatctagatcggcattcagattccaaacaaggaaaatatttgaattgggatgctgtttttagatttttacagaaatatattcagaaagaaacagaatgtctgagaatagcaaaaccaaatgtatcagcctcaacacaagcctccaggcagaaaaagatgcaggaaatcagtagtttggtcaaatacttcatcaaatgtgcaaacagaagtaagtgatgttataaattataaataaatggcttaacagattact

SEQ ID NO: 279227 - DNA, 1679 bp, Homo sapiens
cctgaggtgtttgtatgccataaatgctattataggacttagaactaattttgctttccaaggtaaatattctccttgtaatcttatgttattctaataaattcattcttcataaagagtgccaaaaaacttgggatcatttttggtctaacaccagaaattgtgaattattaaggttataattgtttaagaatgattgcttttcgagatgagcagatcacttgaggtcaggagttcaagaccagcctggtcaacatggtgaaaccctgtctctactaaaagtagaaaaattagcagggtgtggtggtgcacgcctctagtctcagctacttggaggctgaggtgggagaattacttgaacccaggaggtggaggctgcagtgtgctgagtttgtgccactgcactccagcctgggtgacagaccaagattccatctcaaaaaaaaaaaaaaaagaatgattgtttttgctatatattcctataaaagaggcgttggcaaacttactgtgtaaagaggccagatagtaaatgttcttgactttataggccatgtggtcacctctgtcttaattacaaaagcagccataaacaataagtaaatgaatggttgtgactatgttccaataaaatgttatttgcaaagaaaaaaaaaatgaattttgcttggggccataatttgccaatttcttctctacaaaagaagtttagttaatagtaatttcccaaatggaattatttaaatagttgccattccaagtgtcttatttttgttcaaatttatgtttttctttatttgtttattttgaaataggagcacctaggctaaaatgtcaagaactcttaaattatatcatggatacagtgaaagattcatctaatggtgctatttacggagctgattgtagcaacatactactcaaagacattctttctgtgagaaaatactggtgtgaaatatctcagcaacagtggttaggtatgttttgaaggttgttgtttgtgaatttttcctcatgaaatgaaacttcaccaaagaaagcactctgtctgtatctgtctatatcccccaagtgacctgacagtttaacagtactttagtaaaattatatggttatcgaactgacccttaatttttatttattatgtagcttttgaataaagtcatgaataatatatcaggtgcctgatatcagagccggaattacagttgaaaaataccatctccatcgtcaaggagttgacagtggcagaagaaaacccaagtaaaccagagttcataatgtgctgtgatacagacatatttgggttcagtaggtatacaaaacaatgacacctaaactcaaccatgatttaagtagaaagggagaaaaccaagagagggaagtaccataaaagtgaaagcaggcagggtgcagtggctcacgcctgtaatcctagcactttgggaggccaaggccggtggattgcttgagctcaggagttcaagaccagcctgggcaacatggtgaaactctgtctttaaaaaaatagcggaggtaatggctcttgcttgtagtcccagttacttgggaggctgaggcaggaggatcacctgagccctggaggttaaggctgcagtgagctgtgatcacactgcactccggcctccatgacagagtgagaccctgtttccatttaa

SEQ ID NO: 279228 - DNA, 724 bp, Homo sapiens
  misc_feature (708)..(708): n is a, c, g, or t
ggcaccagttagttcagatcttggctttattataaactcctctgagatatatgttccctgacagtttatctaaaatgattctctctacagttattttctattactgtgtttttgtttcctcagaggcatacatcacaatttggaattatgcattggtttatcaatttacttgtttattgtcaccctgctgcccagatatgacttcatgagggtaggatttgtatctgtttagttcattatttgtctagctataagtagtaaatattgtttgcatctatcagtgaatgagcatcttctgtttatgtagataatactgaactgttttgttttcttcaaagtaatcattaagctgaaggtaagaaaaacaagttcaaggaagtcacaccatggggaaaaaaaagtcaagtttagggctgcctcttccgggaagtgtcaaatctttagtatatttaggaataaaggtgccaaaccttatggttctttggatattgctaaggtattttcattggttagattaccagtttcattttccttattgactcaagagggctttaaactgagattgaagaagtaagaagattcctagataaaacaaaaaaaaaaaattattaaaaaaatttttggggggtttggggcttgagaagaattttttaaaccatttggtgggggggggggggccttgtgtgtttggacactgggtcaaaaggnggttcccagagggaac

SEQ ID NO: 279229 - DNA, 13918 bp, Homo sapiens
  misc_feature (340)..(340): n is a, c, g, or t
  misc_feature (2481)..(2481): n is a, c, g, or t
  misc_feature (3071)..(3071): n is a, c, g, or t
  misc_feature (11595)..(11595): n is a, c, g, or t
ccgcgtccgcgcttacccaatacaagccgggctacgtccgagggtaacaacatgatcaaaaccacagcaggaaccacaataaggaacaagactcaggttaaagcaaacacagcgacagctcctgcgccgcatctcctggttccagtggcggcactgaactcgcggcaatttgtcccgcctctttcgcttcacggcagccaatcgcttccgccagagaaagaaaggcgccgaaatgaaacccgcctccgttcgccttcggaactgtcgtcacttccgtcctcagacttggaggggcggggatgaggagggcggggaggacgacgagggcgaagagggtggntgagagccccggagcccgagccgaagggcgagccgcaaacgctaagtcgctggccattggtggacatggcgcaggcgcgtttgctccgacgggccgaatgttttggggcagtgttttgagcgcggagaccgcgtgatactggatgcgcatgggcataccgtgctctgcggctgcttggcgttgcttcttcctccagaagtgggcgctgggcagtcacgcagggtttgaaccggaagcgggagtaggtagctgcgtggctaacggagaaaagaagccgtggccacgggaggaggcgagaggagtcgggatctgcgctgcagccaccgccgcggttgatactactttgaccttccgagtgcagtgaggcatacatcacaatttggaattatgcattggtttatcaatttacttgtttattgtcaccctgctgcccagatatgacttcatgaggacagtgatgtgtgttctgaaattgtgaaccatgagtctagtacttaatgatctgcttatctgctgccgtcaactagaacatgatagagctacagaacgaaagaaagaagttgagaaatttaagcgcctgattcgagatcctgaaacaattaaacatctagatcggcattcagattccaaacaaggaaaatatttgaattgggatgctgtttttagatttttacagaaatatattcagaaagaaacagaatgtctgagaatagcaaaaccaaatgtatcagcctcaacacaagcctccaggcagaaaaagatgcaggaaatcagtagtttggtcaaatacttcatcaaatgtgcaaacagaagagcacctaggctaaaatgtcaagaactcttaaattatatcatggatacagtgaaagattcatctaatggtgctatttacggagctgattgtagcaacatactactcaaagacattctttctgtgagaaaatactggtgtgaaatatctcagcaacagtggttagaattgttctctgtgtacttcaggctctatctgaaaccttcacaagatgttcatagagttttagtggctagaataattcatgctgttaccaaaggatgctgttctcagactgacggattaaattccaaatttttggactttttttccaaggctattcagtgtgcgagacaagaaaagagctcttcaggtctaaatcatatcttagcagctcttactatcttcctcaagactttggctgtcaactttcgaattcgagtgtgtgaattaggagatgaaattcttcccactttgctttatatttggactcaacataggcttaatgattctttaaaagaagtcattattgaattatttcaactgcaaatttatatccatcatccgaaaggagccaaaacccaagaaaaaggtgcttatgaatcaacaaaatggagaagtattttatacaacttatatgatctgctagtgaatgagataagtcatataggaagtagaggaaagtattcttcaggatttcgtaatattgccgtcaaagaaaatttgattgaattgatggcagatatctgtcaccaggtttttaatgaagataccagatccttggagatttctcaatcttacactactacacaaagagaatctagtgattacagtgtcccttgcaaaaggaagaaaatagaactaggctgggaagtaataaaagatcaccttcagaagtcacagaatgattttgatcttgtgccttggctacagattgcaacccaattaatatcaaagtatcctgcaagtttacctaactgtgagctgtctccattactgatgatactatctcagcttctaccccaacagcgacatggggaacgtacaccatatgtgttacgatgccttacggaagttgcattgtgtcaagacaagaggtcaaacctagaaagctcacaaaagtcagatttattaaaactctggaataaaatttggtgtattacctttcgtggtataagttctgagcaaatacaagctgaaaactttggcttacttggagccataattcagggtagtttagttgaggttgacagagaattctggaagttatttactgggtcagcctgcagaccttcatgtcctgcagtatgctgtttgactttggcactgaccaccagtatagttccaggancggtaaaaatgggaatagagcaaaatatgtgtgaagtaaatagaagcttttctttaaaggaatcaataatgaaatggctcttattctatcagttagagggtgacttagaaaatagcacagaagtgcctccaattcttcacagtaattttcctcatcttgtactggagaaaattcttgtgagtctcactatgaaaaactgtaaagctgcaatgaattttttccaaagcgtgccagaatgtgaacaccaccaaaaagataaagaagaactttcattctcagaagtagaagaactatttcttcagacaacttttgacaagatggactttttaaccattgtgagagaatgtggtatagaaaagcaccagtccagtattggcttctctgtccaccagaatctcaaggaatcactggatcgctgtcttctgggattatcagaacagcttctgaataattactcatctgagattacaaattcagaaactcttgtccggtgttcacgtcttttggtgggtgtccttggctgctactgttacatgggtgtaatagctgaagaggaagcatataagtcagaattattccagaaagccaantctctaatgcaatgtgcaggagaaagtatcactctgtttaaaaataagacaaatgaggaattcagaattggttccttgagaaatatgatgcagctatgtacacgttgcttgagcaactgtaccaagaagagtccaaataagattgcatctggctttttcctgcgattgttaacatcaaagctaatgaatgacattgcagatatttgtaaaagtttagcatccttcatcaaaaagccatttgaccgtggagaagtagaatcaatggaagatgatactaatggaaatctaatggaggtggaggatcagtcatccatgaatctatttaacgattaccctgatagtagtgttagtgatgcaaacgaacctggagagagccaaagtaccataggtgccattaatcctttagctgaagaatatctgtcaaagcaagatctacttttcttagacatgctcaagttcttgtgtttgtgtgtaactactgctcagaccaatactgtgtcctttagggcagctgatattcggaggaaattgttaatgttaattgattctagcacgctagaacctaccaaatccctccacctgcatatgtatctaatgcttttaaaggagcttcctggagaagagtaccccttgccaatggaagatgttcttgaacttctgaaaccactatccaatgtgtgttctttgtatcgtcgtgaccaagatgtttgtaaaactattttaaaccatgtccttcatgtagtgaaaaacctaggtcaaagcaatatggactctgagaacacaagggatgctcaaggacagtttcttacagtaattggagcattttggcatctaacaaaggagaggaaatatatattctctgtaagaatggccctagtaaattgccttaaaactttgcttgaggctgatccttattcaaaatgggccattcttaatgtaatgggaaaagactttcctgtaaatgaagtatttacacaatttcttgctgacaatcatcaccaagttcgcatgttggctgcagagtcaatcaatagattgttccaggacacgaagggagattcttccaggttactgaaagcacttcctttgaagcttcagcaaacagcttttgaaaatgcatacttgaaagctcaggaaggaatgagagaaatgtcccatagtgctgagaaccctgaaactttggatgaaatttataatagaaaatctgttttactgacgttgatagctgtggttttatcctgtagccctatctgcgaaaaacaggctttgtttgccctgtgtaaatctgtgaaagagaatggattagaacctcaccttgtgaaaaaggttttagagaaagtttctgaaacttttggatatagacgtttagaagactttatggcatctcatttagattatctggttttggaatggctaaatcttcaagatactgaatacaacttatcttcttttccttttattttattaaactacacaaatattgaggatttctatagatcttgttataaggttttgattccacatctggtgattagaagtcattttgatgaggtgaagtccattgctaatcagattcaagaggactggaaaagtcttctaacagactgctttccaaagattcttgtaaatattcttccttattttgcctatgagggtaccagagacagtgggatggcacagcaaagagagactgctaccaaggtctatgatatgcttaaaagtgaaaacttattgggaaaacagattgatcacttattcattagtaatttaccagagattgtggtggagttattgatgacgttacatgagccagcaaattctagtgccagtcagagcactgacctctgtgacttttcaggggatttggatcctgctcctaatccacctcattttccatcgcatgtgattaaagcaacatttgcctatatcagcaattgtcataaaaccaagttaaaaagcattttagaaattctttccaaaagccctgattcctatcagaaaattcttcttgccatatgtgagcaagcagctgaaacaaataatgtttataagaagcacagaattcttaaaatatatcacctgtttgttagtttattactgaaagatataaaaagtggcttaggaggagcttgggcctttgttcttcgagacgttatttatactttgattcactatatcaaccaaaggccttcttgtatcatggatgtgtcattacgtagcttctccctttgttgtgacttattaagtcaggtttgccagacagccgtgacttactgtaaggatgctctagaaaaccatcttcatgttattgttggtacacttataccccttgtgtatgagcaggtggaggttcagaaacaggtattggacttgttgaaatacttagtgatagataacaaggataatgaaaacctctatatcacgattaagcttttagatccttttcctgaccatgttgtttttaaggatttgcgtattactcagcaaaaaatcaaatacagtagaggacccttttcactcttggaggaaattaaccattttctctcagtaagtgtttatgatgcacttccattgacaagacttgaaggactaaaggatcttcgaagacaactggaactacataaagatcagatggtggacattatgagagcttctcaggataatccgcaagatgggattatggtgaaactagttgtcaatttgttgcagttatccaagatggcaataaaccacactggtgaaaaagaagttctagaggctgttggaagctgcttgggagaagtgggtcctatagatttctctaccatagctatacaacatagtaaagatgcatcttataccaaggcccttaagttatttgaagataaagaacttcagtggaccttcataatgctgacctacctgaataacacactggtagaagattgtgtcaaagttcgatcagcagctgttacctgtttgaaaaacattttagccacaaagactggacatagtttctgggagatttataagatgacaacagatccaatgctggcctatctacagccttttagaacatcaagaaaaaagtttttagaagtacccagatttgacaaagaaaacccttttgaaggcctggatgatataaatctgtggattcctctaagtgaaaatcatgacatttggataaagacactgacttgtgcttttttggacagtggaggcacaaaatgtgaaattcttcaattattaaagccaatgtgtgaagtgaaaactgacttttgtcagactgtacttccatacttgattcatgatattttactccaagatacaaatgaatcatggagaaatctgctttctacacatgttcagggatttttcaccagctgtcttcgacacttctcgcaaacgagccgatccacaacccctgcaaacttggattcagagtcagagcactttttccgatgctgtttggataaaaaatcacaaagaacaatgcttgctgttgtggactacatgagaagacaaaagagaccttcttcaggaacaatttttaatgatgctttctggctggatttaaattatctagaagttgccaaggtagctcagtcttgtgctgctcactttacagctttactctatgcagaaatctatgcagataagaaaagtatggatgatcaagagaaaagaagtcttgcatttgaagaaggaagccagagtacaactatttctagcttgagtgaaaaaagtaaagaagaaactggaataagtttacaggatcttctcttagaaatctacagaagtataggggagccagatagtttgtatggctgtggtggagggaagatgttacaacccattactagactacgaacatatgaacacgaagcaatgtggggcaaagccctagtaacatatgacctcgaaacagcaatcccctcatcaacacgccaggcaggaatcattcaggccttgcagaatttgggactctgccatattctttccgtctatttaaaaggattggattatgaaaataaagactggtgtcctgaactagaagaacttcattaccaagcagcatggaggaatatgcagtgggaccattgcacttccgtcagcaaagaagtagaaggaaccagttaccatgaatcattgtacaatgctctacaatctctaagagacagagaattctctacattttatgaaagtctcaaatatgccagagtaaaagaagtggaagagatgtgtaagcgcagccttgagtctgtgtattcgctctatcccacacttagcaggttgcaggccattggagagctggaaagcattggggagcttttctcaagatcagtcacacatagacaactctctgaagtatatattaagtggcagaaacactcccagcttctcaaggacagtgattttagttttcaggagcctatcatggctctacgcacagtcattttggagatcctgatggaaaaggaaatggacaactcacaaagagaatgtattaaggacattctcaccaaacaccttgtagaactctctatactggccagaactttcaagaacactcagctccctgaaagggcaatatttcaaattaaacagtacaattcagttagctgtggagtctctgagtggcagctggaagaagcacaagtattctgggcaaaaaaggagcagagtcttgccctgagtattctcaagcaaatgatcaagaagttggatgccagctgtgcagcgaacaatcccagcctaaaacttacatacacagaatgtctgagggtttgtggcaactggttagcagaaacgtgcttagaaaatcctgcggtcatcatgcagacctatctagaaaaggcagtagaagttgctggaaattatgatggagaaagtagtgatgagctaagaaatggaaaaatgaaggcatttctctcattagcccggttttcagatactcaataccaaagaattgaaaactacatgaaatcatcggaatttgaaaacaagcaagctctcctgaaaagagccaaagaggaagtaggtctccttagggaacataaaattcagacaaacagatacacagtaaaggttcagcgagagctggagttggatgaattagccctgcgtgcactgaaagaggatcgtaaacgcttcttatgtaaagcagttgaaaattatatcaactgcttattaagtggagaagaacatgatatgtgggtattccgactttgttccctctggcttgaaaattctggagtttctgaagtcaatggcatgatgaagagagacggaatgaagattccaacatataaatttttgcctcttatgtaccaattggctgctagaatggggaccaagatgatgggaggcctaggatttcatgaagtcctcaataatctaatctctagaatttcaatggatcacccccatcacactttgtttattatactggccttagcaaatgcaaacagagatgaatttctgactaaaccagaggtagccagaagaagcagaataactaaaaatgtgcctaaacaaagctctcagcttgatgaggatcgaacagaggctgcaaatagaataatatgtactatcagaagtaggagacctcagatggtcagaagtgttgaggcactttgtgatgcttatattatattagcaaacttagatgccactcagtggaagactcagagaaaaggcataaatattccagcagaccagccaattactaaacttaagaatttagaagatgttgttgtccctactatggaaattaaggtggaccacacaggagaatatggaaatctggtgactatacagtcatttaaagcagaatttcgcttagcaggaggtgtaaatttaccaaaaataatagattgtgtaggttccgatggcaaggagaggagacagcttgttaagggccgtgatgacctgagacaagatgctgtcatgcaacaggtcttccagatgtgtaatacattactgcagagaaacacggaaactaggaagaggaaattaactatctgtacttataaggtggttcccctctctcagcgaagtggtgttcttgaatggtgcacaggaactgtccccattggtgaatttcttgttaacaatgaagatggtgctcataaaagatacaggccaaatgatttcagtgcctttcagtgccaaaagaaaatgatggaggtgcaaaaaaagtcttttgaagagaaatatgaagtcttcatggatgtttgccaaaattttcaaccagttttccgttacttctgcatggaaaaattcttggatccagctatttggtttgagaagcgattggcttatacgcgcagtgtagctacttcttctattgttggttacatacttggacttggtgatagacatgtacagaatatcttgataaatgagcagtcagcagaacttgtacatatagatctaggtgttgcttttgaacagggcaaaatccttcctactcctgagacagttccttttagactcaccagagatattgtggatggcatgggcattacgggtgttgaaggtgtcttcagaagatgctgtgagaaaaccatggaagtgatgagaaactctcaggaaactctgttaaccattgtagaggtccttctatatgatccactctttgactggaccatgaatcctttgaaagctttgtatttacagcagaggccggaagatgaaactgagcttcaccctactctgaatgcagatgaccaagaatgcaaacgaaatctcagtgatattgaccagagtttcaacaaagtagctgaacgtgtcttaatgagactacaagagaaactgaaaggagtggaagaaggcactgtgctcagtgttggtggacaagtgaatttgctcatacagcaggccatagaccccaaaaatctcagccgacttttcccaggatggaaagcttgggtgtgatcttcagtatatgaattaccctttcattcagcctttagaaattatattttagcctttatttttaacctgccaacatactttaagtagggattaatatttaagtgaactattgtgggtttttttgaatgttggttttaatacttgatttaatcaccactcaaaaatgttttgatggtcttaaggaacatctctgctttcactctttagaaataatggtcattcgggctgggcgcagcggctcacgcctgtaatcccagcactttgggaggccgaggtgagcggatcacaaggtcaggagttcgagaccagcctggccaagagaccagcctggccagtatggtgaaaccctgtctctactaaaaatacaaaaattagccgagcatggtggcgggcacctgtaatcccagctactcgagaggctgaggcaggagaatctcttgaacctgggaggtgaaggttgctgtgggccaaaatcatgccattgcactccagcctgggtgacaagagcgaaactccatctcaaaaaaaaaaaaaaaaaacagaaacttatttggatttttcctagtaagatcactcagtgttactaaataatgaagttgttatggagaacaaatttcaaagacacagttagtgtagttactatttttttaagtgtgtattaaaacttctcattctattctctttatcttttaagcccttctgtactgtccatgtatgttatctttctgtgataacttcatagattgccttctagttcatgaattctcttgtcagatgtatataatctcttttaccctatccattgggcttcttctttcagaaattgtttttcatttctaattatgcatcatttttcagatctctgtttcttgatgtcatttttaatgtttttttaatgttttttatgtcactaattattttaaatgtctgtacttgatagacactgtaatagttctattaaatttagttcctgctgtttatatctgttgatttttgtatttgataggctgttcatccagttttgtctttttgaaaagtgagtttattttcagcaaggctttatctatgggaatcttgagtgtctgtttatgtcatattcccagggctgttgctgcacacaagcccattcttattttaatttcttggctttagggtttccatacctgaagtgtagcataaatactgataggagatttcccaggccaaggcaaacacacttcctcctcatctccttgtgctagtgggcagaatatttgattgatgcctttttcactgagagtataagcttccatgtgtcccacctttatggcaggggtggaaggaggtacatttaattcccactgcctgcctttggcaagccctgggttctttgctccccatatagatgtctaagctaaaagccgtgggttaatgagactggcaaattgttccaggacagctacagcatcagctcacatattcacctctctggtttttcattcccctcatttttttctgagacagagtcttgctctgtcacccaggctggagtgcagtggcatgatctcagctcactgaaacctctgcctcctgggttcaagcaattctcctgcctcagcctccngagtagctgggactacaggcgtgtgccaacacgcccggctaattttttgtatttttattagagacggagtttcaccgtgttagccaggatggtctcgatcgcttgacctcgtgatccaccctcctcggcctcccaaagtgctgggattacaggtgtgagccaccgcgcccggcctcattcccctcatttttgaccgtaaggatttcccctttcttgtaagttctgctatgtatttaaaagaatgttttctacattttatccagcatttctctgtgttctgttggaagggaagggcttaggtatctagtttgatacataggtagaagtggaacatttctctgtcccccagctgtcatcatataagataaacatcagataaaaagccacctgaaagtaaaactactgactcgtgtattagtgagtataatctcttctccatccttaggaaaatgttcatcccagctgcggagattaacaaatgggtgattgagctttctcctcgtatttggaccttgaaggttatataaatttttttcttatgaagagttggcatttctttttattgccaatggcaggcactcattcatatttgatctcctcaccttcccctcccctaaaaccaatctccagaactttttggactataaatttcttggtttgacttctggagaactgttcagaatattactttgcatttcaaattacaaacttaccttggtgtatctttttcttacaagctgcctaaatgaatatttggtatatattggtagttttattactatagtaaatcaaggaaatgcagtaaacttaaaatgtctttaagaaagccctgaaatcttcatgggtgaaattagaaattatcaactagataatagtatagataaatgaatttgtagctaattcttgctagttgttgcatccagagagctttgaataacatcattaatctactctttagccttgcatggtatgctatgaggctcctgttctgttcaagtattctaatcaatggctttgaaaagtttatcaaatttacatacagatcacaagcctaggagaaataactaattcacagatgacagaattaagattataaaagattttttttttgtaattttagtagagacagggttgccattgtattccagccttggcgacagagcaagactctgcctcaaaaaaaaaaaaaaaaaggttttggcaagctggaactctttctgcaaatgactaagatagaaaactgccaaggacaaatgaggagtagttagattttgaaaatattaatctcattagaaattagttgtggtggtttgtgcttagcgctcactgtgacccaattatttagtgtttcggaaattttcgtgacttttaactttgcaagattagtgatactatcccaatacactgctggagaaatcagaatttggagaaataagttgtccaaggcaagaagatagtaaattataagtacaagtgtaatatggacagtatctaacttgaaaagatttcaggcgaaaagaatctggggtttgccagtcagttgctcaaaaggtcaatgaaaaccaaatagtgaagctatcagagaagctaataaattatagactgcttgaacagttgtgtccagattaagggagataatagctttcccaccctactttgtgcaggtcatacctccccaaagtgtttacctaatcagtaggttcacaaactcttggtcattatagtatatgcctaaaatgtatgcacttaggaatgctaaaaatttaaatatggtctaaagcaaataaaagcaaagaggaaaaactttggacatcgtaaagactagaatagtcttttaaaaagaaagccagtatattggtttgaaatatagagatgtgtcccaatttcaagtattttaattgcaccttaatgaaattatctattttctatagattttagtactattgaatgtattactttactgttacctgaatttattataaagtgtttttgaataaataattctaaaagcatatactaagactcattcactttattcaaatatttgtgtgttctgtgtgccaggcatgggactcgttctaaggagaaagcagtgagcaaggcaggcatagtctgcctatataaagctcccaatctgaggaggataggcaactgaccacgcagtgtgaaccggggagcctattgcacaaccagtctgataatgctgcatctcagtctaaatatcctagtagtgtttcttagtcgcctcctgacaaaaaggcaaatatgaatgttctttctttgggcctagaaagtgatctagttgacatttctagcctaaaag

SEQ ID NO: 279230 - DNA, 12619 bp, Homo sapiens
  misc_feature (340)..(340): n is a, c, g, or t
  misc_feature (2481)..(2481): n is a, c, g, or t
  misc_feature (3071)..(3071): n is a, c, g, or t
  misc_feature (11595)..(11595): n is a, c, g, or t
ccgcgtccgcgcttacccaatacaagccgggctacgtccgagggtaacaacatgatcaaaaccacagcaggaaccacaataaggaacaagactcaggttaaagcaaacacagcgacagctcctgcgccgcatctcctggttccagtggcggcactgaactcgcggcaatttgtcccgcctctttcgcttcacggcagccaatcgcttccgccagagaaagaaaggcgccgaaatgaaacccgcctccgttcgccttcggaactgtcgtcacttccgtcctcagacttggaggggcggggatgaggagggcggggaggacgacgagggcgaagagggtggntgagagccccggagcccgagccgaagggcgagccgcaaacgctaagtcgctggccattggtggacatggcgcaggcgcgtttgctccgacgggccgaatgttttggggcagtgttttgagcgcggagaccgcgtgatactggatgcgcatgggcataccgtgctctgcggctgcttggcgttgcttcttcctccagaagtgggcgctgggcagtcacgcagggtttgaaccggaagcgggagtaggtagctgcgtggctaacggagaaaagaagccgtggccacgggaggaggcgagaggagtcgggatctgcgctgcagccaccgccgcggttgatactactttgaccttccgagtgcagtgaggcatacatcacaatttggaattatgcattggtttatcaatttacttgtttattgtcaccctgctgcccagatatgacttcatgaggacagtgatgtgtgttctgaaattgtgaaccatgagtctagtacttaatgatctgcttatctgctgccgtcaactagaacatgatagagctacagaacgaaagaaagaagttgagaaatttaagcgcctgattcgagatcctgaaacaattaaacatctagatcggcattcagattccaaacaaggaaaatatttgaattgggatgctgtttttagatttttacagaaatatattcagaaagaaacagaatgtctgagaatagcaaaaccaaatgtatcagcctcaacacaagcctccaggcagaaaaagatgcaggaaatcagtagtttggtcaaatacttcatcaaatgtgcaaacagaagagcacctaggctaaaatgtcaagaactcttaaattatatcatggatacagtgaaagattcatctaatggtgctatttacggagctgattgtagcaacatactactcaaagacattctttctgtgagaaaatactggtgtgaaatatctcagcaacagtggttagaattgttctctgtgtacttcaggctctatctgaaaccttcacaagatgttcatagagttttagtggctagaataattcatgctgttaccaaaggatgctgttctcagactgacggattaaattccaaatttttggactttttttccaaggctattcagtgtgcgagacaagaaaagagctcttcaggtctaaatcatatcttagcagctcttactatcttcctcaagactttggctgtcaactttcgaattcgagtgtgtgaattaggagatgaaattcttcccactttgctttatatttggactcaacataggcttaatgattctttaaaagaagtcattattgaattatttcaactgcaaatttatatccatcatccgaaaggagccaaaacccaagaaaaaggtgcttatgaatcaacaaaatggagaagtattttatacaacttatatgatctgctagtgaatgagataagtcatataggaagtagaggaaagtattcttcaggatttcgtaatattgccgtcaaagaaaatttgattgaattgatggcagatatctgtcaccaggtttttaatgaagataccagatccttggagatttctcaatcttacactactacacaaagagaatctagtgattacagtgtcccttgcaaaaggaagaaaatagaactaggctgggaagtaataaaagatcaccttcagaagtcacagaatgattttgatcttgtgccttggctacagattgcaacccaattaatatcaaagtatcctgcaagtttacctaactgtgagctgtctccattactgatgatactatctcagcttctaccccaacagcgacatggggaacgtacaccatatgtgttacgatgccttacggaagttgcattgtgtcaagacaagaggtcaaacctagaaagctcacaaaagtcagatttattaaaactctggaataaaatttggtgtattacctttcgtggtataagttctgagcaaatacaagctgaaaactttggcttacttggagccataattcagggtagtttagttgaggttgacagagaattctggaagttatttactgggtcagcctgcagaccttcatgtcctgcagtatgctgtttgactttggcactgaccaccagtatagttccaggancggtaaaaatgggaatagagcaaaatatgtgtgaagtaaatagaagcttttctttaaaggaatcaataatgaaatggctcttattctatcagttagagggtgacttagaaaatagcacagaagtgcctccaattcttcacagtaattttcctcatcttgtactggagaaaattcttgtgagtctcactatgaaaaactgtaaagctgcaatgaattttttccaaagcgtgccagaatgtgaacaccaccaaaaagataaagaagaactttcattctcagaagtagaagaactatttcttcagacaacttttgacaagatggactttttaaccattgtgagagaatgtggtatagaaaagcaccagtccagtattggcttctctgtccaccagaatctcaaggaatcactggatcgctgtcttctgggattatcagaacagcttctgaataattactcatctgagattacaaattcagaaactcttgtccggtgttcacgtcttttggtgggtgtccttggctgctactgttacatgggtgtaatagctgaagaggaagcatataagtcagaattattccagaaagccaantctctaatgcaatgtgcaggagaaagtatcactctgtttaaaaataagacaaatgaggaattcagaattggttccttgagaaatatgatgcagctatgtacacgttgcttgagcaactgtaccaagaagagtccaaataagattgcatctggctttttcctgcgattgttaacatcaaagctaatgaatgacattgcagatatttgtaaaagtttagcatccttcatcaaaaagccatttgaccgtggagaagtagaatcaatggaagatgatactaatggaaatctaatggaggtggaggatcagtcatccatgaatctatttaacgattaccctgatagtagtgttagtgatgcaaacgaacctggagagagccaaagtaccataggtgccattaatcctttagctgaagaatatctgtcaaagcaagatctacttttcttagacatgctcaagttcttgtgtttgtgtgtaactactgctcagaccaatactgtgtcctttagggcagctgatattcggaggaaattgttaatgttaattgattctagcacgctagaacctaccaaatccctccacctgcatatgtatctaatgcttttaaaggagcttcctggagaagagtaccccttgccaatggaagatgttcttgaacttctgaaaccactatccaatgtgtgttctttgtatcgtcgtgaccaagatgtttgtaaaactattttaaaccatgtccttcatgtagtgaaaaacctaggtcaaagcaatatggactctgagaacacaagggatgctcaaggacagtttcttacagtaattggagcattttggcatctaacaaaggagaggaaatatatattctctgtaagaatggccctagtaaattgccttaaaactttgcttgaggctgatccttattcaaaatgggccattcttaatgtaatgggaaaagactttcctgtaaatgaagtatttacacaatttcttgctgacaatcatcaccaagttcgcatgttggctgcagagtcaatcaatagattgttccaggacacgaagggagattcttccaggttactgaaagcacttcctttgaagcttcagcaaacagcttttgaaaatgcatacttgaaagctcaggaaggaatgagagaaatgtcccatagtgctgagaaccctgaaactttggatgaaatttataatagaaaatctgttttactgacgttgatagctgtggttttatcctgtagccctatctgcgaaaaacaggctttgtttgccctgtgtaaatctgtgaaagagaatggattagaacctcaccttgtgaaaaaggttttagagaaagtttctgaaacttttggatatagacgtttagaagactttatggcatctcatttagattatctggttttggaatggctaaatcttcaagatactgaatacaacttatcttcttttccttttattttattaaactacacaaatattgaggatttctatagatcttgttataaggttttgattccacatctggtgattagaagtcattttgatgaggtgaagtccattgctaatcagattcaagaggactggaaaagtcttctaacagactgctttccaaagattcttgtaaatattcttccttattttgcctatgagggtaccagagacagtgggatggcacagcaaagagagactgctaccaaggtctatgatatgcttaaaagtgaaaacttattgggaaaacagattgatcacttattcattagtaatttaccagagattgtggtggagttattgatgacgttacatgagccagcaaattctagtgccagtcagagcactgacctctgtgacttttcaggggatttggatcctgctcctaatccacctcattttccatcgcatgtgattaaagcaacatttgcctatatcagcaattgtcataaaaccaagttaaaaagcattttagaaattctttccaaaagccctgattcctatcagaaaattcttcttgccatatgtgagcaagcagctgaaacaaataatgtttataagaagcacagaattcttaaaatatatcacctgtttgttagtttattactgaaagatataaaaagtggcttaggaggagcttgggcctttgttcttcgagacgttatttatactttgattcactatatcaaccaaaggccttcttgtatcatggatgtgtcattacgtagcttctccctttgttgtgacttattaagtcaggtttgccagacagccgtgacttactgtaaggatgctctagaaaaccatcttcatgttattgttggtacacttataccccttgtgtatgagcaggtggaggttcagaaacaggtattggacttgttgaaatacttagtgatagataacaaggataatgaaaacctctatatcacgattaagcttttagatccttttcctgaccatgttgtttttaaggatttgcgtattactcagcaaaaaatcaaatacagtagaggacccttttcactcttggaggaaattaaccattttctctcagtaagtgtttatgatgcacttccattgacaagacttgaaggactaaaggatcttcgaagacaactggaactacataaagatcagatggtggacattatgagagcttctcaggataatccgcaagatgggattatggtgaaactagttgtcaatttgttgcagttatccaagatggcaataaaccacactggtgaaaaagaagttctagaggctgttggaagctgcttgggagaagtgggtcctatagatttctctaccatagctatacaacatagtaaagatgcatcttataccaaggcccttaagttatttgaagataaagaacttcagtggaccttcataatgctgacctacctgaataacacactggtagaagattgtgtcaaagttcgatcagcagctgttacctgtttgaaaaacattttagccacaaagactggacatagtttctgggagatttataagatgacaacagatccaatgctggcctatctacagccttttagaacatcaagaaaaaagtttttagaagtacccagatttgacaaagaaaacccttttgaaggcctggatgatataaatctgtggattcctctaagtgaaaatcatgacatttggataaagacactgacttgtgcttttttggacagtggaggcacaaaatgtgaaattcttcaattattaaagccaatgtgtgaagtgaaaactgacttttgtcagactgtacttccatacttgattcatgatattttactccaagatacaaatgaatcatggagaaatctgctttctacacatgttcagggatttttcaccagctgtcttcgacacttctcgcaaacgagccgatccacaacccctgcaaacttggattcagagtcagagcactttttccgatgctgtttggataaaaaatcacaaagaacaatgcttgctgttgtggactacatgagaagacaaaagagaccttcttcaggaacaatttttaatgatgctttctggctggatttaaattatctagaagttgccaaggtagctcagtcttgtgctgctcactttacagctttactctatgcagaaatctatgcagataagaaaagtatggatgatcaagagaaaagaagtcttgcatttgaagaaggaagccagagtacaactatttctagcttgagtgaaaaaagtaaagaagaaactggaataagtttacaggatcttctcttagaaatctacagaagtataggggagccagatagtttgtatggctgtggtggagggaagatgttacaacccattactagactacgaacatatgaacacgaagcaatgtggggcaaagccctagtaacatatgacctcgaaacagcaatcccctcatcaacacgccaggcaggaatcattcaggccttgcagaatttgggactctgccatattctttccgtctatttaaaaggattggattatgaaaataaagactggtgtcctgaactagaagaacttcattaccaagcagcatggaggaatatgcagtgggaccattgcacttccgtcagcaaagaagtagaaggaaccagttaccatgaatcattgtacaatgctctacaatctctaagagacagagaattctctacattttatgaaagtctcaaatatgccagagtaaaagaagtggaagagatgtgtaagcgcagccttgagtctgtgtattcgctctatcccacacttagcaggttgcaggccattggagagctggaaagcattggggagcttttctcaagatcagtcacacatagacaactctctgaagtatatattaagtggcagaaacactcccagcttctcaaggacagtgattttagttttcaggagcctatcatggctctacgcacagtcattttggagatcctgatggaaaaggaaatggacaactcacaaagagaatgtattaaggacattctcaccaaacaccttgtagaactctctatactggccagaactttcaagaacactcagctccctgaaagggcaatatttcaaattaaacagtacaattcagttagctgtggagtctctgagtggcagctggaagaagcacaagtattctgggcaaaaaaggagcagagtcttgccctgagtattctcaagcaaatgatcaagaagttggatgccagctgtgcagcgaacaatcccagcctaaaacttacatacacagaatgtctgagggtttgtggcaactggttagcagaaacgtgcttagaaaatcctgcggtcatcatgcagacctatctagaaaaggcagtagaagttgctggaaattatgatggagaaagtagtgatgagctaagaaatggaaaaatgaaggcatttctctcattagcccggttttcagatactcaataccaaagaattgaaaactacatgaaatcatcggaatttgaaaacaagcaagctctcctgaaaagagccaaagaggaagtaggtctccttagggaacataaaattcagacaaacagatacacagtaaaggttcagcgagagctggagttggatgaattagccctgcgtgcactgaaagaggatcgtaaacgcttcttatgtaaagcagttgaaaattatatcaactgcttattaagtggagaagaacatgatatgtgggtattccgactttgttccctctggcttgaaaattctggagtttctgaagtcaatggcatgatgaagagagacggaatgaagattccaacatataaatttttgcctcttatgtaccaattggctgctagaatggggaccaagatgatgggaggcctaggatttcatgaagtcctcaataatctaatctctagaatttcaatggatcacccccatcacactttgtttattatactggccttagcaaatgcaaacagagatgaatttctgactaaaccagaggtagccagaagaagcagaataactaaaaatgtgcctaaacaaagctctcagcttgatgaggatcgaacagaggctgcaaatagaataatatgtactatcagaagtaggagacctcagatggtcagaagtgttgaggcactttgtgatgcttatattatattagcaaacttagatgccactcagtggaagactcagagaaaaggcataaatattccagcagaccagccaattactaaacttaagaatttagaagatgttgttgtccctactatggaaattaaggtggaccacacaggagaatatggaaatctggtgactatacagtcatttaaagcagaatttcgcttagcaggaggtgtaaatttaccaaaaataatagattgtgtaggttccgatggcaaggagaggagacagcttgttaagggccgtgatgacctgagacaagatgctgtcatgcaacaggtcttccagatgtgtaatacattactgcagagaaacacggaaactaggaagaggaaattaactatctgtacttataaggtggttcccctctctcagcgaagtggtgttcttgaatggtgcacaggaactgtccccattggtgaatttcttgttaacaatgaagatggtgctcataaaagatacaggccaaatgatttcagtgcctttcagtgccaaaagaaaatgatggaggtgcaaaaaaagtcttttgaagagaaatatgaagtcttcatggatgtttgccaaaattttcaaccagttttccgttacttctgcatggaaaaattcttggatccagctatttggtttgagaagcgattggcttatacgcgcagtgtagctacttcttctattgttggttacatacttggacttggtgatagacatgtacagaatatcttgataaatgagcagtcagcagaacttgtacatatagatctaggtgttgcttttgaacagggcaaaatccttcctactcctgagacagttccttttagactcaccagagatattgtggatggcatgggcattacgggtgttgaaggtgtcttcagaagatgctgtgagaaaaccatggaagtgatgagaaactctcaggaaactctgttaaccattgtagaggtccttctatatgatccactctttgactggaccatgaatcctttgaaagctttgtatttacagcagaggccggaagatgaaactgagcttcaccctactctgaatgcagatgaccaagaatgcaaacgaaatctcagtgatattgaccagagtttcaacaaagtagctgaacgtgtcttaatgagactacaagagaaactgaaaggagtggaagaaggcactgtgctcagtgttggtggacaagtgaatttgctcatacagcaggccatagaccccaaaaatctcagccgacttttcccaggatggaaagcttgggtgtgatcttcagtatatgaattaccctttcattcagcctttagaaattatattttagcctttatttttaacctgccaacatactttaagtagggattaatatttaagtgaactattgtgggtttttttgaatgttggttttaatacttgatttaatcaccactcaaaaatgttttgatggtcttaaggaacatctctgctttcactctttagaaataatggtcattcgggctgggcgcagcggctcacgcctgtaatcccagcactttgggaggccgaggtgagcggatcacaaggtcaggagttcgagaccagcctggccaagagaccagcctggccagtatggtgaaaccctgtctctactaaaaatacaaaaattagccgagcatggtggcgggcacctgtaatcccagctactcgagaggctgaggcaggagaatctcttgaacctgggaggtgaaggttgctgtgggccaaaatcatgccattgcactccagcctgggtgacaagagcgaaactccatctcaaaaaaaaaaaaaaaaaacagaaacttatttggatttttcctagtaagatcactcagtgttactaaataatgaagttgttatggagaacaaatttcaaagacacagttagtgtagttactatttttttaagtgtgtattaaaacttctcattctattctctttatcttttaagcccttctgtactgtccatgtatgttatctttctgtgataacttcatagattgccttctagttcatgaattctcttgtcagatgtatataatctcttttaccctatccattgggcttcttctttcagaaattgtttttcatttctaattatgcatcatttttcagatctctgtttcttgatgtcatttttaatgtttttttaatgttttttatgtcactaattattttaaatgtctgtacttgatagacactgtaatagttctattaaatttagttcctgctgtttatatctgttgatttttgtatttgataggctgttcatccagttttgtctttttgaaaagtgagtttattttcagcaaggctttatctatgggaatcttgagtgtctgtttatgtcatattcccagggctgttgctgcacacaagcccattcttattttaatttcttggctttagggtttccatacctgaagtgtagcataaatactgataggagatttcccaggccaaggcaaacacacttcctcctcatctccttgtgctagtgggcagaatatttgattgatgcctttttcactgagagtataagcttccatgtgtcccacctttatggcaggggtggaaggaggtacatttaattcccactgcctgcctttggcaagccctgggttctttgctccccatatagatgtctaagctaaaagccgtgggttaatgagactggcaaattgttccaggacagctacagcatcagctcacatattcacctctctggtttttcattcccctcatttttttctgagacagagtcttgctctgtcacccaggctggagtgcagtggcatgatctcagctcactgaaacctctgcctcctgggttcaagcaattctcctgcctcagcctccngagtagctgggactacaggcgtgtgccaacacgcccggctaattttttgtatttttattagagacggagtttcaccgtgttagccaggatggtctcgatcgcttgacctcgtgatccaccctcctcggcctcccaaagtgctgggattacaggtgtgagccaccgcgcccggcctcattcccctcatttttgaccgtaaggatttcccctttcttgtaagttctgctatgtatttaaaagaatgttttctacattttatccagcatttctctgtgttctgttggaagggaagggcttaggtatctagtttgatacataggtagaagtggaacatttctctgtcccccagctgtcatcatataagataaacatcagataaaaagccacctgaaagtaaaactactgactcgtgtattagtgagtataatctcttctccatccttaggaaaatgttcatcccagctgcggagattaacaaatgggtgattgagctttctcctcgtatttggaccttgaaggttatataaatttttttcttatgaagagttggcatttctttttattgccaatggcaggcactcattcatatttgatctcctcaccttcccctcccctaaaaccaatctccagaactttttggactataaatttcttggtttgacttctggagaactgttcagaatattactttgcatttcaaattacaaacttaccttggtgtatctttttcttacaagctgcctaaatgaatatttggtatatattggtagttttattactatagtaaatcaaggaaatgcagtaaacttaaaatgtctttaagaaagccctgaaatcttcatgggtgaaattagaaattatcaactagataatagtatagataaatgaatttgtagctaattcttgctagttgttgcatccagagagcatacacttcacctgttacagcatacaaatccagtggttttcagtatatgcacaaattgtgctaccatcaccaccagatcaccaccgaactcttccg

SEQ ID NO: 279231 - DNA, 12288 bp, Homo sapiens
  misc_feature (340)..(340): n is a, c, g, or t
  misc_feature (2481)..(2481): n is a, c, g, or t
  misc_feature (3071)..(3071): n is a, c, g, or t
  misc_feature (11595)..(11595): n is a, c, g, or t
ccgcgtccgcgcttacccaatacaagccgggctacgtccgagggtaacaacatgatcaaaaccacagcaggaaccacaataaggaacaagactcaggttaaagcaaacacagcgacagctcctgcgccgcatctcctggttccagtggcggcactgaactcgcggcaatttgtcccgcctctttcgcttcacggcagccaatcgcttccgccagagaaagaaaggcgccgaaatgaaacccgcctccgttcgccttcggaactgtcgtcacttccgtcctcagacttggaggggcggggatgaggagggcggggaggacgacgagggcgaagagggtggntgagagccccggagcccgagccgaagggcgagccgcaaacgctaagtcgctggccattggtggacatggcgcaggcgcgtttgctccgacgggccgaatgttttggggcagtgttttgagcgcggagaccgcgtgatactggatgcgcatgggcataccgtgctctgcggctgcttggcgttgcttcttcctccagaagtgggcgctgggcagtcacgcagggtttgaaccggaagcgggagtaggtagctgcgtggctaacggagaaaagaagccgtggccacgggaggaggcgagaggagtcgggatctgcgctgcagccaccgccgcggttgatactactttgaccttccgagtgcagtgaggcatacatcacaatttggaattatgcattggtttatcaatttacttgtttattgtcaccctgctgcccagatatgacttcatgaggacagtgatgtgtgttctgaaattgtgaaccatgagtctagtacttaatgatctgcttatctgctgccgtcaactagaacatgatagagctacagaacgaaagaaagaagttgagaaatttaagcgcctgattcgagatcctgaaacaattaaacatctagatcggcattcagattccaaacaaggaaaatatttgaattgggatgctgtttttagatttttacagaaatatattcagaaagaaacagaatgtctgagaatagcaaaaccaaatgtatcagcctcaacacaagcctccaggcagaaaaagatgcaggaaatcagtagtttggtcaaatacttcatcaaatgtgcaaacagaagagcacctaggctaaaatgtcaagaactcttaaattatatcatggatacagtgaaagattcatctaatggtgctatttacggagctgattgtagcaacatactactcaaagacattctttctgtgagaaaatactggtgtgaaatatctcagcaacagtggttagaattgttctctgtgtacttcaggctctatctgaaaccttcacaagatgttcatagagttttagtggctagaataattcatgctgttaccaaaggatgctgttctcagactgacggattaaattccaaatttttggactttttttccaaggctattcagtgtgcgagacaagaaaagagctcttcaggtctaaatcatatcttagcagctcttactatcttcctcaagactttggctgtcaactttcgaattcgagtgtgtgaattaggagatgaaattcttcccactttgctttatatttggactcaacataggcttaatgattctttaaaagaagtcattattgaattatttcaactgcaaatttatatccatcatccgaaaggagccaaaacccaagaaaaaggtgcttatgaatcaacaaaatggagaagtattttatacaacttatatgatctgctagtgaatgagataagtcatataggaagtagaggaaagtattcttcaggatttcgtaatattgccgtcaaagaaaatttgattgaattgatggcagatatctgtcaccaggtttttaatgaagataccagatccttggagatttctcaatcttacactactacacaaagagaatctagtgattacagtgtcccttgcaaaaggaagaaaatagaactaggctgggaagtaataaaagatcaccttcagaagtcacagaatgattttgatcttgtgccttggctacagattgcaacccaattaatatcaaagtatcctgcaagtttacctaactgtgagctgtctccattactgatgatactatctcagcttctaccccaacagcgacatggggaacgtacaccatatgtgttacgatgccttacggaagttgcattgtgtcaagacaagaggtcaaacctagaaagctcacaaaagtcagatttattaaaactctggaataaaatttggtgtattacctttcgtggtataagttctgagcaaatacaagctgaaaactttggcttacttggagccataattcagggtagtttagttgaggttgacagagaattctggaagttatttactgggtcagcctgcagaccttcatgtcctgcagtatgctgtttgactttggcactgaccaccagtatagttccaggancggtaaaaatgggaatagagcaaaatatgtgtgaagtaaatagaagcttttctttaaaggaatcaataatgaaatggctcttattctatcagttagagggtgacttagaaaatagcacagaagtgcctccaattcttcacagtaattttcctcatcttgtactggagaaaattcttgtgagtctcactatgaaaaactgtaaagctgcaatgaattttttccaaagcgtgccagaatgtgaacaccaccaaaaagataaagaagaactttcattctcagaagtagaagaactatttcttcagacaacttttgacaagatggactttttaaccattgtgagagaatgtggtatagaaaagcaccagtccagtattggcttctctgtccaccagaatctcaaggaatcactggatcgctgtcttctgggattatcagaacagcttctgaataattactcatctgagattacaaattcagaaactcttgtccggtgttcacgtcttttggtgggtgtccttggctgctactgttacatgggtgtaatagctgaagaggaagcatataagtcagaattattccagaaagccaantctctaatgcaatgtgcaggagaaagtatcactctgtttaaaaataagacaaatgaggaattcagaattggttccttgagaaatatgatgcagctatgtacacgttgcttgagcaactgtaccaagaagagtccaaataagattgcatctggctttttcctgcgattgttaacatcaaagctaatgaatgacattgcagatatttgtaaaagtttagcatccttcatcaaaaagccatttgaccgtggagaagtagaatcaatggaagatgatactaatggaaatctaatggaggtggaggatcagtcatccatgaatctatttaacgattaccctgatagtagtgttagtgatgcaaacgaacctggagagagccaaagtaccataggtgccattaatcctttagctgaagaatatctgtcaaagcaagatctacttttcttagacatgctcaagttcttgtgtttgtgtgtaactactgctcagaccaatactgtgtcctttagggcagctgatattcggaggaaattgttaatgttaattgattctagcacgctagaacctaccaaatccctccacctgcatatgtatctaatgcttttaaaggagcttcctggagaagagtaccccttgccaatggaagatgttcttgaacttctgaaaccactatccaatgtgtgttctttgtatcgtcgtgaccaagatgtttgtaaaactattttaaaccatgtccttcatgtagtgaaaaacctaggtcaaagcaatatggactctgagaacacaagggatgctcaaggacagtttcttacagtaattggagcattttggcatctaacaaaggagaggaaatatatattctctgtaagaatggccctagtaaattgccttaaaactttgcttgaggctgatccttattcaaaatgggccattcttaatgtaatgggaaaagactttcctgtaaatgaagtatttacacaatttcttgctgacaatcatcaccaagttcgcatgttggctgcagagtcaatcaatagattgttccaggacacgaagggagattcttccaggttactgaaagcacttcctttgaagcttcagcaaacagcttttgaaaatgcatacttgaaagctcaggaaggaatgagagaaatgtcccatagtgctgagaaccctgaaactttggatgaaatttataatagaaaatctgttttactgacgttgatagctgtggttttatcctgtagccctatctgcgaaaaacaggctttgtttgccctgtgtaaatctgtgaaagagaatggattagaacctcaccttgtgaaaaaggttttagagaaagtttctgaaacttttggatatagacgtttagaagactttatggcatctcatttagattatctggttttggaatggctaaatcttcaagatactgaatacaacttatcttcttttccttttattttattaaactacacaaatattgaggatttctatagatcttgttataaggttttgattccacatctggtgattagaagtcattttgatgaggtgaagtccattgctaatcagattcaagaggactggaaaagtcttctaacagactgctttccaaagattcttgtaaatattcttccttattttgcctatgagggtaccagagacagtgggatggcacagcaaagagagactgctaccaaggtctatgatatgcttaaaagtgaaaacttattgggaaaacagattgatcacttattcattagtaatttaccagagattgtggtggagttattgatgacgttacatgagccagcaaattctagtgccagtcagagcactgacctctgtgacttttcaggggatttggatcctgctcctaatccacctcattttccatcgcatgtgattaaagcaacatttgcctatatcagcaattgtcataaaaccaagttaaaaagcattttagaaattctttccaaaagccctgattcctatcagaaaattcttcttgccatatgtgagcaagcagctgaaacaaataatgtttataagaagcacagaattcttaaaatatatcacctgtttgttagtttattactgaaagatataaaaagtggcttaggaggagcttgggcctttgttcttcgagacgttatttatactttgattcactatatcaaccaaaggccttcttgtatcatggatgtgtcattacgtagcttctccctttgttgtgacttattaagtcaggtttgccagacagccgtgacttactgtaaggatgctctagaaaaccatcttcatgttattgttggtacacttataccccttgtgtatgagcaggtggaggttcagaaacaggtattggacttgttgaaatacttagtgatagataacaaggataatgaaaacctctatatcacgattaagcttttagatccttttcctgaccatgttgtttttaaggatttgcgtattactcagcaaaaaatcaaatacagtagaggacccttttcactcttggaggaaattaaccattttctctcagtaagtgtttatgatgcacttccattgacaagacttgaaggactaaaggatcttcgaagacaactggaactacataaagatcagatggtggacattatgagagcttctcaggataatccgcaagatgggattatggtgaaactagttgtcaatttgttgcagttatccaagatggcaataaaccacactggtgaaaaagaagttctagaggctgttggaagctgcttgggagaagtgggtcctatagatttctctaccatagctatacaacatagtaaagatgcatcttataccaaggcccttaagttatttgaagataaagaacttcagtggaccttcataatgctgacctacctgaataacacactggtagaagattgtgtcaaagttcgatcagcagctgttacctgtttgaaaaacattttagccacaaagactggacatagtttctgggagatttataagatgacaacagatccaatgctggcctatctacagccttttagaacatcaagaaaaaagtttttagaagtacccagatttgacaaagaaaacccttttgaaggcctggatgatataaatctgtggattcctctaagtgaaaatcatgacatttggataaagacactgacttgtgcttttttggacagtggaggcacaaaatgtgaaattcttcaattattaaagccaatgtgtgaagtgaaaactgacttttgtcagactgtacttccatacttgattcatgatattttactccaagatacaaatgaatcatggagaaatctgctttctacacatgttcagggatttttcaccagctgtcttcgacacttctcgcaaacgagccgatccacaacccctgcaaacttggattcagagtcagagcactttttccgatgctgtttggataaaaaatcacaaagaacaatgcttgctgttgtggactacatgagaagacaaaagagaccttcttcaggaacaatttttaatgatgctttctggctggatttaaattatctagaagttgccaaggtagctcagtcttgtgctgctcactttacagctttactctatgcagaaatctatgcagataagaaaagtatggatgatcaagagaaaagaagtcttgcatttgaagaaggaagccagagtacaactatttctagcttgagtgaaaaaagtaaagaagaaactggaataagtttacaggatcttctcttagaaatctacagaagtataggggagccagatagtttgtatggctgtggtggagggaagatgttacaacccattactagactacgaacatatgaacacgaagcaatgtggggcaaagccctagtaacatatgacctcgaaacagcaatcccctcatcaacacgccaggcaggaatcattcaggccttgcagaatttgggactctgccatattctttccgtctatttaaaaggattggattatgaaaataaagactggtgtcctgaactagaagaacttcattaccaagcagcatggaggaatatgcagtgggaccattgcacttccgtcagcaaagaagtagaaggaaccagttaccatgaatcattgtacaatgctctacaatctctaagagacagagaattctctacattttatgaaagtctcaaatatgccagagtaaaagaagtggaagagatgtgtaagcgcagccttgagtctgtgtattcgctctatcccacacttagcaggttgcaggccattggagagctggaaagcattggggagcttttctcaagatcagtcacacatagacaactctctgaagtatatattaagtggcagaaacactcccagcttctcaaggacagtgattttagttttcaggagcctatcatggctctacgcacagtcattttggagatcctgatggaaaaggaaatggacaactcacaaagagaatgtattaaggacattctcaccaaacaccttgtagaactctctatactggccagaactttcaagaacactcagctccctgaaagggcaatatttcaaattaaacagtacaattcagttagctgtggagtctctgagtggcagctggaagaagcacaagtattctgggcaaaaaaggagcagagtcttgccctgagtattctcaagcaaatgatcaagaagttggatgccagctgtgcagcgaacaatcccagcctaaaacttacatacacagaatgtctgagggtttgtggcaactggttagcagaaacgtgcttagaaaatcctgcggtcatcatgcagacctatctagaaaaggcagtagaagttgctggaaattatgatggagaaagtagtgatgagctaagaaatggaaaaatgaaggcatttctctcattagcccggttttcagatactcaataccaaagaattgaaaactacatgaaatcatcggaatttgaaaacaagcaagctctcctgaaaagagccaaagaggaagtaggtctccttagggaacataaaattcagacaaacagatacacagtaaaggttcagcgagagctggagttggatgaattagccctgcgtgcactgaaagaggatcgtaaacgcttcttatgtaaagcagttgaaaattatatcaactgcttattaagtggagaagaacatgatatgtgggtattccgactttgttccctctggcttgaaaattctggagtttctgaagtcaatggcatgatgaagagagacggaatgaagattccaacatataaatttttgcctcttatgtaccaattggctgctagaatggggaccaagatgatgggaggcctaggatttcatgaagtcctcaataatctaatctctagaatttcaatggatcacccccatcacactttgtttattatactggccttagcaaatgcaaacagagatgaatttctgactaaaccagaggtagccagaagaagcagaataactaaaaatgtgcctaaacaaagctctcagcttgatgaggatcgaacagaggctgcaaatagaataatatgtactatcagaagtaggagacctcagatggtcagaagtgttgaggcactttgtgatgcttatattatattagcaaacttagatgccactcagtggaagactcagagaaaaggcataaatattccagcagaccagccaattactaaacttaagaatttagaagatgttgttgtccctactatggaaattaaggtggaccacacaggagaatatggaaatctggtgactatacagtcatttaaagcagaatttcgcttagcaggaggtgtaaatttaccaaaaataatagattgtgtaggttccgatggcaaggagaggagacagcttgttaagggccgtgatgacctgagacaagatgctgtcatgcaacaggtcttccagatgtgtaatacattactgcagagaaacacggaaactaggaagaggaaattaactatctgtacttataaggtggttcccctctctcagcgaagtggtgttcttgaatggtgcacaggaactgtccccattggtgaatttcttgttaacaatgaagatggtgctcataaaagatacaggccaaatgatttcagtgcctttcagtgccaaaagaaaatgatggaggtgcaaaaaaagtcttttgaagagaaatatgaagtcttcatggatgtttgccaaaattttcaaccagttttccgttacttctgcatggaaaaattcttggatccagctatttggtttgagaagcgattggcttatacgcgcagtgtagctacttcttctattgttggttacatacttggacttggtgatagacatgtacagaatatcttgataaatgagcagtcagcagaacttgtacatatagatctaggtgttgcttttgaacagggcaaaatccttcctactcctgagacagttccttttagactcaccagagatattgtggatggcatgggcattacgggtgttgaaggtgtcttcagaagatgctgtgagaaaaccatggaagtgatgagaaactctcaggaaactctgttaaccattgtagaggtccttctatatgatccactctttgactggaccatgaatcctttgaaagctttgtatttacagcagaggccggaagatgaaactgagcttcaccctactctgaatgcagatgaccaagaatgcaaacgaaatctcagtgatattgaccagagtttcaacaaagtagctgaacgtgtcttaatgagactacaagagaaactgaaaggagtggaagaaggcactgtgctcagtgttggtggacaagtgaatttgctcatacagcaggccatagaccccaaaaatctcagccgacttttcccaggatggaaagcttgggtgtgatcttcagtatatgaattaccctttcattcagcctttagaaattatattttagcctttatttttaacctgccaacatactttaagtagggattaatatttaagtgaactattgtgggtttttttgaatgttggttttaatacttgatttaatcaccactcaaaaatgttttgatggtcttaaggaacatctctgctttcactctttagaaataatggtcattcgggctgggcgcagcggctcacgcctgtaatcccagcactttgggaggccgaggtgagcggatcacaaggtcaggagttcgagaccagcctggccaagagaccagcctggccagtatggtgaaaccctgtctctactaaaaatacaaaaattagccgagcatggtggcgggcacctgtaatcccagctactcgagaggctgaggcaggagaatctcttgaacctgggaggtgaaggttgctgtgggccaaaatcatgccattgcactccagcctgggtgacaagagcgaaactccatctcaaaaaaaaaaaaaaaaaacagaaacttatttggatttttcctagtaagatcactcagtgttactaaataatgaagttgttatggagaacaaatttcaaagacacagttagtgtagttactatttttttaagtgtgtattaaaacttctcattctattctctttatcttttaagcccttctgtactgtccatgtatgttatctttctgtgataacttcatagattgccttctagttcatgaattctcttgtcagatgtatataatctcttttaccctatccattgggcttcttctttcagaaattgtttttcatttctaattatgcatcatttttcagatctctgtttcttgatgtcatttttaatgtttttttaatgttttttatgtcactaattattttaaatgtctgtacttgatagacactgtaatagttctattaaatttagttcctgctgtttatatctgttgatttttgtatttgataggctgttcatccagttttgtctttttgaaaagtgagtttattttcagcaaggctttatctatgggaatcttgagtgtctgtttatgtcatattcccagggctgttgctgcacacaagcccattcttattttaatttcttggctttagggtttccatacctgaagtgtagcataaatactgataggagatttcccaggccaaggcaaacacacttcctcctcatctccttgtgctagtgggcagaatatttgattgatgcctttttcactgagagtataagcttccatgtgtcccacctttatggcaggggtggaaggaggtacatttaattcccactgcctgcctttggcaagccctgggttctttgctccccatatagatgtctaagctaaaagccgtgggttaatgagactggcaaattgttccaggacagctacagcatcagctcacatattcacctctctggtttttcattcccctcatttttttctgagacagagtcttgctctgtcacccaggctggagtgcagtggcatgatctcagctcactgaaacctctgcctcctgggttcaagcaattctcctgcctcagcctccngagtagctgggactacaggcgtgtgccaacacgcccggctaattttttgtatttttattagagacggagtttcaccgtgttagccaggatggtctcgatcgcttgacctcgtgatccaccctcctcggcctcccaaagtgctgggattacaggtgtgagccaccgcgcccggcctcattcccctcatttttgaccgtaaggatttcccctttcttgtaagttctgctatgtatttaaaagaatgttttctacattttatccagcatttctctgtgttctgttggaagggaagggcttaggtatctagtttgatacataggtagaagtggaacatttctctgtcccccagctgtcatcatataagataaacatcagataaaaagccacctgaaagtaaaactactgactcgtgtattagtgagtataatctcttctccatccttaggaaaatgttcatcccagctgcggagattaacaaatgggtgattgagctttctcctcgtatttggaccttgaaggttatataaatttttttcttatgaagagttggcatttctttttattgccaatggcaggcactcattcatatttgatctcctcaccttcccctcccctaaaaccaatctccagaactttttggactataaatttcttggtttgacttctggagattgatttttaggggggaacagg

SEQ ID NO: 279232 - DNA, 9192 bp, Homo sapiens
  misc_feature (7204)..(7204): n is a, c, g, or t
ggaattcttaacagtaaagttctgtaattgagacagaattcccaaataaagtcaagagtaaaattcagatagaggagcagttatacatcagtgggaaatttggttggcagaaaaattaccaggtcatacaacttaatgatagacctgaagtcttatttaaaatgattctctaaaattgaagaattggattaagggggccttgtttggctgattttcatactttttcctcttagtctacaggttggctgcatagaagaaaaaggtagagttatttataatcttgtaaatcttggactttgagtcatctattttcttttacagtcatcgaatacttttggaaataaggtaatatatgccttttgagctgtcttgacgttcacagatataaaatattaaatatattttaattttgtgcccttgcagattgatcacttattcattagtaatttaccagagattgtggtggagttattgatgacgttacatgagccagcaaattctagtgccagtcagagcactgacctctgtgacttttcaggggatttggatcctgctcctaatccacctcattttccatcgcatgtgattaaagcaacatttgcctatatcagcaattgtcataaaaccaagttaaaaagcattttagaaattctttccaaaagccctgattcctatcagaaaattcttcttgccatatgtgagcaagcagctgaaacaaataatgtttataagaagcacagaattcttaaaatatatcacctgtttgttagtttattactgaaagatataaaaagtggcttaggaggagcttgggcctttgttcttcgagacgttatttatactttgattcactatatcaaccaaaggccttcttgtatcatggatgtgtcattacgtagcttctccctttgttgtgacttattaagtcaggtttgccagacagccgtgacttactgtaaggatgctctagaaaaccatcttcatgttattgttggtacacttataccccttgtgtatgagcaggtggaggttcagaaacaggtattggacttgttgaaatacttagtgatagataacaaggataatgaaaacctctatatcacgattaagcttttagatccttttcctgaccatgttgtttttaaggatttgcgtattactcagcaaaaaatcaaatacagtagaggacccttttcactcttggaggaaattaaccattttctctcagtaagtgtttatgatgcacttccattgacaagacttgaaggactaaaggatcttcgaagacaactggaactacataaagatcagatggtggacattatgagagcttctcaggataatccgcaagatgggattatggtgaaactagttgtcaatttgttgcagttatccaagatggcaataaaccacactggtgaaaaagaagttctagaggctgttggaagctgcttgggagaagtgggtcctatagatttctctaccatagctatacaacatagtaaagatgcatcttataccaaggcccttaagttatttgaagataaagaacttcagtggaccttcataatgctgacctacctgaataacacactggtagaagattgtgtcaaagttcgatcagcagctgttacctgtttgaaaaacattttagccacaaagactggacatagtttctgggagatttataagatgacaacagatccaatgctggcctatctacagccttttagaacatcaagaaaaaagtttttagaagtacccagatttgacaaagaaaacccttttgaaggcctggatgatataaatctgtggattcctctaagtgaaaatcatgacatttggataaagacactgacttgtgcttttttggacagtggaggcacaaaatgtgaaattcttcaattattaaagccaatgtgtgaagtgaaaactgacttttgtcagactgtacttccatacttgattcatgatattttactccaagatacaaatgaatcatggagaaatctgctttctacacatgttcagggatttttcaccagctgtcttcgacacttctcgcaaacgagccgatccacaacccctgcaaacttggattcagagtcagagcactttttccgatgctgtttggataaaaaatcacaaagaacaatgcttgctgttgtggactacatgagaagacaaaagagaccttcttcaggaacaatttttaatgatgctttctggctggatttaaattatctagaagttgccaaggtagctcagtcttgtgctgctcactttacagctttactctatgcagaaatctatgcagataagaaaagtatggatgatcaagagaaaagaagtcttgcatttgaagaaggaagccagagtacaactatttctagcttgagtgaaaaaagtaaagaagaaactggaataagtttacaggatcttctcttagaaatctacagaagtataggggagccagatagtttgtatggctgtggtggagggaagatgttacaacccattactagactacgaacatatgaacacgaagcaatgtggggcaaagccctagtaacatatgacctcgaaacagcaatcccctcatcaacacgccaggcaggaatcattcaggccttgcagaatttgggactctgccatattctttccgtctatttaaaaggattggattatgaaaataaagactggtgtcctgaactagaagaacttcattaccaagcagcatggaggaatatgcagtgggaccattgcacttccgtcagcaaagaagtagaaggaaccagttaccatgaatcattgtacaatgctctacaatctctaagagacagagaattctctacattttatgaaagtctcaaatatgccagagtaaaagaagtggaagagatgtgtaagcgcagccttgagtctgtgtattcgctctatcccacacttagcaggttgcaggccattggagagctggaaagcattggggagcttttctcaagatcagtcacacatagacaactctctgaagtatatattaagtggcagaaacactcccagcttctcaaggacagtgattttagttttcaggagcctatcatggctctacgcacagtcattttggagatcctgatggaaaaggaaatggacaactcacaaagagaatgtattaaggacattctcaccaaacaccttgtagaactctctatactggccagaactttcaagaacactcagctccctgaaagggcaatatttcaaattaaacagtacaattcagttagctgtggagtctctgagtggcagctggaagaagcacaagtattctgggcaaaaaaggagcagagtcttgccctgagtattctcaagcaaatgatcaagaagttggatgccagctgtgcagcgaacaatcccagcctaaaacttacatacacagaatgtctgagggtttgtggcaactggttagcagaaacgtgcttagaaaatcctgcggtcatcatgcagacctatctagaaaaggcagtagaagttgctggaaattatgatggagaaagtagtgatgagctaagaaatggaaaaatgaaggcatttctctcattagcccggttttcagatactcaataccaaagaattgaaaactacatgaaatcatcggaatttgaaaacaagcaagctctcctgaaaagagccaaagaggaagtaggtctccttagggaacataaaattcagacaaacagatacacagtaaaggttcagcgagagctggagttggatgaattagccctgcgtgcactgaaagaggatcgtaaacgcttcttatgtaaagcagttgaaaattatatcaactgcttattaagtggagaagaacatgatatgtgggtattccgactttgttccctctggcttgaaaattctggagtttctgaagtcaatggcatgatgaagagagacggaatgaagattccaacatataaatttttgcctcttatgtaccaattggctgctagaatggggaccaagatgatgggaggcctaggatttcatgaagtcctcaataatctaatctctagaatttcaatggatcacccccatcacactttgtttattatactggccttagcaaatgcaaacagagatgaatttctgactaaaccagaggtagccagaagaagcagaataactaaaaatgtgcctaaacaaagctctcagcttgatgaggatcgaacagaggctgcaaatagaataatatgtactatcagaagtaggagacctcagatggtcagaagtgttgaggcactttgtgatgcttatattatattagcaaacttagatgccactcagtggaagactcagagaaaaggcataaatattccagcagaccagccaattactaaacttaagaatttagaagatgttgttgtccctactatggaaattaaggtggaccacacaggagaatatggaaatctggtgactatacagtcatttaaagcagaatttcgcttagcaggaggtgtaaatttaccaaaaataatagattgtgtaggttccgatggcaaggagaggagacagcttgttaagggccgtgatgacctgagacaagatgctgtcatgcaacaggtcttccagatgtgtaatacattactgcagagaaacacggaaactaggaagaggaaattaactatctgtacttataaggtggttcccctctctcagcgaagtggtgttcttgaatggtgcacaggaactgtccccattggtgaatttcttgttaacaatgaagatggtgctcataaaagatacaggccaaatgatttcagtgcctttcagtgccaaaagaaaatgatggaggtgcaaaaaaagtcttttgaagagaaatatgaagtcttcatggatgtttgccaaaattttcaaccagttttccgttacttctgcatggaaaaattcttggatccagctatttggtttgagaagcgattggcttatacgcgcagtgtagctacttcttctattgttggttacatacttggacttggtgatagacatgtacagaatatcttgataaatgagcagtcagcagaacttgtacatatagatctaggtgttgcttttgaacagggcaaaatccttcctactcctgagacagttccttttagactcaccagagatattgtggatggcatgggcattacgggtgttgaaggtgtcttcagaagatgctgtgagaaaaccatggaagtgatgagaaactctcaggaaactctgttaaccattgtagaggtccttctatatgatccactctttgactggaccatgaatcctttgaaagctttgtatttacagcagaggccggaagatgaaactgagcttcaccctactctgaatgcagatgaccaagaatgcaaacgaaatctcagtgatattgaccagagtttcaacaaagtagctgaacgtgtcttaatgagactacaagagaaactgaaaggagtggaagaaggcactgtgctcagtgttggtggacaagtgaatttgctcatacagcaggccatagaccccaaaaatctcagccgacttttcccaggatggaaagcttgggtgtgatcttcagtatatgaattaccctttcattcagcctttagaaattatattttagcctttatttttaacctgccaacatactttaagtagggattaatatttaagtgaactattgtgggtttttttgaatgttggttttaatacttgatttaatcaccactcaaaaatgttttgatggtcttaaggaacatctctgctttcactctttagaaataatggtcattcgggctgggcgcagcggctcacgcctgtaatcccagcactttgggaggccgaggtgagcggatcacaaggtcaggagttcgagaccagcctggccaagagaccagcctggccagtatggtgaaaccctgtctctactaaaaatacaaaaattagccgagcatggtggcgggcacctgtaatcccagctactcgagaggctgaggcaggagaatctcttgaacctgggaggtgaaggttgctgtgggccaaaatcatgccattgcactccagcctgggtgacaagagcgaaactccatctcaaaaaaaaaaaaaaaaaacagaaacttatttggatttttcctagtaagatcactcagtgttactaaataatgaagttgttatggagaacaaatttcaaagacacagttagtgtagttactatttttttaagtgtgtattaaaacttctcattctattctctttatcttttaagcccttctgtactgtccatgtatgttatctttctgtgataacttcatagattgccttctagttcatgaattctcttgtcagatgtatataatctcttttaccctatccattgggcttcttctttcagaaattgtttttcatttctaattatgcatcatttttcagatctctgtttcttgatgtcatttttaatgtttttttaatgttttttatgtcactaattattttaaatgtctgtacttgatagacactgtaatagttctattaaatttagttcctgctgtttatatctgttgatttttgtatttgataggctgttcatccagttttgtctttttgaaaagtgagtttattttcagcaaggctttatctatgggaatcttgagtgtctgtttatgtcatattcccagggctgttgctgcacacaagcccattcttattttaatttcttggctttagggtttccatacctgaagtgtagcataaatactgataggagatttcccaggccaaggcaaacacacttcctcctcatctccttgtgctagtgggcagaatatttgattgatgcctttttcactgagagtataagcttccatgtgtcccacctttatggcaggggtggaaggaggtacatttaattcccactgcctgcctttggcaagccctgggttctttgctccccatatagatgtctaagctaaaagccgtgggttaatgagactggcaaattgttccaggacagctacagcatcagctcacatattcacctctctggtttttcattcccctcatttttttctgagacagagtcttgctctgtcacccaggctggagtgcagtggcatgatctcagctcactgaaacctctgcctcctgggttcaagcaattctcctgcctcagcctccngagtagctgggactacaggcgtgtgccaacacgcccggctaattttttgtatttttattagagacggagtttcaccgtgttagccaggatggtctcgatcgcttgacctcgtgatccaccctcctcggcctcccaaagtgctgggattacaggtgtgagccaccgcgcccggcctcattcccctcatttttgaccgtaaggatttcccctttcttgtaagttctgctatgtatttaaaagaatgttttctacattttatccagcatttctctgtgttctgttggaagggaagggcttaggtatctagtttgatacataggtagaagtggaacatttctctgtcccccagctgtcatcatataagataaacatcagataaaaagccacctgaaagtaaaactactgactcgtgtattagtgagtataatctcttctccatccttaggaaaatgttcatcccagctgcggagattaacaaatgggtgattgagctttctcctcgtatttggaccttgaaggttatataaatttttttcttatgaagagttggcatttctttttattgccaatggcaggcactcattcatatttgatctcctcaccttcccctcccctaaaaccaatctccagaactttttggactataaatttcttggtttgacttctggagaactgttcagaatattactttgcatttcaaattacaaacttaccttggtgtatctttttcttacaagctgcctaaatgaatatttggtatatattggtagttttattactatagtaaatcaaggaaatgcagtaaacttaaaatgtctttaagaaagccctgaaatcttcatgggtgaaattagaaattatcaactagataatagtatagataaatgaatttgtagctaattcttgctagttgttgcatccagagagctttgaataacatcattaatctactctttagccttgcatggtatgctatgaggctcctgttctgttcaagtattctaatcaatggctttgaaaagtttatcaaatttacatacagatcacaagcctaggagaaataactaattcacagatgacagaattaagattataaaagattttttttttgtaattttagtagagacagggttgccattgtattccagccttggcgacagagcaagactctgcctcaaaaaaaaaaaaaaaaaggttttggcaagctggaactctttctgcaaatgactaagatagaaaactgccaaggacaaatgaggagtagttagattttgaaaatattaatcatagaatagttgttgtatgctaagtcactgacccatattatgtacagcatttctgatctttactttgcaagattagtgatactatcccaatacactgctggagaaatcagaatttggagaaataagttgtccaaggcaagaagatagtaaattataagtacaagtgtaatatggacagtatctaacttgaaaagatttcaggcgaaaagaatctggggtttgccagtcagttgctcaaaaggtcaatgaaaaccaaatagtgaagctatcagagaagctaataaattatagactgcttgaacagttgtgtccagattaagggagataatagctttcccaccctactttgtgcaggtcatacctccccaaagtgtttacctaatcagtaggttcacaaactcttggtcattatagtatatgcctaaaatgtatgcacttaggaatgctaaaaatttaaatatggtctaaagcaaataaaagcaaagaggaaaaactttggacatcgtaaagactagaatagtcttttaaaaagaaagccagtatattggtttgaaatatagagatgtgtcccaatttcaagtattttaattgcaccttaatgaaattatctattttctatagattttagtactattgaatgtattactttactgttacctgaatttattataaagtgtttttgaataaataattctaaaagca

SEQ ID NO: 279233 - DNA, 13155 bp, Homo sapiens
  misc_feature (2141)..(2141): n is a, c, g, or t
  misc_feature (2731)..(2731): n is a, c, g, or t
  misc_feature (11167)..(11167): n is a, c, g, or t
cctgaggtgtttgtatgccataaatgctattataggacttagaactaattttgctttccaaggtaaatattctccttgtaatcttatgttattctaataaattcattcttcataaagagtgccaaaaaacttgggatcatttttggtctaacaccagaaattgtgaattattaaggttataattgtttaagaatgattgcttttcgagatgagcagatcacttgaggtcaggagttcaagaccagcctggtcaacatggtgaaaccctgtctctactaaaagtagaaaaattagcagggtgtggtggtgcacgcctctagtctcagctacttggaggctgaggtgggagaattacttgaacccaggaggtggaggctgcagtgtgctgagtttgtgccactgcactccagcctgggtgacagaccaagattccatctcaaaaaaaaaaaaaaaagaatgattgtttttgctatatattcctataaaagaggcgttggcaaacttactgtgtaaagaggccagatagtaaatgttcttgactttataggccatgtggtcacctctgtcttaattacaaaagcagccataaacaataagtaaatgaatggttgtgactatgttccaataaaatgttatttgcaaagaaaaaaaaaatgaattttgcttggggccataatttgccaatttcttctctacaaaagaagtttagttaatagtaatttcccaaatggaattatttaaatagttgccattccaagtgtcttatttttgttcaaatttatgtttttctttatttgtttattttgaaataggagcacctaggctaaaatgtcaagaactcttaaattatatcatggatacagtgaaagattcatctaatggtgctatttacggagctgattgtagcaacatactactcaaagacattctttctgtgagaaaatactggtgtgaaatatctcagcaacagtggttagaattgttctctgtgtacttcaggctctatctgaaaccttcacaagatgttcatagagttttagtggctagaataattcatgctgttaccaaaggatgctgttctcagactgacggattaaattccaaatttttggactttttttccaaggctattcagtgtgcgagacaagaaaagagctcttcaggtctaaatcatatcttagcagctcttactatcttcctcaagactttggctgtcaactttcgaattcgagtgtgtgaattaggagatgaaattcttcccactttgctttatatttggactcaacataggcttaatgattctttaaaagaagtcattattgaattatttcaactgcaaatttatatccatcatccgaaaggagccaaaacccaagaaaaaggtgcttatgaatcaacaaaatggagaagtattttatacaacttatatgatctgctagtgaatgagataagtcatataggaagtagaggaaagtattcttcaggatttcgtaatattgccgtcaaagaaaatttgattgaattgatggcagatatctgtcaccaggtttttaatgaagataccagatccttggagatttctcaatcttacactactacacaaagagaatctagtgattacagtgtcccttgcaaaaggaagaaaatagaactaggctgggaagtaataaaagatcaccttcagaagtcacagaatgattttgatcttgtgccttggctacagattgcaacccaattaatatcaaagtatcctgcaagtttacctaactgtgagctgtctccattactgatgatactatctcagcttctaccccaacagcgacatggggaacgtacaccatatgtgttacgatgccttacggaagttgcattgtgtcaagacaagaggtcaaacctagaaagctcacaaaagtcagatttattaaaactctggaataaaatttggtgtattacctttcgtggtataagttctgagcaaatacaagctgaaaactttggcttacttggagccataattcagggtagtttagttgaggttgacagagaattctggaagttatttactgggtcagcctgcagaccttcatgtcctgcagtatgctgtttgactttggcactgaccaccagtatagttccaggancggtaaaaatgggaatagagcaaaatatgtgtgaagtaaatagaagcttttctttaaaggaatcaataatgaaatggctcttattctatcagttagagggtgacttagaaaatagcacagaagtgcctccaattcttcacagtaattttcctcatcttgtactggagaaaattcttgtgagtctcactatgaaaaactgtaaagctgcaatgaattttttccaaagcgtgccagaatgtgaacaccaccaaaaagataaagaagaactttcattctcagaagtagaagaactatttcttcagacaacttttgacaagatggactttttaaccattgtgagagaatgtggtatagaaaagcaccagtccagtattggcttctctgtccaccagaatctcaaggaatcactggatcgctgtcttctgggattatcagaacagcttctgaataattactcatctgagattacaaattcagaaactcttgtccggtgttcacgtcttttggtgggtgtccttggctgctactgttacatgggtgtaatagctgaagaggaagcatataagtcagaattattccagaaagccaantctctaatgcaatgtgcaggagaaagtatcactctgtttaaaaataagacaaatgaggaattcagaattggttccttgagaaatatgatgcagctatgtacacgttgcttgagcaactgtaccaagaagagtccaaataagattgcatctggctttttcctgcgattgttaacatcaaagctaatgaatgacattgcagatatttgtaaaagtttagcatccttcatcaaaaagccatttgaccgtggagaagtagaatcaatggaagatgatactaatggaaatctaatggaggtggaggatcagtcatccatgaatctatttaacgattaccctgatagtagtgttagtgatgcaaacgaacctggagagagccaaagtaccataggtgccattaatcctttagctgaagaatatctgtcaaagcaagatctacttttcttagacatgctcaagttcttgtgtttgtgtgtaactactgctcagaccaatactgtgtcctttagggcagctgatattcggaggaaattgttaatgttaattgattctagcacgctagaacctaccaaatccctccacctgcatatgtatctaatgcttttaaaggagcttcctggagaagagtaccccttgccaatggaagatgttcttgaacttctgaaaccactatccaatgtgtgttctttgtatcgtcgtgaccaagatgtttgtaaaactattttaaaccatgtccttcatgtagtgaaaaacctaggtcaaagcaatatggactctgagaacacaagggatgctcaaggacagtttcttacagtaattggagcattttggcatctaacaaaggagaggaaatatatattctctgtaagaatggccctagtaaattgccttaaaactttgcttgaggctgatccttattcaaaatgggccattcttaatgtaatgggaaaagactttcctgtaaatgaagtatttacacaatttcttgctgacaatcatcaccaagttcgcatgttggctgcagagtcaatcaatagattgttccaggacacgaagggagattcttccaggttactgaaagcacttcctttgaagcttcagcaaacagcttttgaaaatgcatacttgaaagctcaggaaggaatgagagaaatgtcccatagtgctgagaaccctgaaactttggatgaaatttataatagaaaatctgttttactgacgttgatagctgtggttttatcctgtagccctatctgcgaaaaacaggctttgtttgccctgtgtaaatctgtgaaagagaatggattagaacctcaccttgtgaaaaaggttttagagaaagtttctgaaacttttggatatagacgtttagaagactttatggcatctcatttagattatctggttttggaatggctaaatcttcaagatactgaatacaacttatcttcttttccttttattttattaaactacacaaatattgaggatttctatagatcttgttataaggttttgattccacatctggtgattagaagtcattttgatgaggtgaagtccattgctaatcagattcaagaggactggaaaagtcttctaacagactgctttccaaagattcttgtaaatattcttccttattttgcctatgagggtaccagagacagtgggatggcacagcaaagagagactgctaccaaggtctatgatatgcttaaaagtgaaaacttattgggaaaacagattgatcacttattcattagtaatttaccagagattgtggtggagttattgatgacgttacatgagccagcaaattctagtgccagtcagagcactgacctctgtgacttttcaggggatttggatcctgctcctaatccacctcattttccatcgcatgtgattaaagcaacatttgcctatatcagcaattgtcataaaaccaagttaaaaagcattttagaaattctttccaaaagccctgattcctatcagaaaattcttcttgccatatgtgagcaagcagctgaaacaaataatgtttataagaagcacagaattcttaaaatatatcacctgtttgttagtttattactgaaagatataaaaagtggcttaggaggagcttgggcctttgttcttcgagacgttatttatactttgattcactatatcaaccaaaggccttcttgtatcatggatgtgtcattacgtagcttctccctttgttgtgacttattaagtcaggtttgccagacagccgtgacttactgtaaggatgctctagaaaaccatcttcatgttattgttggtacacttataccccttgtgtatgagcaggtggaggttcagaaacaggtattggacttgttgaaatacttagtgatagataacaaggataatgaaaacctctatatcacgattaagcttttagatccttttcctgaccatgttgtttttaaggatttgcgtattactcagcaaaaaatcaaatacagtagaggacccttttcactcttggaggaaattaaccattttctctcagtaagtgtttatgatgcacttccattgacaagacttgaaggactaaaggatcttcgaagacaactggaactacataaagatcagatggtggacattatgagagcttctcaggataatccgcaagatgggattatggtgaaactagttgtcaatttgttgcagttatccaagatggcaataaaccacactggtgaaaaagaagttctagaggctgttggaagctgcttgggagaagtgggtcctatagatttctctaccatagctatacaacatagtaaagatgcatcttataccaaggcccttaagttatttgaagataaagaacttcagtggaccttcataatgctgacctacctgaataacacactggtagaagattgtgtcaaagttcgatcagcagctgttacctgtttgaaaaacattttagccacaaagactggacatagtttctgggagatttataagatgacaacagatccaatgctggcctatctacagccttttagaacatcaagaaaaaagtttttagaagtacccagatttgacaaagaaaacccttttgaaggcctggatgatataaatctgtggattcctctaagtgaaaatcatgacatttggataaagacactgacttgtgcttttttggacagtggaggcacaaaatgtgaaattcttcaattattaaagccaatgtgtgaagtgaaaactgacttttgtcagactgtacttccatacttgattcatgatattttactccaagatacaaatgaatcatggagaaatctgctttctacacatgttcagggatttttcaccagctgtcttcgacacttctcgcaaacgagccgatccacaacccctgcaaacttggattcagaccttcttcaggaacaatttttaatgatgctttctggctggatttaaattatctagaagttgccaaggtagctcagtcttgtgctgctcactttacagctttactctatgcagaaatctatgcagataagaaaagtatggatgatcaagagaaaagaagtcttgcatttgaagaaggaagccagagtacaactatttctagcttgagtgaaaaaagtaaagaagaaactggaataagtttacaggatcttctcttagaaatctacagaagtataggggagccagatagtttgtatggctgtggtggagggaagatgttacaacccattactagactacgaacatatgaacacgaagcaatgtggggcaaagccctagtaacatatgacctcgaaacagcaatcccctcatcaacacgccaggcaggaatcattcaggccttgcagaatttgggactctgccatattctttccgtctatttaaaaggattggattatgaaaataaagactggtgtcctgaactagaagaacttcattaccaagcagcatggaggaatatgcagtgggaccattgcacttccgtcagcaaagaagtagaaggaaccagttaccatgaatcattgtacaatgctctacaatctctaagagacagagaattctctacattttatgaaagtctcaaatatgccagagtaaaagaagtggaagagatgtgtaagcgcagccttgagtctgtgtattcgctctatcccacacttagcaggttgcaggccattggagagctggaaagcattggggagcttttctcaagatcagtcacacatagacaactctctgaagtatatattaagtggcagaaacactcccagcttctcaaggacagtgattttagttttcaggagcctatcatggctctacgcacagtcattttggagatcctgatggaaaaggaaatggacaactcacaaagagaatgtattaaggacattctcaccaaacaccttgtagaactctctatactggccagaactttcaagaacactcagctccctgaaagggcaatatttcaaattaaacagtacaattcagttagctgtggagtctctgagtggcagctggaagaagcacaagtattctgggcaaaaaaggagcagagtcttgccctgagtattctcaagcaaatgatcaagaagttggatgccagctgtgcagcgaacaatcccagcctaaaacttacatacacagaatgtctgagggtttgtggcaactggttagcagaaacgtgcttagaaaatcctgcggtcatcatgcagacctatctagaaaaggcagtagaagttgctggaaattatgatggagaaagtagtgatgagctaagaaatggaaaaatgaaggcatttctctcattagcccggttttcagatactcaataccaaagaattgaaaactacatgaaatcatcggaatttgaaaacaagcaagctctcctgaaaagagccaaagaggaagtaggtctccttagggaacataaaattcagacaaacagatacacagtaaaggttcagcgagagctggagttggatgaattagccctgcgtgcactgaaagaggatcgtaaacgcttcttatgtaaagcagttgaaaattatatcaactgcttattaagtggagaagaacatgatatgtgggtattccgactttgttccctctggcttgaaaattctggagtttctgaagtcaatggcatgatgaagagagacggaatgaagattccaacatataaatttttgcctcttatgtaccaattggctgctagaatggggaccaagatgatgggaggcctaggatttcatgaagtcctcaataatctaatctctagaatttcaatggatcacccccatcacactttgtttattatactggccttagcaaatgcaaacagagatgaatttctgactaaaccagaggtagccagaagaagcagaataactaaaaatgtgcctaaacaaagctctcagcttgatgaggatcgaacagaggctgcaaatagaataatatgtactatcagaagtaggagacctcagatggtcagaagtgttgaggcactttgtgatgcttatattatattagcaaacttagatgccactcagtggaagactcagagaaaaggcataaatattccagcagaccagccaattactaaacttaagaatttagaagatgttgttgtccctactatggaaattaaggtggaccacacaggagaatatggaaatctggtgactatacagtcatttaaagcagaatttcgcttagcaggaggtgtaaatttaccaaaaataatagattgtgtaggttccgatggcaaggagaggagacagcttgttaagggccgtgatgacctgagacaagatgctgtcatgcaacaggtcttccagatgtgtaatacattactgcagagaaacacggaaactaggaagaggaaattaactatctgtacttataaggtggttcccctctctcagcgaagtggtgttcttgaatggtgcacaggaactgtccccattggtgaatttcttgttaacaatgaagatggtgctcataaaagatacaggccaaatgatttcagtgcctttcagtgccaaaagaaaatgatggaggtgcaaaaaaagtcttttgaagagaaatatgaagtcttcatggatgtttgccaaaattttcaaccagttttccgttacttctgcatggaaaaattcttggatccagctatttggtttgagaagcgattggcttatacgcgcagtgtagctacttcttctattgttggttacatacttggacttggtgatagacatgtacagaatatcttgataaatgagcagtcagcagaacttgtacatatagatctaggtgttgcttttgaacagggcaaaatccttcctactcctgagacagttccttttagactcaccagagatattgtggatggcatgggcattacgggtgttgaaggtgtcttcagaagatgctgtgagaaaaccatggaagtgatgagaaactctcaggaaactctgttaaccattgtagaggtccttctatatgatccactctttgactggaccatgaatcctttgaaagctttgtatttacagcagaggccggaagatgaaactgagcttcaccctactctgaatgcagatgaccaagaatgcaaacgaaatctcagtgatattgaccagagtttcaacaaagtagctgaacgtgtcttaatgagactacaagagaaactgaaaggagtggaagaaggcactgtgctcagtgttggtggacaagtgaatttgctcatacagcaggccatagaccccaaaaatctcagccgacttttcccaggatggaaagcttgggtgtgatcttcagtatatgaattaccctttcattcagcctttagaaattatattttagcctttatttttaacctgccaacatactttaagtagggattaatatttaagtgaactattgtgggtttttttgaatgttggttttaatacttgatttaatcaccactcaaaaatgttttgatggtcttaaggaacatctctgctttcactctttagaaataatggtcattcgggctgggcgcagcggctcacgcctgtaatcccagcactttgggaggccgaggtgagcggatcacaaggtcaggagttcgagaccagcctggccaagagaccagcctggccagtatggtgaaaccctgtctctactaaaaatacaaaaattagccgagcatggtggcgggcacctgtaatcccagctactcgagaggctgaggcaggagaatctcttgaacctgggaggtgaaggttgctgtgggccaaaatcatgccattgcactccagcctgggtgacaagagcgaaactccatctcaaaaaaaaaaaaaaaaaacagaaacttatttggatttttcctagtaagatcactcagtgttactaaataatgaagttgttatggagaacaaatttcaaagacacagttagtgtagttactatttttttaagtgtgtattaaaacttctcattctattctctttatcttttaagcccttctgtactgtccatgtatgttatctttctgtgataacttcatagattgccttctagttcatgaattctcttgtcagatgtatataatctcttttaccctatccattgggcttcttctttcagaaattgtttttcatttctaattatgcatcatttttcagatctctgtttcttgatgtcatttttaatgtttttttaatgttttttatgtcactaattattttaaatgtctgtacttgatagacactgtaatagttctattaaatttagttcctgctgtttatatctgttgatttttgtatttgataggctgttcatccagttttgtctttttgaaaagtgagtttattttcagcaaggctttatctatgggaatcttgagtgtctgtttatgtcatattcccagggctgttgctgcacacaagcccattcttattttaatttcttggctttagggtttccatacctgaagtgtagcataaatactgataggagatttcccaggccaaggcaaacacacttcctcctcatctccttgtgctagtgggcagaatatttgattgatgcctttttcactgagagtataagcttccatgtgtcccacctttatggcaggggtggaaggaggtacatttaattcccactgcctgcctttggcaagccctgggttctttgctccccatatagatgtctaagctaaaagccgtgggttaatgagactggcaaattgttccaggacagctacagcatcagctcacatattcacctctctggtttttcattcccctcatttttttctgagacagagtcttgctctgtcacccaggctggagtgcagtggcatgatctcagctcactgaaacctctgcctcctgggttcaagcaattctcctgcctcagcctccngagtagctgggactacaggcgtgtgccaacacgcccggctaattttttgtatttttattagagacggagtttcaccgtgttagccaggatggtctcgatcgcttgacctcgtgatccaccctcctcggcctcccaaagtgctgggattacaggtgtgagccaccgcgcccggcctcattcccctcatttttgaccgtaaggatttcccctttcttgtaagttctgctatgtatttaaaagaatgttttctacattttatccagcatttctctgtgttctgttggaagggaagggcttaggtatctagtttgatacataggtagaagtggaacatttctctgtcccccagctgtcatcatataagataaacatcagataaaaagccacctgaaagtaaaactactgactcgtgtattagtgagtataatctcttctccatccttaggaaaatgttcatcccagctgcggagattaacaaatgggtgattgagctttctcctcgtatttggaccttgaaggttatataaatttttttcttatgaagagttggcatttctttttattgccaatggcaggcactcattcatatttgatctcctcaccttcccctcccctaaaaccaatctccagaactttttggactataaatttcttggtttgacttctggagaactgttcagaatattactttgcatttcaaattacaaacttaccttggtgtatctttttcttacaagctgcctaaatgaatatttggtatatattggtagttttattactatagtaaatcaaggaaatgcagtaaacttaaaatgtctttaagaaagccctgaaatcttcatgggtgaaattagaaattatcaactagataatagtatagataaatgaatttgtagctaattcttgctagttgttgcatccagagagctttgaataacatcattaatctactctttagccttgcatggtatgctatgaggctcctgttctgttcaagtattctaatcaatggctttgaaaagtttatcaaatttacatacagatcacaagcctaggagaaataactaattcacagatgacagaattaagattataaaagattttttttttgtaattttagtagagacagggttgccattgtattccagccttggcgacagagcaagactctgcctcaaaaaaaaaaaaaaaaaggttttggcaagctggaactctttctgcaaatgactaagatagaaaactgccaaggacaaatgaggagtagttagattttgaaaatattaatcatagaatagttgttgtatgctaagtcactgacccatattatgtacagcatttctgatctttactttgcaagattagtgatactatcccaatacactgctggagaaatcagaatttggagaaataagttgtccaaggcaagaagatagtaaattataagtacaagtgtaatatggacagtatctaacttgaaaagatttcaggcgaaaagaatctggggtttgccagtcagttgctcaaaaggtcaatgaaaaccaaatagtgaagctatcagagaagctaataaattatagactgcttgaacagttgtgtccagattaagggagataatagctttcccaccctactttgtgcaggtcatacctccccaaagtgtttacctaatcagtaggttcacaaactcttggtcattatagtatatgcctaaaatgtatgcacttaggaatgctaaaaatttaaatatggtctaaagcaaataaaagcaaagaggaaaaactttggacatcgtaaagactagaatagtcttttaaaaagaaagccagtatattggtttgaaatatagagatgtgtcccaatttcaagtattttaattgcaccttaatgaaattatctattttctatagattttagtactattgaatgtattactttactgttacctgaatttattataaagtgtttttgaataaataattctaaaagca

SEQ ID NO: 279234 - DNA, 9273 bp, Homo sapiens
  misc_feature (340)..(340): n is a, c, g, or t
  misc_feature (2393)..(2393): n is a, c, g, or t
  misc_feature (2983)..(2983): n is a, c, g, or t
  misc_feature (6974)..(6974): n is a, c, g, or t
ccgcgtccgcgcttacccaatacaagccgggctacgtccgagggtaacaacatgatcaaaaccacagcaggaaccacaataaggaacaagactcaggttaaagcaaacacagcgacagctcctgcgccgcatctcctggttccagtggcggcactgaactcgcggcaatttgtcccgcctctttcgcttcacggcagccaatcgcttccgccagagaaagaaaggcgccgaaatgaaacccgcctccgttcgccttcggaactgtcgtcacttccgtcctcagacttggaggggcggggatgaggagggcggggaggacgacgagggcgaagagggtggntgagagccccggagcccgagccgaagggcgagccgcaaacgctaagtcgctggccattggtggacatggcgcaggcgcgtttgctccgacgggccgaatgttttggggcagtgttttgagcgcggagaccgcgtgatactggatgcgcatgggcataccgtgctctgcggctgcttggcgttgcttcttcctccagaagtgggcgctgggcagtcacgcagggtttgaaccggaagcgggagtaggtagctgcgtggctaacggagaaaagaagccgtggccacgggaggaggcgagaggagtcgggatctgcgctgcagccaccgccgcggttgatactactttgaccttccgagtgcagtgacagtgatgtgtgttctgaaattgtgaaccatgagtctagtacttaatgatctgcttatctgctgccgtcaactagaacatgatagagctacagaacgaaagaaagaagttgagaaatttaagcgcctgattcgagatcctgaaacaattaaacatctagatcggcattcagattccaaacaaggaaaatatttgaattgggatgctgtttttagatttttacagaaatatattcagaaagaaacagaatgtctgagaatagcaaaaccaaatgtatcagcctcaacacaagcctccaggcagaaaaagatgcaggaaatcagtagtttggtcaaatacttcatcaaatgtgcaaacagaagagcacctaggctaaaatgtcaagaactcttaaattatatcatggatacagtgaaagattcatctaatggtgctatttacggagctgattgtagcaacatactactcaaagacattctttctgtgagaaaatactggtgtgaaatatctcagcaacagtggttagaattgttctctgtgtacttcaggctctatctgaaaccttcacaagatgttcatagagttttagtggctagaataattcatgctgttaccaaaggatgctgttctcagactgacggattaaattccaaatttttggactttttttccaaggctattcagtgtgcgagacaagaaaagagctcttcaggtctaaatcatatcttagcagctcttactatcttcctcaagactttggctgtcaactttcgaattcgagtgtgtgaattaggagatgaaattcttcccactttgctttatatttggactcaacataggcttaatgattctttaaaagaagtcattattgaattatttcaactgcaaatttatatccatcatccgaaaggagccaaaacccaagaaaaaggtgcttatgaatcaacaaaatggagaagtattttatacaacttatatgatctgctagtgaatgagataagtcatataggaagtagaggaaagtattcttcaggatttcgtaatattgccgtcaaagaaaatttgattgaattgatggcagatatctgtcaccaggtttttaatgaagataccagatccttggagatttctcaatcttacactactacacaaagagaatctagtgattacagtgtcccttgcaaaaggaagaaaatagaactaggctgggaagtaataaaagatcaccttcagaagtcacagaatgattttgatcttgtgccttggctacagattgcaacccaattaatatcaaagtatcctgcaagtttacctaactgtgagctgtctccattactgatgatactatctcagcttctaccccaacagcgacatggggaacgtacaccatatgtgttacgatgccttacggaagttgcattgtgtcaagacaagaggtcaaacctagaaagctcacaaaagtcagatttattaaaactctggaataaaatttggtgtattacctttcgtggtataagttctgagcaaatacaagctgaaaactttggcttacttggagccataattcagggtagtttagttgaggttgacagagaattctggaagttatttactgggtcagcctgcagaccttcatgtcctgcagtatgctgtttgactttggcactgaccaccagtatagttccaggancggtaaaaatgggaatagagcaaaatatgtgtgaagtaaatagaagcttttctttaaaggaatcaataatgaaatggctcttattctatcagttagagggtgacttagaaaatagcacagaagtgcctccaattcttcacagtaattttcctcatcttgtactggagaaaattcttgtgagtctcactatgaaaaactgtaaagctgcaatgaattttttccaaagcgtgccagaatgtgaacaccaccaaaaagataaagaagaactttcattctcagaagtagaagaactatttcttcagacaacttttgacaagatggactttttaaccattgtgagagaatgtggtatagaaaagcaccagtccagtattggcttctctgtccaccagaatctcaaggaatcactggatcgctgtcttctgggattatcagaacagcttctgaataattactcatctgagattacaaattcagaaactcttgtccggtgttcacgtcttttggtgggtgtccttggctgctactgttacatgggtgtaatagctgaagaggaagcatataagtcagaattattccagaaagccaantctctaatgcaatgtgcaggagaaagtatcactctgtttaaaaataagacaaatgaggaattcagaattggttccttgagaaatatgatgcagctatgtacacgttgcttgagcaactgtaccaagaagagtccaaataagattgcatctggctttttcctgcgattgttaacatcaaagctaatgaatgacattgcagatatttgtaaaagtttagcatccttcatcaaaaagccatttgaccgtggagaagtagaatcaatggaagatgatactaatggaaatctaatggaggtggaggatcagtcatccatgaatctatttaacgattaccctgatagtagtgttagtgatgcaaacgaacctggagagagccaaagtaccataggtgccattaatcctttagctgaagaatatctgtcaaagcaagatctacttttcttagacatgctcaagttcttgtgtttgtgtgtaactactgctcagaccaatactgtgtcctttagggcagctgatattcggaggaaattgttaatgttaattgattctagcacgctagaacctaccaaatccctccacctgcatatgtatctaatgcttttaaaggagcttcctggagaagagtaccccttgccaatggaagatgttcttgaacttctgaaaccactatccaatgtgtgttctttgtatcgtcgtgaccaagatgtttgtaaaactattttaaaccatgtccttcatgtagtgaaaaacctaggtcaaagcaatatggactctgagaacacaagggatgctcaaggacagtttcttacagtaattggagcattttggcatctaacaaaggagaggaaatatatattctctgtaagaatggccctagtaaattgccttaaaactttgcttgaggctgatccttattcaaaatgggccattcttaatgtaatgggaaaagactttcctgtaaatgaagtatttacacaatttcttgctgacaatcatcaccaagttcgcatgttggctgcagagtcaatcaatagattgttccaggacacgaagggagattcttccaggttactgaaagcacttcctttgaagcttcagcaaacagcttttgaaaatgcatacttgaaagctcaggaaggaatgagagaaatgtcccatagtgctgagaaccctgaaactttggatgaaatttataatagaaaatctgttttactgacgttgatagctgtggttttatcctgtagccctatctgcgaaaaacaggctttgtttgccctgtgtaaatctgtgaaagagaatggattagaacctcaccttgtgaaaaaggttttagagaaagtttctgaaacttttggatatagacgtttagaagactttatggcatctcatttagattatctggttttggaatggctaaatcttcaagatactgaatacaacttatcttcttttccttttattttattaaactacacaaatattgaggatttctatagatcttgttataaggttttgattccacatctggtgattagaagtcattttgatgaggtgaagtccattgctaatcagattcaagaggactggaaaagtcttctaacagactgctttccaaagattcttgtaaatattcttccttattttgcctatgagggtaccagagacagtgggatggcacagcaaagagagactgctaccaaggtctatgatatgcttaaaagtgaaaacttattgggaaaacagattgatcacttattcattagtaatttaccagagattgtggtggagttattgatgacgttacatgagccagcaaattctagtgccagtcagagcactgacctctgtgacttttcaggggatttggatcctgctcctaatccacctcattttccatcgcatgtgattaaagcaacatttgcctatatcagcaattgtcataaaaccaagttaaaaagcattttagaaattctttccaaaagccctgattcctatcagaaaattcttcttgccatatgtgagcaagcagctgaaacaaataatgtttataagaagcacagaattcttaaaatatatcacctgtttgttagtttattactgaaagatataaaaagtggcttaggaggagcttgggcctttgttcttcgagacgttatttatactttgattcactatatcaaccaaaggaaattaaccattttctctcagtaagtgtttatgatgcacttccattgacaagacttgaaggactaaaggatcttcgaagacaactggaactacataaagatcagatggtggacattatgagagcttctcagggtgctaattttaaatgacatgggctatttctacctgtttctttttgaaagaatattttgcaaagtcttgctcttggtttcattgtcacagacttagttcagactctcatcatttagttcagaccctcatttctcatctaactgtaaaactggtcctaactggtcttctcaccctgaactcttcctgttttattcatcctctgccagatgatttctctaaacccaaatatgatcatgtttttctactgcctaaattttttttttaagagacagagtttttttttttttttaagagtctcactctgtcacctaggctggagtgtagtggcaccatcataacttactatgaccttgaattcctgggtacaaggaattctcctgtctcagccttctgaatagctggaacaacaggcacacaccactacacctagctactttatttattttttttattttttgtagggacaggggtcccactatgttgcctaggttggtctcgaattcttggcctcaagtgatcctcctgccttagcctcacaaagcattgggattagaggtgtgacctgggtgacaagagcgaaactccatctcaaaaaaaaaaaaaaaaaacagaaacttatttggatttttcctagtaagatcactcagtgttactaaataatgaagttgttatggagaacaaatttcaaagacacagttagtgtagttactatttttttaagtgtgtattaaaacttctcattctattctctttatcttttaagcccttctgtactgtccatgtatgttatctttctgtgataacttcatagattgccttctagttcatgaattctcttgtcagatgtatataatctcttttaccctatccattgggcttcttctttcagaaattgtttttcatttctaattatgcatcatttttcagatctctgtttcttgatgtcatttttaatgtttttttaatgttttttatgtcactaattattttaaatgtctgtacttgatagacactgtaatagttctattaaatttagttcctgctgtttatatctgttgatttttgtatttgataggctgttcatccagttttgtctttttgaaaagtgagtttattttcagcaaggctttatctatgggaatcttgagtgtctgtttatgtcatattcccagggctgttgctgcacacaagcccattcttattttaatttcttggctttagggtttccatacctgaagtgtagcataaatactgataggagatttcccaggccaaggcaaacacacttcctcctcatctccttgtgctagtgggcagaatatttgattgatgcctttttcactgagagtataagcttccatgtgtcccacctttatggcaggggtggaaggaggtacatttaattcccactgcctgcctttggcaagccctgggttctttgctccccatatagatgtctaagctaaaagccgtgggttaatgagactggcaaattgttccaggacagctacagcatcagctcacatattcacctctctggtttttcattcccctcatttttttctgagacagagtcttgctctgtcacccaggctggagtgcagtggcatgatctcagctcactgaaacctctgcctcctgggttcaagcaattctcctgcctcagcctccngagtagctgggactacaggcgtgtgccaacacgcccggctaattttttgtatttttattagagacggagtttcaccgtgttagccaggatggtctcgatcgcttgacctcgtgatccaccctcctcggcctcccaaagtgctgggattacaggtgtgagccaccgcgcccggcctcattcccctcatttttgaccgtaaggatttcccctttcttgtaagttctgctatgtatttaaaagaatgttttctacattttatccagcatttctctgtgttctgttggaagggaagggcttaggtatctagtttgatacataggtagaagtggaacatttctctgtcccccagctgtcatcatataagataaacatcagataaaaagccacctgaaagtaaaactactgactcgtgtattagtgagtataatctcttctccatccttaggaaaatgttcatcccagctgcggagattaacaaatgggtgattgagctttctcctcgtatttggaccttgaaggttatataaatttttttcttatgaagagttggcatttctttttattgccaatggcaggcactcattcatatttgatctcctcaccttcccctcccctaaaaccaatctccagaactttttggactataaatttcttggtttgacttctggagaactgttcagaatattactttgcatttcaaattacaaacttaccttggtgtatctttttcttacaagctgcctaaatgaatatttggtatatattggtagttttattactatagtaaatcaaggaaatgcagtaaacttaaaatgtctttaagaaagccctgaaatcttcatgggtgaaattagaaattatcaactagataatagtatagataaatgaatttgtagctaattcttgctagttgttgcatccagagagctttgaataacatcattaatctactctttagccttgcatggtatgctatgaggctcctgttctgttcaagtattctaatcaatggctttgaaaagtttatcaaatttacatacagatcacaagcctaggagaaataactaattcacagatgacagaattaagattataaaagattttttttttgtaattttagtagagacagggttgccattgtattccagccttggcgacagagcaagactctgcctcaaaaaaaaaaaaaaaaaggttttggcaagctggaactctttctgcaaatgactaagatagaaaactgccaaggacaaatgaggagtagttagattttgaaaatattaatcatagaatagttgttgtatgctaagtcactgacccatattatgtacagcatttctgatctttactttgcaagattagtgatactatcccaatacactgctggagaaatcagaatttggagaaataagttgtccaaggcaagaagatagtaaattataagtacaagtgtaatatggacagtatctaacttgaaaagatttcaggcgaaaagaatctggggtttgccagtcagttgctcaaaaggtcaatgaaaaccaaatagtgaagctatcagagaagctaataaattatagactgcttgaacagttgtgtccagattaagggagataatagctttcccaccctactttgtgcaggtcatacctccccaaagtgtttacctaatcagtaggttcacaaactcttggtcattatagtatatgcctaaaatgtatgcacttaggaatgctaaaaatttaaatatggtctaaagcaaataaaagcaaagaggaaaaactttggacatcgtaaagactagaatagtcttttaaaaagaaagccagtatattggtttgaaatatagagatgtgtcccaatttcaagtattttaattgcaccttaatgaaattatctattttctatagattttagtactattgaatgtattactttactgttacctgaatttattataaagtgtttttgaataaataattctaaaagcatatactaagactcattcactttattcaaatatttgtgtgttctgtgtgccaggcatgggactcgttctaaggagaaagcagtgagcaaggcaggcatagtctgcctatataaagctcccaatctgaggaggataggcaactgaccacgcagtgtgaaccggggagcctattgcacaaccagtctgataatgctgcatctcagtctaaatatcctagtagtgtttcttagtcgcctcctgacaaaaaggcaaatatgaatgttctttctttgggcctagaaagtgatctagttgacatttctagcctaaaag

SEQ ID NO: 279235 - DNA, 5608 bp, Homo sapiens
  misc_feature (3620)..(3620): n is a, c, g, or t
tggggaaaagcaattacttcattttattgtacactgacttctcaggaatcaagatcacagtcacactcagatcacatttgtcttccttagattttttggaatataaacagtaagtattctagttctgaatccagtttaatttaggaccaaatattttgatttaccaatgcattaatctagagtacccattagaaagaccttcagataagaaaagaaatgaaggaaaacaatatagttagtgaagttttgttaaccacttgtgctaatagaggagcactgtcttaaaataacttacttgcttagatgtgagaatatttgaaataccttgtttcttaattttgtgtcttttttttaatggtagagagacggaatgaagattccaacatataaatttttgcctcttatgtaccaattggctgctagaatggggaccaagatgatgggaggcctaggatttcatgaagtcctcaataatctaatctctagaatttcaatggatcacccccatcacactttgtttattatactggccttagcaaatgcaaacagagatgaatttctgactaaaccagaggtagccagaagaagcagaataactaaaaatgtgcctaaacaaagctctcagcttgatgaggatcgaacagaggctgcaaatagaataatatgtactatcagaagtaggagacctcagatggtcagaagtgttgaggcactttgtgatgcttatattatattagcaaacttagatgccactcagtggaagactcagagaaaaggcataaatattccagcagaccagccaattactaaacttaagaatttagaagatgttgttgtccctactatggaaattaaggtggaccacacaggagaatatggaaatctggtgactatacagtcatttaaagcagaatttcgcttagcaggaggtgtaaatttaccaaaaataatagattgtgtaggttccgatggcaaggagaggagacagcttgttaagggccgtgatgacctgagacaagatgctgtcatgcaacaggtcttccagatgtgtaatacattactgcagagaaacacggaaactaggaagaggaaattaactatctgtacttataaggtggttcccctctctcagcgaagtggtgttcttgaatggtgcacaggaactgtccccattggtgaatttcttgttaacaatgaagatggtgctcataaaagatacaggccaaatgatttcagtgcctttcagtgccaaaagaaaatgatggaggtgcaaaaaaagtcttttgaagagaaatatgaagtcttcatggatgtttgccaaaattttcaaccagttttccgttacttctgcatggaaaaattcttggatccagctatttggtttgagaagcgattggcttatacgcgcagtgtagctacttcttctattgttggttacatacttggacttggtgatagacatgtacagaatatcttgataaatgagcagtcagcagaacttgtacatatagatctaggtgttgcttttgaacagggcaaaatccttcctactcctgagacagttccttttagactcaccagagatattgtggatggcatgggcattacgggtgttgaaggtgtcttcagaagatgctgtgagaaaaccatggaagtgatgagaaactctcaggaaactctgttaaccattgtagaggtccttctatatgatccactctttgactggaccatgaatcctttgaaagctttgtatttacagcagaggccggaagatgaaactgagcttcaccctactctgaatgcagatgaccaagaatgcaaacgaaatctcagtgatattgaccagagtttcaacaaagtagctgaacgtgtcttaatgagactacaagagaaactgaaaggagtggaagaaggcactgtgctcagtgttggtggacaagtgaatttgctcatacagcaggccatagaccccaaaaatctcagccgacttttcccaggatggaaagcttgggtgtgatcttcagtatatgaattaccctttcattcagcctttagaaattatattttagcctttatttttaacctgccaacatactttaagtagggattaatatttaagtgaactattgtgggtttttttgaatgttggttttaatacttgatttaatcaccactcaaaaatgttttgatggtcttaaggaacatctctgctttcactctttagaaataatggtcattcgggctgggcgcagcggctcacgcctgtaatcccagcactttgggaggccgaggtgagcggatcacaaggtcaggagttcgagaccagcctggccaagagaccagcctggccagtatggtgaaaccctgtctctactaaaaatacaaaaattagccgagcatggtggcgggcacctgtaatcccagctactcgagaggctgaggcaggagaatctcttgaacctgggaggtgaaggttgctgtgggccaaaatcatgccattgcactccagcctgggtgacaagagcgaaactccatctcaaaaaaaaaaaaaaaaaacagaaacttatttggatttttcctagtaagatcactcagtgttactaaataatgaagttgttatggagaacaaatttcaaagacacagttagtgtagttactatttttttaagtgtgtattaaaacttctcattctattctctttatcttttaagcccttctgtactgtccatgtatgttatctttctgtgataacttcatagattgccttctagttcatgaattctcttgtcagatgtatataatctcttttaccctatccattgggcttcttctttcagaaattgtttttcatttctaattatgcatcatttttcagatctctgtttcttgatgtcatttttaatgtttttttaatgttttttatgtcactaattattttaaatgtctgtacttgatagacactgtaatagttctattaaatttagttcctgctgtttatatctgttgatttttgtatttgataggctgttcatccagttttgtctttttgaaaagtgagtttattttcagcaaggctttatctatgggaatcttgagtgtctgtttatgtcatattcccagggctgttgctgcacacaagcccattcttattttaatttcttggctttagggtttccatacctgaagtgtagcataaatactgataggagatttcccaggccaaggcaaacacacttcctcctcatctccttgtgctagtgggcagaatatttgattgatgcctttttcactgagagtataagcttccatgtgtcccacctttatggcaggggtggaaggaggtacatttaattcccactgcctgcctttggcaagccctgggttctttgctccccatatagatgtctaagctaaaagccgtgggttaatgagactggcaaattgttccaggacagctacagcatcagctcacatattcacctctctggtttttcattcccctcatttttttctgagacagagtcttgctctgtcacccaggctggagtgcagtggcatgatctcagctcactgaaacctctgcctcctgggttcaagcaattctcctgcctcagcctccngagtagctgggactacaggcgtgtgccaacacgcccggctaattttttgtatttttattagagacggagtttcaccgtgttagccaggatggtctcgatcgcttgacctcgtgatccaccctcctcggcctcccaaagtgctgggattacaggtgtgagccaccgcgcccggcctcattcccctcatttttgaccgtaaggatttcccctttcttgtaagttctgctatgtatttaaaagaatgttttctacattttatccagcatttctctgtgttctgttggaagggaagggcttaggtatctagtttgatacataggtagaagtggaacatttctctgtcccccagctgtcatcatataagataaacatcagataaaaagccacctgaaagtaaaactactgactcgtgtattagtgagtataatctcttctccatccttaggaaaatgttcatcccagctgcggagattaacaaatgggtgattgagctttctcctcgtatttggaccttgaaggttatataaatttttttcttatgaagagttggcatttctttttattgccaatggcaggcactcattcatatttgatctcctcaccttcccctcccctaaaaccaatctccagaactttttggactataaatttcttggtttgacttctggagaactgttcagaatattactttgcatttcaaattacaaacttaccttggtgtatctttttcttacaagctgcctaaatgaatatttggtatatattggtagttttattactatagtaaatcaaggaaatgcagtaaacttaaaatgtctttaagaaagccctgaaatcttcatgggtgaaattagaaattatcaactagataatagtatagataaatgaatttgtagctaattcttgctagttgttgcatccagagagctttgaataacatcattaatctactctttagccttgcatggtatgctatgaggctcctgttctgttcaagtattctaatcaatggctttgaaaagtttatcaaatttacatacagatcacaagcctaggagaaataactaattcacagatgacagaattaagattataaaagattttttttttgtaattttagtagagacagggttgccattgtattccagccttggcgacagagcaagactctgcctcaaaaaaaaaaaaaaaaaggttttggcaagctggaactctttctgcaaatgactaagatagaaaactgccaaggacaaatgaggagtagttagattttgaaaatattaatcatagaatagttgttgtatgctaagtcactgacccatattatgtacagcatttctgatctttactttgcaagattagtgatactatcccaatacactgctggagaaatcagaatttggagaaataagttgtccaaggcaagaagatagtaaattataagtacaagtgtaatatggacagtatctaacttgaaaagatttcaggcgaaaagaatctggggtttgccagtcagttgctcaaaaggtcaatgaaaaccaaatagtgaagctatcagagaagctaataaattatagactgcttgaacagttgtgtccagattaagggagataatagctttcccaccctactttgtgcaggtcatacctccccaaagtgtttacctaatcagtaggttcacaaactcttggtcattatagtatatgcctaaaatgtatgcacttaggaatgctaaaaatttaaatatggtctaaagcaaataaaagcaaagaggaaaaactttggacatcgtaaagactagaatagtcttttaaaaagaaagccagtatattggtttgaaatatagagatgtgtcccaatttcaagtattttaattgcaccttaatgaaattatctattttctatagattttagtactattgaatgtattactttactgttacctgaatttattataaagtgtttttgaataaataattctaaaagca

SEQ ID NO: 279236 - DNA, 6235 bp, Homo sapiens
  misc_feature (340)..(340): n is a, c, g, or t
  misc_feature (2393)..(2393): n is a, c, g, or t
  misc_feature (2983)..(2983): n is a, c, g, or t
ccgcgtccgcgcttacccaatacaagccgggctacgtccgagggtaacaacatgatcaaaaccacagcaggaaccacaataaggaacaagactcaggttaaagcaaacacagcgacagctcctgcgccgcatctcctggttccagtggcggcactgaactcgcggcaatttgtcccgcctctttcgcttcacggcagccaatcgcttccgccagagaaagaaaggcgccgaaatgaaacccgcctccgttcgccttcggaactgtcgtcacttccgtcctcagacttggaggggcggggatgaggagggcggggaggacgacgagggcgaagagggtggntgagagccccggagcccgagccgaagggcgagccgcaaacgctaagtcgctggccattggtggacatggcgcaggcgcgtttgctccgacgggccgaatgttttggggcagtgttttgagcgcggagaccgcgtgatactggatgcgcatgggcataccgtgctctgcggctgcttggcgttgcttcttcctccagaagtgggcgctgggcagtcacgcagggtttgaaccggaagcgggagtaggtagctgcgtggctaacggagaaaagaagccgtggccacgggaggaggcgagaggagtcgggatctgcgctgcagccaccgccgcggttgatactactttgaccttccgagtgcagtgacagtgatgtgtgttctgaaattgtgaaccatgagtctagtacttaatgatctgcttatctgctgccgtcaactagaacatgatagagctacagaacgaaagaaagaagttgagaaatttaagcgcctgattcgagatcctgaaacaattaaacatctagatcggcattcagattccaaacaaggaaaatatttgaattgggatgctgtttttagatttttacagaaatatattcagaaagaaacagaatgtctgagaatagcaaaaccaaatgtatcagcctcaacacaagcctccaggcagaaaaagatgcaggaaatcagtagtttggtcaaatacttcatcaaatgtgcaaacagaagagcacctaggctaaaatgtcaagaactcttaaattatatcatggatacagtgaaagattcatctaatggtgctatttacggagctgattgtagcaacatactactcaaagacattctttctgtgagaaaatactggtgtgaaatatctcagcaacagtggttagaattgttctctgtgtacttcaggctctatctgaaaccttcacaagatgttcatagagttttagtggctagaataattcatgctgttaccaaaggatgctgttctcagactgacggattaaattccaaatttttggactttttttccaaggctattcagtgtgcgagacaagaaaagagctcttcaggtctaaatcatatcttagcagctcttactatcttcctcaagactttggctgtcaactttcgaattcgagtgtgtgaattaggagatgaaattcttcccactttgctttatatttggactcaacataggcttaatgattctttaaaagaagtcattattgaattatttcaactgcaaatttatatccatcatccgaaaggagccaaaacccaagaaaaaggtgcttatgaatcaacaaaatggagaagtattttatacaacttatatgatctgctagtgaatgagataagtcatataggaagtagaggaaagtattcttcaggatttcgtaatattgccgtcaaagaaaatttgattgaattgatggcagatatctgtcaccaggtttttaatgaagataccagatccttggagatttctcaatcttacactactacacaaagagaatctagtgattacagtgtcccttgcaaaaggaagaaaatagaactaggctgggaagtaataaaagatcaccttcagaagtcacagaatgattttgatcttgtgccttggctacagattgcaacccaattaatatcaaagtatcctgcaagtttacctaactgtgagctgtctccattactgatgatactatctcagcttctaccccaacagcgacatggggaacgtacaccatatgtgttacgatgccttacggaagttgcattgtgtcaagacaagaggtcaaacctagaaagctcacaaaagtcagatttattaaaactctggaataaaatttggtgtattacctttcgtggtataagttctgagcaaatacaagctgaaaactttggcttacttggagccataattcagggtagtttagttgaggttgacagagaattctggaagttatttactgggtcagcctgcagaccttcatgtcctgcagtatgctgtttgactttggcactgaccaccagtatagttccaggancggtaaaaatgggaatagagcaaaatatgtgtgaagtaaatagaagcttttctttaaaggaatcaataatgaaatggctcttattctatcagttagagggtgacttagaaaatagcacagaagtgcctccaattcttcacagtaattttcctcatcttgtactggagaaaattcttgtgagtctcactatgaaaaactgtaaagctgcaatgaattttttccaaagcgtgccagaatgtgaacaccaccaaaaagataaagaagaactttcattctcagaagtagaagaactatttcttcagacaacttttgacaagatggactttttaaccattgtgagagaatgtggtatagaaaagcaccagtccagtattggcttctctgtccaccagaatctcaaggaatcactggatcgctgtcttctgggattatcagaacagcttctgaataattactcatctgagattacaaattcagaaactcttgtccggtgttcacgtcttttggtgggtgtccttggctgctactgttacatgggtgtaatagctgaagaggaagcatataagtcagaattattccagaaagccaantctctaatgcaatgtgcaggagaaagtatcactctgtttaaaaataagacaaatgaggaattcagaattggttccttgagaaatatgatgcagctatgtacacgttgcttgagcaactgtaccaagaagagtccaaataagattgcatctggctttttcctgcgattgttaacatcaaagctaatgaatgacattgcagatatttgtaaaagtttagcatccttcatcaaaaagccatttgaccgtggagaagtagaatcaatggaagatgatactaatggaaatctaatggaggtggaggatcagtcatccatgaatctatttaacgattaccctgatagtagtgttagtgatgcaaacgaacctggagagagccaaagtaccataggtgccattaatcctttagctgaagaatatctgtcaaagcaagatctacttttcttagacatgctcaagttcttgtgtttgtgtgtaactactgctcagaccaatactgtgtcctttagggcagctgatattcggaggaaattgttaatgttaattgattctagcacgctagaacctaccaaatccctccacctgcatatgtatctaatgcttttaaaggagcttcctggagaagagtaccccttgccaatggaagatgttcttgaacttctgaaaccactatccaatgtgtgttctttgtatcgtcgtgaccaagatgtttgtaaaactattttaaaccatgtccttcatgtagtgaaaaacctaggtcaaagcaatatggactctgagaacacaagggatgctcaaggacagtttcttacagtaattggagcattttggcatctaacaaaggagaggaaatatatattctctgtaagaatggccctagtaaattgccttaaaactttgcttgaggctgatccttattcaaaatgggccattcttaatgtaatgggaaaagactttcctgtaaatgaagtatttacacaatttcttgctgacaatcatcaccaagttcgcatgttggctgcagagtcaatcaatagattgttccaggacacgaagggagattcttccaggttactgaaagcacttcctttgaagcttcagcaaacagcttttgaaaatgcatacttgaaagctcaggaaggaatgagagaaatgtcccatagtgctgagaaccctgaaactttggatgaaatttataatagaaaatctgttttactgacgttgatagctgtggttttatcctgtagccctatctgcgaaaaacaggctttgtttgccctgtgtaaatctgtgaaagagaatggattagaacctcaccttgtgaaaaaggttttagagaaagtttctgaaacttttggatatagacgtttagaagactttatggcatctcatttagattatctggttttggaatggctaaatcttcaagatactgaatacaacttatcttcttttccttttattttattaaactacacaaatattgaggatttctatagatcttgttataaggttttgattccacatctggtgattagaagtcattttgatgaggtgaagtccattgctaatcagattcaagaggactggaaaagtcttctaacagactgctttccaaagattcttgtaaatattcttccttattttgcctatgagggtaccagagacagtgggatggcacagcaaagagagactgctaccaaggtctatgatatgcttaaaagtgaaaacttattgggaaaacagattgatcacttattcattagtaatttaccagagattgtggtggagttattgatgacgttacatgagccagcaaattctagtgccagtcagagcactgacctctgtgacttttcaggggatttggatcctgctcctaatccacctcattttccatcgcatgtgattaaagcaacatttgcctatatcagcaattgtcataaaaccaagttaaaaagcattttagaaattctttccaaaagccctgattcctatcagaaaattcttcttgccatatgtgagcaagcagctgaaacaaataatgtttataagaagcacagaattcttaaaatatatcacctgtttgttagtttattactgaaagatataaaaagtggcttaggaggagcttgggcctttgttcttcgagacgttatttatactttgattcactatatcaaccaaaggaaattaaccattttctctcagtaagtgtttatgatgcacttccattgacaagacttgaaggactaaaggatcttcgaagacaactggaactacataaagatcagatggtggacattatgagagcttctcagggtgctaattttaaatgacatgggctatttctacctgtttctttttgaaagaatattttgcaaagtcttgctcttggtttcattgtcacagacttagttcagactctcatcatttagttcagaccctcatttctcatctaactgtaaaactggtcctaactggtcttctcaccctgaactcttcctgttttattcatcctctgccagatgatttctctaaacccaaatatgatcatgtttttctactgcctaaattttttttttaagagacagagtttttttttttttttaagagtctcactctgtcacctaggctggagtgtagtggcaccatcataacttactatgaccttgaattcctgggtacaaggaattctcctgtctcagccttctgaatagctggaacaacaggcacacaccactacacctagctactttatttattttttttattttttgtagggacaggggtcccactatgttgcctaggttggtctcgaattcttggcctcaagtgatcctcctgccttagcctcacaaagcattgggattagaggtgtgagccacggcatctagccatgcttaaacatttttcatttctttttctttttttttaagacggagtttcgctcttgttgcccaggctggaatgcagtggcactatcttagctcactgcaacctccacctcctgagctcagattctcgtgcctcagccttcctagtagctaggattacaggcacctgccaccatgcctggctaattttttgtattttttttagtagagacggggtttcaccatgttggccagggtggtctcaaactcctgagctcaggcaatccgcccacctcagcctcccaaagtgctgggattacaggcatgagccaccgcggctggcccatgcttaaacatttttaacaccttccaaccatgt

SEQ ID NO: 279237 - DNA, 7584 bp, Homo sapiens
  misc_feature (340)..(340): n is a, c, g, or t
  misc_feature (2393)..(2393): n is a, c, g, or t
  misc_feature (2983)..(2983): n is a, c, g, or t
ccgcgtccgcgcttacccaatacaagccgggctacgtccgagggtaacaacatgatcaaaaccacagcaggaaccacaataaggaacaagactcaggttaaagcaaacacagcgacagctcctgcgccgcatctcctggttccagtggcggcactgaactcgcggcaatttgtcccgcctctttcgcttcacggcagccaatcgcttccgccagagaaagaaaggcgccgaaatgaaacccgcctccgttcgccttcggaactgtcgtcacttccgtcctcagacttggaggggcggggatgaggagggcggggaggacgacgagggcgaagagggtggntgagagccccggagcccgagccgaagggcgagccgcaaacgctaagtcgctggccattggtggacatggcgcaggcgcgtttgctccgacgggccgaatgttttggggcagtgttttgagcgcggagaccgcgtgatactggatgcgcatgggcataccgtgctctgcggctgcttggcgttgcttcttcctccagaagtgggcgctgggcagtcacgcagggtttgaaccggaagcgggagtaggtagctgcgtggctaacggagaaaagaagccgtggccacgggaggaggcgagaggagtcgggatctgcgctgcagccaccgccgcggttgatactactttgaccttccgagtgcagtgacagtgatgtgtgttctgaaattgtgaaccatgagtctagtacttaatgatctgcttatctgctgccgtcaactagaacatgatagagctacagaacgaaagaaagaagttgagaaatttaagcgcctgattcgagatcctgaaacaattaaacatctagatcggcattcagattccaaacaaggaaaatatttgaattgggatgctgtttttagatttttacagaaatatattcagaaagaaacagaatgtctgagaatagcaaaaccaaatgtatcagcctcaacacaagcctccaggcagaaaaagatgcaggaaatcagtagtttggtcaaatacttcatcaaatgtgcaaacagaagagcacctaggctaaaatgtcaagaactcttaaattatatcatggatacagtgaaagattcatctaatggtgctatttacggagctgattgtagcaacatactactcaaagacattctttctgtgagaaaatactggtgtgaaatatctcagcaacagtggttagaattgttctctgtgtacttcaggctctatctgaaaccttcacaagatgttcatagagttttagtggctagaataattcatgctgttaccaaaggatgctgttctcagactgacggattaaattccaaatttttggactttttttccaaggctattcagtgtgcgagacaagaaaagagctcttcaggtctaaatcatatcttagcagctcttactatcttcctcaagactttggctgtcaactttcgaattcgagtgtgtgaattaggagatgaaattcttcccactttgctttatatttggactcaacataggcttaatgattctttaaaagaagtcattattgaattatttcaactgcaaatttatatccatcatccgaaaggagccaaaacccaagaaaaaggtgcttatgaatcaacaaaatggagaagtattttatacaacttatatgatctgctagtgaatgagataagtcatataggaagtagaggaaagtattcttcaggatttcgtaatattgccgtcaaagaaaatttgattgaattgatggcagatatctgtcaccaggtttttaatgaagataccagatccttggagatttctcaatcttacactactacacaaagagaatctagtgattacagtgtcccttgcaaaaggaagaaaatagaactaggctgggaagtaataaaagatcaccttcagaagtcacagaatgattttgatcttgtgccttggctacagattgcaacccaattaatatcaaagtatcctgcaagtttacctaactgtgagctgtctccattactgatgatactatctcagcttctaccccaacagcgacatggggaacgtacaccatatgtgttacgatgccttacggaagttgcattgtgtcaagacaagaggtcaaacctagaaagctcacaaaagtcagatttattaaaactctggaataaaatttggtgtattacctttcgtggtataagttctgagcaaatacaagctgaaaactttggcttacttggagccataattcagggtagtttagttgaggttgacagagaattctggaagttatttactgggtcagcctgcagaccttcatgtcctgcagtatgctgtttgactttggcactgaccaccagtatagttccaggancggtaaaaatgggaatagagcaaaatatgtgtgaagtaaatagaagcttttctttaaaggaatcaataatgaaatggctcttattctatcagttagagggtgacttagaaaatagcacagaagtgcctccaattcttcacagtaattttcctcatcttgtactggagaaaattcttgtgagtctcactatgaaaaactgtaaagctgcaatgaattttttccaaagcgtgccagaatgtgaacaccaccaaaaagataaagaagaactttcattctcagaagtagaagaactatttcttcagacaacttttgacaagatggactttttaaccattgtgagagaatgtggtatagaaaagcaccagtccagtattggcttctctgtccaccagaatctcaaggaatcactggatcgctgtcttctgggattatcagaacagcttctgaataattactcatctgagattacaaattcagaaactcttgtccggtgttcacgtcttttggtgggtgtccttggctgctactgttacatgggtgtaatagctgaagaggaagcatataagtcagaattattccagaaagccaantctctaatgcaatgtgcaggagaaagtatcactctgtttaaaaataagacaaatgaggaattcagaattggttccttgagaaatatgatgcagctatgtacacgttgcttgagcaactgtaccaagaagagtccaaataagattgcatctggctttttcctgcgattgttaacatcaaagctaatgaatgacattgcagatatttgtaaaagtttagcatccttcatcaaaaagccatttgaccgtggagaagtagaatcaatggaagatgatactaatggaaatctaatggaggtggaggatcagtcatccatgaatctatttaacgattaccctgatagtagtgttagtgatgcaaacgaacctggagagagccaaagtaccataggtgccattaatcctttagctgaagaatatctgtcaaagcaagatctacttttcttagacatgctcaagttcttgtgtttgtgtgtaactactgctcagaccaatactgtgtcctttagggcagctgatattcggaggaaattgttaatgttaattgattctagcacgctagaacctaccaaatccctccacctgcatatgtatctaatgcttttaaaggagcttcctggagaagagtaccccttgccaatggaagatgttcttgaacttctgaaaccactatccaatgtgtgttctttgtatcgtcgtgaccaagatgtttgtaaaactattttaaaccatgtccttcatgtagtgaaaaacctaggtcaaagcaatatggactctgagaacacaagggatgctcaaggacagtttcttacagtaattggagcattttggcatctaacaaaggagaggaaatatatattctctgtaagaatggccctagtaaattgccttaaaactttgcttgaggctgatccttattcaaaatgggccattcttaatgtaatgggaaaagactttcctgtaaatgaagtatttacacaatttcttgctgacaatcatcaccaagttcgcatgttggctgcagagtcaatcaatagattgttccaggacacgaagggagattcttccaggttactgaaagcacttcctttgaagcttcagcaaacagcttttgaaaatgcatacttgaaagctcaggaaggaatgagagaaatgtcccatagtgctgagaaccctgaaactttggatgaaatttataatagaaaatctgttttactgacgttgatagctgtggttttatcctgtagccctatctgcgaaaaacaggctttgtttgccctgtgtaaatctgtgaaagagaatggattagaacctcaccttgtgaaaaaggttttagagaaagtttctgaaacttttggatatagacgtttagaagactttatggcatctcatttagattatctggttttggaatggctaaatcttcaagatactgaatacaacttatcttcttttccttttattttattaaactacacaaatattgaggatttctatagatcttgttataaggttttgattccacatctggtgattagaagtcattttgatgaggtgaagtccattgctaatcagattcaagaggactggaaaagtcttctaacagactgctttccaaagattcttgtaaatattcttccttattttgcctatgagggtaccagagacagtgggatggcacagcaaagagagactgctaccaaggtctatgatatgcttaaaagtgaaaacttattgggaaaacagattgatcacttattcattagtaatttaccagagattgtggtggagttattgatgacgttacatgagccagcaaattctagtgccagtcagagcactgacctctgtgacttttcaggggatttggatcctgctcctaatccacctcattttccatcgcatgtgattaaagcaacatttgcctatatcagcaattgtcataaaaccaagttaaaaagcattttagaaattctttccaaaagccctgattcctatcagaaaattcttcttgccatatgtgagcaagcagctgaaacaaataatgtttataagaagcacagaattcttaaaatatatcacctgtttgttagtttattactgaaagatataaaaagtggcttaggaggagcttgggcctttgttcttcgagacgttatttatactttgattcactatatcaaccaaaggccttcttgtatcatggatgtgtcattacgtagcttctccctttgttgtgacttattaagtcaggtttgccagacagccgtgacttactgtaaggatgctctagaaaaccatcttcatgttattgttggtacacttataccccttgtgtatgagcaggtggaggttcagaaacaggtattggacttgttgaaatacttagtgatagataacaaggataatgaaaacctctatatcacgattaagcttttagatccttttcctgaccatgttgtttttaaggatttgcgtattactcagcaaaaaatcaaatacagtagaggacccttttcactcttggaggaaattaaccattttctctcagtaagtgtttatgatgcacttccattgacaagacttgaaggactaaaggatcttcgaagacaactggaactacataaagatcagatggtggacattatgagagcttctcaggataatccgcaagatgggattatggtgaaactagttgtcaatttgttgcagttatccaagatggcaataaaccacactggtgaaaaagaagttctagaggctgttggaagctgcttgggagaagtgggtcctatagatttctctaccatagctatacaacatagtaaagatgcatcttataccaaggcccttaagttatttgaagataaagaacttcagtggaccttcataatgctgacctacctgaataacacactggtagaagattgtgtcaaagttcgatcagcagctgttacctgtttgaaaaacattttagccacaaagactggacatagtttctgggagatttataagatgacaacagatccaatgctggcctatctacagccttttagaacatcaagaaaaaagtttttagaagtacccagatttgacaaagaaaacccttttgaaggcctggatgatataaatctgtggattcctctaagtgaaaatcatgacatttggataaagacactgacttgtgcttttttggacagtggaggcacaaaatgtgaaattcttcaattattaaagccaatgtgtgaagtgaaaactgacttttgtcagactgtacttccatacttgattcatgatattttactccaagatacaaatgaatcatggagaaatctgctttctacacatgttcagggatttttcaccagctgtcttcgacacttctcgcaaacgagccgatccacaacccctgcaaacttggattcagaccttcttcaggaacaatttttaatgatgctttctggctggatttaaattatctagaagttgccaaggtagctcagtcttgtgctgctcactttacagctttactctatgcagaaatctatgcagataagaaaagtatggatgatcaagagaaaagaagtcttgcatttgaagaaggaagccagagtacaactatttctagcttgagtgaaaaaagtaaagaagaaactggaataagtttacaggatcttctcttagaaatctacagaagtataggggagccagatagtttgtatggctgtggtggagggaagatgttacaacccattactaggtaaattgcatttttctaaacaacggtatagtaattctgtttatgaaggagttatgtgtgtgtaaaacccaaagctattttcacaatcttttcttatagactacgaacatatgaacacgaagcaatgtggggcaaagccctagtaacatatgacctcgaaacagcaatcccctcatcaacacgccaggcaggaatcattcaggtacattttttcccagatttggtaaagccatcactagtgtagtgctgaggttatttcagtatgttggtggatatttacacagccagataaactctagagataagactagaacttatctgtttttcagaggattaggctaaacattcagggatactcctgaagcagagggatgcaaaaaaaagagaaaaaattcagggagacacaggaaagtcagacaggtcattgacctaaaagatagtgtagatttcttgatcatagtgttgttggataacaacagaagacattgctcgagcatatacaatgtgccaggtagtgtacttactgcttcacatggaaaatcttatgtaaactatttctcatagtttgcaacagagttggtcccagaacctgttgtttctattactggctaatactccttagccattcttccatgaaatattagagccctttgagctctatttttgtgttttttgggaaacattaaacgatattttgggattaaaaaaatgtttttggccaggcgtggtggcttgcgcctgtaatcccagcactttgggaggccgaggcgagcagatcacgaggtcaggaggtccagaccatcctggctaacacggtgaaaccccgtctctactaaaaatacaa

SEQ ID NO: 279238 - DNA, 2138 bp, Homo sapiens
ctgaaagtgggagcggccgcacttttttttgaccgtaaggatttcccctttcttgtaagttctgctatgtatttaaaagaatgttttctacattttatccagcatttctctgtgttctgttggaagggaagggcttaggtatctagtttgatacataggtagaagtggaacatttctctgtcccccagctgtcatcatataagataaacatcagataaaaagccacctgaaagtaaaactactgactcgtgtattagtgagtataatctcttctccatccttaggaaaatgttcatcccagctgcggagattaacaaatgggtgattgagctttctcctcgtatttggaccttgaaggttatataaatttttttcttatgaagagttggcatttctttttattgccaatggcaggcactcattcatatttgatctcctcaccttcccctcccctaaaaccaatctccagaactttttggactataaatttcttggtttgacttctggagaactgttcagaatattactttgcatttcaaattacaaacttaccttggtgtatctttttcttacaagctgcctaaatgaatatttggtatatattggtagttttattactatagtaaatcaaggaaatgcagtaaacttaaaatgtctttaagaaagccctgaaatcttcatgggtgaaattagaaattatcaactagataatagtatagataaatgaatttgtagctaattcttgctagttgttgcatccagagagctttgaataacatcattaatctactctttagccttgcatggtatgctatgaggctcctgttctgttcaagtattctaatcaatggctttgaaaagtttatcaaatttacatacagatcacaagcctaggagaaataactaattcacagatgacagaattaagattataaaagattttttttttgtaattttagtagagacagggttgccattgtattccagccttggcgacagagcaagactctgcctcaaaaaaaaaaaaaaaaaggttttggcaagctggaactctttctgcaaatgactaagatagaaaactgccaaggacaaatgaggagtagttagattttgaaaatattaatcatagaatagttgttgtatgctaagtcactgacccatattatgtacagcatttctgatctttactttgcaagattagtgatactatcccaatacactgctggagaaatcagaatttggagaaataagttgtccaaggcaagaagatagtaaattataagtacaagtgtaatatggacagtatctaacttgaaaagatttcaggcgaaaagaatctggggtttgccagtcagttgctcaaaaggtcaatgaaaaccaaatagtgaagctatcagagaagctaataaattatagactgcttgaacagttgtgtccagattaagggagataatagctttcccaccctactttgtgcaggtcatacctccccaaagtgtttacctaatcagtaggttcacaaactcttggtcattatagtatatgcctaaaatgtatgcacttaggaatgctaaaaatttaaatatggtctaaagcaaataaaagcaaagaggaaaaactttggacatcgtaaagactagaatagtcttttaaaaagaaagccagtatattggtttgaaatatagagatgtgtcccaatttcaagtattttaattgcaccttaatgaaattatctattttctatagattttagtactattgaatgtattactttactgttacctgaatttattataaagtgtttttgaataaataattctaaaagcatatactaagactcattcactttattcaaatatttgtgtgttctgtgtgccaggcatgggactcgttctaaggagaaagcagtgagcaaggcaggcatagtctgcctatataaagctcccaatctgaggaggataggcaactgaccacgcagtgtgaaccggggagcctattgcacaaccagtctgataatgctgcatctcagtctaaatatcctagtagtgtttcttagtcgcctcctgacaaaaaggcaaatatgaatgttctttctttgggcctagaaagtgatctagttgacatttctagcctaaaag

SEQ ID NO: 279239 - DNA, 771 bp, Homo sapiens
actactgtcgcatatactactgtcgcatatactactgtcgcatatactataatgaccaagagttgtgtccagattaagggagataatagctttcccaccctactttgtgcaggtcatacctccccaaagtgtttacctaatcagtaggttcacaaactcttggtcattatagtatatgcctaaaatgtatgcacttaggaatgctaaaaatttaaatatggtctaaagcaaataaaagcaaagaggaaaaactttggacatcgtaaagactagaatagtcttttaaaaagaaagccagtatattggtttgaaatatagagatgtgtcccaatttcaagtattttaattgcaccttaatgaaattatctattttctatagattttagtactattgaatgtattactttactgttacctgaatttattataaagtgtttttgaataaataattctaaaagcatatactaagactcattcactttattcaaatatttgtgtgttctgtgtgccaggcatgggactcgttctaaggagaaagcagtgagcaaggcaggcatagtctgcctatataaagctcccaatctgaggaggataggcaactgaccacgcagtgtgaaccggggagcctattgcacaaccagtctgataatgctgcatctcagtctaaatatcctagtagtgtttcttagtcgcctcctgacaaaaaggcaaatatgaatgttctttctttgggcctagaaagtgatctagttgacatttctagcctaaaag

SEQ ID NO: 279240 - DNA, 1931 bp, Homo sapiens
  misc_feature (340)..(340): n is a, c, g, or t
ccgcgtccgcgcttacccaatacaagccgggctacgtccgagggtaacaacatgatcaaaaccacagcaggaaccacaataaggaacaagactcaggttaaagcaaacacagcgacagctcctgcgccgcatctcctggttccagtggcggcactgaactcgcggcaatttgtcccgcctctttcgcttcacggcagccaatcgcttccgccagagaaagaaaggcgccgaaatgaaacccgcctccgttcgccttcggaactgtcgtcacttccgtcctcagacttggaggggcggggatgaggagggcggggaggacgacgagggcgaagagggtggntgagagccccggagcccgagccgaagggcgagccgcaaacgctaagtcgctggccattggtggacatggcgcaggcgcgtttgctccgacgggccgaatgttttggggcagtgttttgagcgcggagaccgcgtgatactggatgcgcatgggcataccgtgctctgcggctgcttggcgttgcttcttcctccagaagtgggcgctgggcagtcacgcagggtttgaaccggaagcgggagtaggtagctgcgtggctaacggagaaaagaagccgtggccacgggaggaggcgagaggagtcgggatctgcgctgcagccaccgccgcggttgatactactttgaccttccgagtgcagtgacagtgatgtgtgttctgaaattgtgaaccatgagtctagtacttaatgatctgcttatctgctgccgtcaactagaacatgatagagctacagaacgaaagaaagaagttgagaaatttaagcgcctgattcgagatcctgaaacaattaaacatctagatcggcattcagattccaaacaaggaaaatatttgaattgggatgctgtttttagatttttacagaaatatattcagaaagaaacagaatgtctgagaatagcaaaaccaaatgtatcagcctcaacacaagcctccaggcagaaaaagatgcaggaaatcagtagtttggtcaaatacttcatcaaatgtgcaaacagaagagcacctaggctaaaatgtcaagaactcttaaattatatcatggatacagtgaaagattcatctaatggtgctatttacggagctgattgtagcaacatactactcaaagacattctttctgtgagaaaatactggtgtgaaatatctcagcaacagtggttaggtatgttttgaaggttgttgtttgtgaatttttcctcatgaaatgaaacttcaccaaagaaagcactctgtctgtatctgtctatatcccccaagtgacctgacagtttaacagtactttagtaaaattatatggttatcgaactgacccttaatttttatttattatgtagcttttgaataaagtcatgaataatatatcaggtgcctgatatcagagccggaattacagttgaaaaataccatctccatcgtcaaggagttgacagtggcagaagaaaacccaagtaaaccagagttcataatgtgctgtgatacagacatatttgggttcagtaggtatacaaaacaatgacacctaaactcaaccatgatttaagtagaaagggagaaaaccaagagagggaagtaccataaaagtgaaagcaggcagggtgcagtggctcacgcctgtaatcctagcactttgggaggccaaggccggtggattgcttgagctcaggagttcaagaccagcctgggcaacatggtgaaactctgtctttaaaaaaatagcggaggtaatggctcttgcttgtagtcccagttacttgggaggctgaggcaggaggatcacctgagccctggaggttaaggctgcagtgagctgtgatcacactgcactccggcctccatgacagagtgagaccctgtttccatttaa

SEQ ID NO: 279241 - DNA, 1371 bp, Homo sapiens
  misc_feature (340)..(340): n is a, c, g, or t
ccgcgtccgcgcttacccaatacaagccgggctacgtccgagggtaacaacatgatcaaaaccacagcaggaaccacaataaggaacaagactcaggttaaagcaaacacagcgacagctcctgcgccgcatctcctggttccagtggcggcactgaactcgcggcaatttgtcccgcctctttcgcttcacggcagccaatcgcttccgccagagaaagaaaggcgccgaaatgaaacccgcctccgttcgccttcggaactgtcgtcacttccgtcctcagacttggaggggcggggatgaggagggcggggaggacgacgagggcgaagagggtggntgagagccccggagcccgagccgaagggcgagccgcaaacgctaagtcgctggccattggtggacatggcgcaggcgcgtttgctccgacgggccgaatgttttggggcagtgttttgagcgcggagaccgcgtgatactggatgcgcatgggcataccgtgctctgcggctgcttggcgttgcttcttcctccagaagtgggcgctgggcagtcacgcagggtttgaaccggaagcgggagtaggtagctgcgtggctaacggagaaaagaagccgtggccacgggaggaggcgagaggagtcgggatctgcgctgcagccaccgccgcggttgatactactttgaccttccgagtgcagtgacagtgatgtgtgttctgaaattgtgaaccatgagtctagtacttaatgatctgcttatctgctgccgtcaactagaacatgatagagctacagaacgaaagaaagaagttgagaaatttaagcgcctgattcgagatcctgaaacaattaaacatctagatcggcattcagattccaaacaaggaaaatatttgaattgggatgctgtttttagatttttacagaaatatattcagaaagaaacagaatgtctgagaatagcaaaaccaaatgtatcagcctcaacacaagcctccaggcagaaaaagatgcaggaaatcagtagtttggtcaaatacttcatcaaatgtgcaaacagaagagcacctaggctaaaatgtcaagaactcttaaattatatcatggatacagtgaaagattcatctaatggtgctatttacggagctgattgtagcaacatactactcaaagacattctttctgtgagaaaatactggtgtgaaatatctcagcaacagtggttaggtatgttttgaaggttgttgtttgtgaatttttcctcatgaaatgaaacttcaccaaagaaagcactctgtctgtatctgtctatatcccccaagtgacctgacagtttaacagtactttagtaaaattatatggttatcga

SEQ ID NO: 279242 - DNA, 407 bp, Homo sapiens
atttgctgacgagctctttgggtcctactggggagtggtggaaagacacagtgctgttttactcaggtgtttgcagtatgccttcctaggggggacttccagttaatctaattacagaagtagcgaggggaaactttctaaatcagtgtaaatgttgtagcttattctaaatgaaagaatggcagtaggtatttaattatttgggagactgtcaagaggtgcacagatgctcagattggtttgagtgccctttgctattctcagatgactctgtgtttttataataaaataaactgtacttgtttattcatgcttaattattctgaagggccgtgatgacctgagacaagatgctgtcatgcaacaggtcttccagatgtgtaatacattactgcagagaaacacgg

SEQ ID NO: 279243 - DNA, 373 bp, Homo sapiens
gatctgtgtcttataaaaaatggatgaaggaattgacttagtggaaagctcacatttgtttttaaacatgtcagtgcttgtgatttagcaaaggtattggtccttactctttcttgtaccaaaagacagaactaggattagtgagtaggaggtttctgaaatgtgtatagcttgtcaaaaaatctggagttcagttgggattttataattgattgttaaacatttacattttacattacattttttttttaatttctttttaagtcccatagtgctgagaaccctgaaactttggatgaaatttataatagaaaatctgttttactgacgttgatagctgtggttttatcctgtagccctatctgcgaaaaac

SEQ ID NO: 279244 - DNA, 440 bp, Homo sapiens
gcataaatctaatagttcttttcttacagctaatctctagaatttcaatggatcacccccatcacactttgtttattatactggccttagcaaatgcaaacagagatgaatttctgactaaaccagaggtagccagaagaagcagaataactaaaaatgtgcctaaacaaagctctcagcttgatgaggtatttggattaaacatacgtaccttttagaagtgtgatattcagtctttcctagaatatttctttttaaaatcttgtgttattaagatgccatctaaaatcggttcaaggctggcacggtggctcacgcctgtaatcccagcactttgggaggctgaggcgggtggattacttgaggtcagaagttcgagaccatcctggctgaccgacacagcaaaaccctgtctctactaaaaatgcaaaaaacagctg

SEQ ID NO: 279245 - DNA, 13583 bp, Homo sapiens
  misc_feature (340)..(340): n is a, c, g, or t
  misc_feature (2481)..(2481): n is a, c, g, or t
  misc_feature (3071)..(3071): n is a, c, g, or t
  misc_feature (11595)..(11595): n is a, c, g, or t
ccgcgtccgcgcttacccaatacaagccgggctacgtccgagggtaacaacatgatcaaaaccacagcaggaaccacaataaggaacaagactcaggttaaagcaaacacagcgacagctcctgcgccgcatctcctggttccagtggcggcactgaactcgcggcaatttgtcccgcctctttcgcttcacggcagccaatcgcttccgccagagaaagaaaggcgccgaaatgaaacccgcctccgttcgccttcggaactgtcgtcacttccgtcctcagacttggaggggcggggatgaggagggcggggaggacgacgagggcgaagagggtggntgagagccccggagcccgagccgaagggcgagccgcaaacgctaagtcgctggccattggtggacatggcgcaggcgcgtttgctccgacgggccgaatgttttggggcagtgttttgagcgcggagaccgcgtgatactggatgcgcatgggcataccgtgctctgcggctgcttggcgttgcttcttcctccagaagtgggcgctgggcagtcacgcagggtttgaaccggaagcgggagtaggtagctgcgtggctaacggagaaaagaagccgtggccacgggaggaggcgagaggagtcgggatctgcgctgcagccaccgccgcggttgatactactttgaccttccgagtgcagtgaggcatacatcacaatttggaattatgcattggtttatcaatttacttgtttattgtcaccctgctgcccagatatgacttcatgaggacagtgatgtgtgttctgaaattgtgaaccatgagtctagtacttaatgatctgcttatctgctgccgtcaactagaacatgatagagctacagaacgaaagaaagaagttgagaaatttaagcgcctgattcgagatcctgaaacaattaaacatctagatcggcattcagattccaaacaaggaaaatatttgaattgggatgctgtttttagatttttacagaaatatattcagaaagaaacagaatgtctgagaatagcaaaaccaaatgtatcagcctcaacacaagcctccaggcagaaaaagatgcaggaaatcagtagtttggtcaaatacttcatcaaatgtgcaaacagaagagcacctaggctaaaatgtcaagaactcttaaattatatcatggatacagtgaaagattcatctaatggtgctatttacggagctgattgtagcaacatactactcaaagacattctttctgtgagaaaatactggtgtgaaatatctcagcaacagtggttagaattgttctctgtgtacttcaggctctatctgaaaccttcacaagatgttcatagagttttagtggctagaataattcatgctgttaccaaaggatgctgttctcagactgacggattaaattccaaatttttggactttttttccaaggctattcagtgtgcgagacaagaaaagagctcttcaggtctaaatcatatcttagcagctcttactatcttcctcaagactttggctgtcaactttcgaattcgagtgtgtgaattaggagatgaaattcttcccactttgctttatatttggactcaacataggcttaatgattctttaaaagaagtcattattgaattatttcaactgcaaatttatatccatcatccgaaaggagccaaaacccaagaaaaaggtgcttatgaatcaacaaaatggagaagtattttatacaacttatatgatctgctagtgaatgagataagtcatataggaagtagaggaaagtattcttcaggatttcgtaatattgccgtcaaagaaaatttgattgaattgatggcagatatctgtcaccaggtttttaatgaagataccagatccttggagatttctcaatcttacactactacacaaagagaatctagtgattacagtgtcccttgcaaaaggaagaaaatagaactaggctgggaagtaataaaagatcaccttcagaagtcacagaatgattttgatcttgtgccttggctacagattgcaacccaattaatatcaaagtatcctgcaagtttacctaactgtgagctgtctccattactgatgatactatctcagcttctaccccaacagcgacatggggaacgtacaccatatgtgttacgatgccttacggaagttgcattgtgtcaagacaagaggtcaaacctagaaagctcacaaaagtcagatttattaaaactctggaataaaatttggtgtattacctttcgtggtataagttctgagcaaatacaagctgaaaactttggcttacttggagccataattcagggtagtttagttgaggttgacagagaattctggaagttatttactgggtcagcctgcagaccttcatgtcctgcagtatgctgtttgactttggcactgaccaccagtatagttccaggancggtaaaaatgggaatagagcaaaatatgtgtgaagtaaatagaagcttttctttaaaggaatcaataatgaaatggctcttattctatcagttagagggtgacttagaaaatagcacagaagtgcctccaattcttcacagtaattttcctcatcttgtactggagaaaattcttgtgagtctcactatgaaaaactgtaaagctgcaatgaattttttccaaagcgtgccagaatgtgaacaccaccaaaaagataaagaagaactttcattctcagaagtagaagaactatttcttcagacaacttttgacaagatggactttttaaccattgtgagagaatgtggtatagaaaagcaccagtccagtattggcttctctgtccaccagaatctcaaggaatcactggatcgctgtcttctgggattatcagaacagcttctgaataattactcatctgagattacaaattcagaaactcttgtccggtgttcacgtcttttggtgggtgtccttggctgctactgttacatgggtgtaatagctgaagaggaagcatataagtcagaattattccagaaagccaantctctaatgcaatgtgcaggagaaagtatcactctgtttaaaaataagacaaatgaggaattcagaattggttccttgagaaatatgatgcagctatgtacacgttgcttgagcaactgtaccaagaagagtccaaataagattgcatctggctttttcctgcgattgttaacatcaaagctaatgaatgacattgcagatatttgtaaaagtttagcatccttcatcaaaaagccatttgaccgtggagaagtagaatcaatggaagatgatactaatggaaatctaatggaggtggaggatcagtcatccatgaatctatttaacgattaccctgatagtagtgttagtgatgcaaacgaacctggagagagccaaagtaccataggtgccattaatcctttagctgaagaatatctgtcaaagcaagatctacttttcttagacatgctcaagttcttgtgtttgtgtgtaactactgctcagaccaatactgtgtcctttagggcagctgatattcggaggaaattgttaatgttaattgattctagcacgctagaacctaccaaatccctccacctgcatatgtatctaatgcttttaaaggagcttcctggagaagagtaccccttgccaatggaagatgttcttgaacttctgaaaccactatccaatgtgtgttctttgtatcgtcgtgaccaagatgtttgtaaaactattttaaaccatgtccttcatgtagtgaaaaacctaggtcaaagcaatatggactctgagaacacaagggatgctcaaggacagtttcttacagtaattggagcattttggcatctaacaaaggagaggaaatatatattctctgtaagaatggccctagtaaattgccttaaaactttgcttgaggctgatccttattcaaaatgggccattcttaatgtaatgggaaaagactttcctgtaaatgaagtatttacacaatttcttgctgacaatcatcaccaagttcgcatgttggctgcagagtcaatcaatagattgttccaggacacgaagggagattcttccaggttactgaaagcacttcctttgaagcttcagcaaacagcttttgaaaatgcatacttgaaagctcaggaaggaatgagagaaatgtcccatagtgctgagaaccctgaaactttggatgaaatttataatagaaaatctgttttactgacgttgatagctgtggttttatcctgtagccctatctgcgaaaaacaggctttgtttgccctgtgtaaatctgtgaaagagaatggattagaacctcaccttgtgaaaaaggttttagagaaagtttctgaaacttttggatatagacgtttagaagactttatggcatctcatttagattatctggttttggaatggctaaatcttcaagatactgaatacaacttatcttcttttccttttattttattaaactacacaaatattgaggatttctatagatcttgttataaggttttgattccacatctggtgattagaagtcattttgatgaggtgaagtccattgctaatcagattcaagaggactggaaaagtcttctaacagactgctttccaaagattcttgtaaatattcttccttattttgcctatgagggtaccagagacagtgggatggcacagcaaagagagactgctaccaaggtctatgatatgcttaaaagtgaaaacttattgggaaaacagattgatcacttattcattagtaatttaccagagattgtggtggagttattgatgacgttacatgagccagcaaattctagtgccagtcagagcactgacctctgtgacttttcaggggatttggatcctgctcctaatccacctcattttccatcgcatgtgattaaagcaacatttgcctatatcagcaattgtcataaaaccaagttaaaaagcattttagaaattctttccaaaagccctgattcctatcagaaaattcttcttgccatatgtgagcaagcagctgaaacaaataatgtttataagaagcacagaattcttaaaatatatcacctgtttgttagtttattactgaaagatataaaaagtggcttaggaggagcttgggcctttgttcttcgagacgttatttatactttgattcactatatcaaccaaaggccttcttgtatcatggatgtgtcattacgtagcttctccctttgttgtgacttattaagtcaggtttgccagacagccgtgacttactgtaaggatgctctagaaaaccatcttcatgttattgttggtacacttataccccttgtgtatgagcaggtggaggttcagaaacaggtattggacttgttgaaatacttagtgatagataacaaggataatgaaaacctctatatcacgattaagcttttagatccttttcctgaccatgttgtttttaaggatttgcgtattactcagcaaaaaatcaaatacagtagaggacccttttcactcttggaggaaattaaccattttctctcagtaagtgtttatgatgcacttccattgacaagacttgaaggactaaaggatcttcgaagacaactggaactacataaagatcagatggtggacattatgagagcttctcaggataatccgcaagatgggattatggtgaaactagttgtcaatttgttgcagttatccaagatggcaataaaccacactggtgaaaaagaagttctagaggctgttggaagctgcttgggagaagtgggtcctatagatttctctaccatagctatacaacatagtaaagatgcatcttataccaaggcccttaagttatttgaagataaagaacttcagtggaccttcataatgctgacctacctgaataacacactggtagaagattgtgtcaaagttcgatcagcagctgttacctgtttgaaaaacattttagccacaaagactggacatagtttctgggagatttataagatgacaacagatccaatgctggcctatctacagccttttagaacatcaagaaaaaagtttttagaagtacccagatttgacaaagaaaacccttttgaaggcctggatgatataaatctgtggattcctctaagtgaaaatcatgacatttggataaagacactgacttgtgcttttttggacagtggaggcacaaaatgtgaaattcttcaattattaaagccaatgtgtgaagtgaaaactgacttttgtcagactgtacttccatacttgattcatgatattttactccaagatacaaatgaatcatggagaaatctgctttctacacatgttcagggatttttcaccagctgtcttcgacacttctcgcaaacgagccgatccacaacccctgcaaacttggattcagagtcagagcactttttccgatgctgtttggataaaaaatcacaaagaacaatgcttgctgttgtggactacatgagaagacaaaagagaccttcttcaggaacaatttttaatgatgctttctggctggatttaaattatctagaagttgccaaggtagctcagtcttgtgctgctcactttacagctttactctatgcagaaatctatgcagataagaaaagtatggatgatcaagagaaaagaagtcttgcatttgaagaaggaagccagagtacaactatttctagcttgagtgaaaaaagtaaagaagaaactggaataagtttacaggatcttctcttagaaatctacagaagtataggggagccagatagtttgtatggctgtggtggagggaagatgttacaacccattactagactacgaacatatgaacacgaagcaatgtggggcaaagccctagtaacatatgacctcgaaacagcaatcccctcatcaacacgccaggcaggaatcattcaggccttgcagaatttgggactctgccatattctttccgtctatttaaaaggattggattatgaaaataaagactggtgtcctgaactagaagaacttcattaccaagcagcatggaggaatatgcagtgggaccattgcacttccgtcagcaaagaagtagaaggaaccagttaccatgaatcattgtacaatgctctacaatctctaagagacagagaattctctacattttatgaaagtctcaaatatgccagagtaaaagaagtggaagagatgtgtaagcgcagccttgagtctgtgtattcgctctatcccacacttagcaggttgcaggccattggagagctggaaagcattggggagcttttctcaagatcagtcacacatagacaactctctgaagtatatattaagtggcagaaacactcccagcttctcaaggacagtgattttagttttcaggagcctatcatggctctacgcacagtcattttggagatcctgatggaaaaggaaatggacaactcacaaagagaatgtattaaggacattctcaccaaacaccttgtagaactctctatactggccagaactttcaagaacactcagctccctgaaagggcaatatttcaaattaaacagtacaattcagttagctgtggagtctctgagtggcagctggaagaagcacaagtattctgggcaaaaaaggagcagagtcttgccctgagtattctcaagcaaatgatcaagaagttggatgccagctgtgcagcgaacaatcccagcctaaaacttacatacacagaatgtctgagggtttgtggcaactggttagcagaaacgtgcttagaaaatcctgcggtcatcatgcagacctatctagaaaaggcagtagaagttgctggaaattatgatggagaaagtagtgatgagctaagaaatggaaaaatgaaggcatttctctcattagcccggttttcagatactcaataccaaagaattgaaaactacatgaaatcatcggaatttgaaaacaagcaagctctcctgaaaagagccaaagaggaagtaggtctccttagggaacataaaattcagacaaacagatacacagtaaaggttcagcgagagctggagttggatgaattagccctgcgtgcactgaaagaggatcgtaaacgcttcttatgtaaagcagttgaaaattatatcaactgcttattaagtggagaagaacatgatatgtgggtattccgactttgttccctctggcttgaaaattctggagtttctgaagtcaatggcatgatgaagagagacggaatgaagattccaacatataaatttttgcctcttatgtaccaattggctgctagaatggggaccaagatgatgggaggcctaggatttcatgaagtcctcaataatctaatctctagaatttcaatggatcacccccatcacactttgtttattatactggccttagcaaatgcaaacagagatgaatttctgactaaaccagaggtagccagaagaagcagaataactaaaaatgtgcctaaacaaagctctcagcttgatgaggatcgaacagaggctgcaaatagaataatatgtactatcagaagtaggagacctcagatggtcagaagtgttgaggcactttgtgatgcttatattatattagcaaacttagatgccactcagtggaagactcagagaaaaggcataaatattccagcagaccagccaattactaaacttaagaatttagaagatgttgttgtccctactatggaaattaaggtggaccacacaggagaatatggaaatctggtgactatacagtcatttaaagcagaatttcgcttagcaggaggtgtaaatttaccaaaaataatagattgtgtaggttccgatggcaaggagaggagacagcttgttaagggccgtgatgacctgagacaagatgctgtcatgcaacaggtcttccagatgtgtaatacattactgcagagaaacacggaaactaggaagaggaaattaactatctgtacttataaggtggttcccctctctcagcgaagtggtgttcttgaatggtgcacaggaactgtccccattggtgaatttcttgttaacaatgaagatggtgctcataaaagatacaggccaaatgatttcagtgcctttcagtgccaaaagaaaatgatggaggtgcaaaaaaagtcttttgaagagaaatatgaagtcttcatggatgtttgccaaaattttcaaccagttttccgttacttctgcatggaaaaattcttggatccagctatttggtttgagaagcgattggcttatacgcgcagtgtagctacttcttctattgttggttacatacttggacttggtgatagacatgtacagaatatcttgataaatgagcagtcagcagaacttgtacatatagatctaggtgttgcttttgaacagggcaaaatccttcctactcctgagacagttccttttagactcaccagagatattgtggatggcatgggcattacgggtgttgaaggtgtcttcagaagatgctgtgagaaaaccatggaagtgatgagaaactctcaggaaactctgttaaccattgtagaggtccttctatatgatccactctttgactggaccatgaatcctttgaaagctttgtatttacagcagaggccggaagatgaaactgagcttcaccctactctgaatgcagatgaccaagaatgcaaacgaaatctcagtgatattgaccagagtttcaacaaagtagctgaacgtgtcttaatgagactacaagagaaactgaaaggagtggaagaaggcactgtgctcagtgttggtggacaagtgaatttgctcatacagcaggccatagaccccaaaaatctcagccgacttttcccaggatggaaagcttgggtgtgatcttcagtatatgaattaccctttcattcagcctttagaaattatattttagcctttatttttaacctgccaacatactttaagtagggattaatatttaagtgaactattgtgggtttttttgaatgttggttttaatacttgatttaatcaccactcaaaaatgttttgatggtcttaaggaacatctctgctttcactctttagaaataatggtcattcgggctgggcgcagcggctcacgcctgtaatcccagcactttgggaggccgaggtgagcggatcacaaggtcaggagttcgagaccagcctggccaagagaccagcctggccagtatggtgaaaccctgtctctactaaaaatacaaaaattagccgagcatggtggcgggcacctgtaatcccagctactcgagaggctgaggcaggagaatctcttgaacctgggaggtgaaggttgctgtgggccaaaatcatgccattgcactccagcctgggtgacaagagcgaaactccatctcaaaaaaaaaaaaaaaaaacagaaacttatttggatttttcctagtaagatcactcagtgttactaaataatgaagttgttatggagaacaaatttcaaagacacagttagtgtagttactatttttttaagtgtgtattaaaacttctcattctattctctttatcttttaagcccttctgtactgtccatgtatgttatctttctgtgataacttcatagattgccttctagttcatgaattctcttgtcagatgtatataatctcttttaccctatccattgggcttcttctttcagaaattgtttttcatttctaattatgcatcatttttcagatctctgtttcttgatgtcatttttaatgtttttttaatgttttttatgtcactaattattttaaatgtctgtacttgatagacactgtaatagttctattaaatttagttcctgctgtttatatctgttgatttttgtatttgataggctgttcatccagttttgtctttttgaaaagtgagtttattttcagcaaggctttatctatgggaatcttgagtgtctgtttatgtcatattcccagggctgttgctgcacacaagcccattcttattttaatttcttggctttagggtttccatacctgaagtgtagcataaatactgataggagatttcccaggccaaggcaaacacacttcctcctcatctccttgtgctagtgggcagaatatttgattgatgcctttttcactgagagtataagcttccatgtgtcccacctttatggcaggggtggaaggaggtacatttaattcccactgcctgcctttggcaagccctgggttctttgctccccatatagatgtctaagctaaaagccgtgggttaatgagactggcaaattgttccaggacagctacagcatcagctcacatattcacctctctggtttttcattcccctcatttttttctgagacagagtcttgctctgtcacccaggctggagtgcagtggcatgatctcagctcactgaaacctctgcctcctgggttcaagcaattctcctgcctcagcctccngagtagctgggactacaggcgtgtgccaacacgcccggctaattttttgtatttttattagagacggagtttcaccgtgttagccaggatggtctcgatcgcttgacctcgtgatccaccctcctcggcctcccaaagtgctgggattacaggtgtgagccaccgcgcccggcctcattcccctcatttttgaccgtaaggatttcccctttcttgtaagttctgctatgtatttaaaagaatgttttctacattttatccagcatttctctgtgttctgttggaagggaagggcttaggtatctagtttgatacataggtagaagtggaacatttctctgtcccccagctgtcatcatataagataaacatcagataaaaagccacctgaaagtaaaactactgactcgtgtattagtgagtataatctcttctccatccttaggaaaatgttcatcccagctgcggagattaacaaatgggtgattgagctttctcctcgtatttggaccttgaaggttatataaatttttttcttatgaagagttggcatttctttttattgccaatggcaggcactcattcatatttgatctcctcaccttcccctcccctaaaaccaatctccagaactttttggactataaatttcttggtttgacttctggagaactgttcagaatattactttgcatttcaaattacaaacttaccttggtgtatctttttcttacaagctgcctaaatgaatatttggtatatattggtagttttattactatagtaaatcaaggaaatgcagtaaacttaaaatgtctttaagaaagccctgaaatcttcatgggtgaaattagaaattatcaactagataatagtatagataaatgaatttgtagctaattcttgctagttgttgcatccagagagctttgaataacatcattaatctactctttagccttgcatggtatgctatgaggctcctgttctgttcaagtattctaatcaatggctttgaaaagtttatcaaatttacatacagatcacaagcctaggagaaataactaattcacagatgacagaattaagattataaaagattttttttttgtaattttagtagagacagggttgccattgtattccagccttggcgacagagcaagactctgcctcaaaaaaaaaaaaaaaaaggttttggcaagctggaactctttctgcaaatgactaagatagaaaactgccaaggacaaatgaggagtagttagattttgaaaatattaatcatagaatagttgttgtatgctaagtcactgacccatattatgtacagcatttctgatctttactttgcaagattagtgatactatcccaatacactgctggagaaatcagaatttggagaaataagttgtccaaggcaagaagatagtaaattataagtacaagtgtaatatggacagtatctaacttgaaaagatttcaggcgaaaagaatctggggtttgccagtcagttgctcaaaaggtcaatgaaaaccaaatagtgaagctatcagagaagctaataaattatagactgcttgaacagttgtgtccagattaagggagataatagctttcccaccctactttgtgcaggtcatacctccccaaagtgtttacctaatcagtaggttcacaaactcttggtcattatagtatatgcctaaaatgtatgcacttaggaatgctaaaaatttaaatatggtctaaagcaaataaaagcaaagaggaaaaactttggacatcgtaaagactagaatagtcttttaaaaagaaagccagtatattggtttgaaatatagagatgtgtcccaatttcaagtattttaattgcaccttaatgaaattatctattttctatagattttagtactattgaatgtattactttactgttacctgaatttattataaagtgtttttgaataaataattctaaaagca

SEQ ID NO: 279246 - DNA, 13894 bp, Homo sapiens
  misc_feature (340)..(340): n is a, c, g, or t
  misc_feature (2481)..(2481): n is a, c, g, or t
  misc_feature (3071)..(3071): n is a, c, g, or t
  misc_feature (11595)..(11595): n is a, c, g, or t
ccgcgtccgcgcttacccaatacaagccgggctacgtccgagggtaacaacatgatcaaaaccacagcaggaaccacaataaggaacaagactcaggttaaagcaaacacagcgacagctcctgcgccgcatctcctggttccagtggcggcactgaactcgcggcaatttgtcccgcctctttcgcttcacggcagccaatcgcttccgccagagaaagaaaggcgccgaaatgaaacccgcctccgttcgccttcggaactgtcgtcacttccgtcctcagacttggaggggcggggatgaggagggcggggaggacgacgagggcgaagagggtggntgagagccccggagcccgagccgaagggcgagccgcaaacgctaagtcgctggccattggtggacatggcgcaggcgcgtttgctccgacgggccgaatgttttggggcagtgttttgagcgcggagaccgcgtgatactggatgcgcatgggcataccgtgctctgcggctgcttggcgttgcttcttcctccagaagtgggcgctgggcagtcacgcagggtttgaaccggaagcgggagtaggtagctgcgtggctaacggagaaaagaagccgtggccacgggaggaggcgagaggagtcgggatctgcgctgcagccaccgccgcggttgatactactttgaccttccgagtgcagtgaggcatacatcacaatttggaattatgcattggtttatcaatttacttgtttattgtcaccctgctgcccagatatgacttcatgaggacagtgatgtgtgttctgaaattgtgaaccatgagtctagtacttaatgatctgcttatctgctgccgtcaactagaacatgatagagctacagaacgaaagaaagaagttgagaaatttaagcgcctgattcgagatcctgaaacaattaaacatctagatcggcattcagattccaaacaaggaaaatatttgaattgggatgctgtttttagatttttacagaaatatattcagaaagaaacagaatgtctgagaatagcaaaaccaaatgtatcagcctcaacacaagcctccaggcagaaaaagatgcaggaaatcagtagtttggtcaaatacttcatcaaatgtgcaaacagaagagcacctaggctaaaatgtcaagaactcttaaattatatcatggatacagtgaaagattcatctaatggtgctatttacggagctgattgtagcaacatactactcaaagacattctttctgtgagaaaatactggtgtgaaatatctcagcaacagtggttagaattgttctctgtgtacttcaggctctatctgaaaccttcacaagatgttcatagagttttagtggctagaataattcatgctgttaccaaaggatgctgttctcagactgacggattaaattccaaatttttggactttttttccaaggctattcagtgtgcgagacaagaaaagagctcttcaggtctaaatcatatcttagcagctcttactatcttcctcaagactttggctgtcaactttcgaattcgagtgtgtgaattaggagatgaaattcttcccactttgctttatatttggactcaacataggcttaatgattctttaaaagaagtcattattgaattatttcaactgcaaatttatatccatcatccgaaaggagccaaaacccaagaaaaaggtgcttatgaatcaacaaaatggagaagtattttatacaacttatatgatctgctagtgaatgagataagtcatataggaagtagaggaaagtattcttcaggatttcgtaatattgccgtcaaagaaaatttgattgaattgatggcagatatctgtcaccaggtttttaatgaagataccagatccttggagatttctcaatcttacactactacacaaagagaatctagtgattacagtgtcccttgcaaaaggaagaaaatagaactaggctgggaagtaataaaagatcaccttcagaagtcacagaatgattttgatcttgtgccttggctacagattgcaacccaattaatatcaaagtatcctgcaagtttacctaactgtgagctgtctccattactgatgatactatctcagcttctaccccaacagcgacatggggaacgtacaccatatgtgttacgatgccttacggaagttgcattgtgtcaagacaagaggtcaaacctagaaagctcacaaaagtcagatttattaaaactctggaataaaatttggtgtattacctttcgtggtataagttctgagcaaatacaagctgaaaactttggcttacttggagccataattcagggtagtttagttgaggttgacagagaattctggaagttatttactgggtcagcctgcagaccttcatgtcctgcagtatgctgtttgactttggcactgaccaccagtatagttccaggancggtaaaaatgggaatagagcaaaatatgtgtgaagtaaatagaagcttttctttaaaggaatcaataatgaaatggctcttattctatcagttagagggtgacttagaaaatagcacagaagtgcctccaattcttcacagtaattttcctcatcttgtactggagaaaattcttgtgagtctcactatgaaaaactgtaaagctgcaatgaattttttccaaagcgtgccagaatgtgaacaccaccaaaaagataaagaagaactttcattctcagaagtagaagaactatttcttcagacaacttttgacaagatggactttttaaccattgtgagagaatgtggtatagaaaagcaccagtccagtattggcttctctgtccaccagaatctcaaggaatcactggatcgctgtcttctgggattatcagaacagcttctgaataattactcatctgagattacaaattcagaaactcttgtccggtgttcacgtcttttggtgggtgtccttggctgctactgttacatgggtgtaatagctgaagaggaagcatataagtcagaattattccagaaagccaantctctaatgcaatgtgcaggagaaagtatcactctgtttaaaaataagacaaatgaggaattcagaattggttccttgagaaatatgatgcagctatgtacacgttgcttgagcaactgtaccaagaagagtccaaataagattgcatctggctttttcctgcgattgttaacatcaaagctaatgaatgacattgcagatatttgtaaaagtttagcatccttcatcaaaaagccatttgaccgtggagaagtagaatcaatggaagatgatactaatggaaatctaatggaggtggaggatcagtcatccatgaatctatttaacgattaccctgatagtagtgttagtgatgcaaacgaacctggagagagccaaagtaccataggtgccattaatcctttagctgaagaatatctgtcaaagcaagatctacttttcttagacatgctcaagttcttgtgtttgtgtgtaactactgctcagaccaatactgtgtcctttagggcagctgatattcggaggaaattgttaatgttaattgattctagcacgctagaacctaccaaatccctccacctgcatatgtatctaatgcttttaaaggagcttcctggagaagagtaccccttgccaatggaagatgttcttgaacttctgaaaccactatccaatgtgtgttctttgtatcgtcgtgaccaagatgtttgtaaaactattttaaaccatgtccttcatgtagtgaaaaacctaggtcaaagcaatatggactctgagaacacaagggatgctcaaggacagtttcttacagtaattggagcattttggcatctaacaaaggagaggaaatatatattctctgtaagaatggccctagtaaattgccttaaaactttgcttgaggctgatccttattcaaaatgggccattcttaatgtaatgggaaaagactttcctgtaaatgaagtatttacacaatttcttgctgacaatcatcaccaagttcgcatgttggctgcagagtcaatcaatagattgttccaggacacgaagggagattcttccaggttactgaaagcacttcctttgaagcttcagcaaacagcttttgaaaatgcatacttgaaagctcaggaaggaatgagagaaatgtcccatagtgctgagaaccctgaaactttggatgaaatttataatagaaaatctgttttactgacgttgatagctgtggttttatcctgtagccctatctgcgaaaaacaggctttgtttgccctgtgtaaatctgtgaaagagaatggattagaacctcaccttgtgaaaaaggttttagagaaagtttctgaaacttttggatatagacgtttagaagactttatggcatctcatttagattatctggttttggaatggctaaatcttcaagatactgaatacaacttatcttcttttccttttattttattaaactacacaaatattgaggatttctatagatcttgttataaggttttgattccacatctggtgattagaagtcattttgatgaggtgaagtccattgctaatcagattcaagaggactggaaaagtcttctaacagactgctttccaaagattcttgtaaatattcttccttattttgcctatgagggtaccagagacagtgggatggcacagcaaagagagactgctaccaaggtctatgatatgcttaaaagtgaaaacttattgggaaaacagattgatcacttattcattagtaatttaccagagattgtggtggagttattgatgacgttacatgagccagcaaattctagtgccagtcagagcactgacctctgtgacttttcaggggatttggatcctgctcctaatccacctcattttccatcgcatgtgattaaagcaacatttgcctatatcagcaattgtcataaaaccaagttaaaaagcattttagaaattctttccaaaagccctgattcctatcagaaaattcttcttgccatatgtgagcaagcagctgaaacaaataatgtttataagaagcacagaattcttaaaatatatcacctgtttgttagtttattactgaaagatataaaaagtggcttaggaggagcttgggcctttgttcttcgagacgttatttatactttgattcactatatcaaccaaaggccttcttgtatcatggatgtgtcattacgtagcttctccctttgttgtgacttattaagtcaggtttgccagacagccgtgacttactgtaaggatgctctagaaaaccatcttcatgttattgttggtacacttataccccttgtgtatgagcaggtggaggttcagaaacaggtattggacttgttgaaatacttagtgatagataacaaggataatgaaaacctctatatcacgattaagcttttagatccttttcctgaccatgttgtttttaaggatttgcgtattactcagcaaaaaatcaaatacagtagaggacccttttcactcttggaggaaattaaccattttctctcagtaagtgtttatgatgcacttccattgacaagacttgaaggactaaaggatcttcgaagacaactggaactacataaagatcagatggtggacattatgagagcttctcaggataatccgcaagatgggattatggtgaaactagttgtcaatttgttgcagttatccaagatggcaataaaccacactggtgaaaaagaagttctagaggctgttggaagctgcttgggagaagtgggtcctatagatttctctaccatagctatacaacatagtaaagatgcatcttataccaaggcccttaagttatttgaagataaagaacttcagtggaccttcataatgctgacctacctgaataacacactggtagaagattgtgtcaaagttcgatcagcagctgttacctgtttgaaaaacattttagccacaaagactggacatagtttctgggagatttataagatgacaacagatccaatgctggcctatctacagccttttagaacatcaagaaaaaagtttttagaagtacccagatttgacaaagaaaacccttttgaaggcctggatgatataaatctgtggattcctctaagtgaaaatcatgacatttggataaagacactgacttgtgcttttttggacagtggaggcacaaaatgtgaaattcttcaattattaaagccaatgtgtgaagtgaaaactgacttttgtcagactgtacttccatacttgattcatgatattttactccaagatacaaatgaatcatggagaaatctgctttctacacatgttcagggatttttcaccagctgtcttcgacacttctcgcaaacgagccgatccacaacccctgcaaacttggattcagagtcagagcactttttccgatgctgtttggataaaaaatcacaaagaacaatgcttgctgttgtggactacatgagaagacaaaagagaccttcttcaggaacaatttttaatgatgctttctggctggatttaaattatctagaagttgccaaggtagctcagtcttgtgctgctcactttacagctttactctatgcagaaatctatgcagataagaaaagtatggatgatcaagagaaaagaagtcttgcatttgaagaaggaagccagagtacaactatttctagcttgagtgaaaaaagtaaagaagaaactggaataagtttacaggatcttctcttagaaatctacagaagtataggggagccagatagtttgtatggctgtggtggagggaagatgttacaacccattactagactacgaacatatgaacacgaagcaatgtggggcaaagccctagtaacatatgacctcgaaacagcaatcccctcatcaacacgccaggcaggaatcattcaggccttgcagaatttgggactctgccatattctttccgtctatttaaaaggattggattatgaaaataaagactggtgtcctgaactagaagaacttcattaccaagcagcatggaggaatatgcagtgggaccattgcacttccgtcagcaaagaagtagaaggaaccagttaccatgaatcattgtacaatgctctacaatctctaagagacagagaattctctacattttatgaaagtctcaaatatgccagagtaaaagaagtggaagagatgtgtaagcgcagccttgagtctgtgtattcgctctatcccacacttagcaggttgcaggccattggagagctggaaagcattggggagcttttctcaagatcagtcacacatagacaactctctgaagtatatattaagtggcagaaacactcccagcttctcaaggacagtgattttagttttcaggagcctatcatggctctacgcacagtcattttggagatcctgatggaaaaggaaatggacaactcacaaagagaatgtattaaggacattctcaccaaacaccttgtagaactctctatactggccagaactttcaagaacactcagctccctgaaagggcaatatttcaaattaaacagtacaattcagttagctgtggagtctctgagtggcagctggaagaagcacaagtattctgggcaaaaaaggagcagagtcttgccctgagtattctcaagcaaatgatcaagaagttggatgccagctgtgcagcgaacaatcccagcctaaaacttacatacacagaatgtctgagggtttgtggcaactggttagcagaaacgtgcttagaaaatcctgcggtcatcatgcagacctatctagaaaaggcagtagaagttgctggaaattatgatggagaaagtagtgatgagctaagaaatggaaaaatgaaggcatttctctcattagcccggttttcagatactcaataccaaagaattgaaaactacatgaaatcatcggaatttgaaaacaagcaagctctcctgaaaagagccaaagaggaagtaggtctccttagggaacataaaattcagacaaacagatacacagtaaaggttcagcgagagctggagttggatgaattagccctgcgtgcactgaaagaggatcgtaaacgcttcttatgtaaagcagttgaaaattatatcaactgcttattaagtggagaagaacatgatatgtgggtattccgactttgttccctctggcttgaaaattctggagtttctgaagtcaatggcatgatgaagagagacggaatgaagattccaacatataaatttttgcctcttatgtaccaattggctgctagaatggggaccaagatgatgggaggcctaggatttcatgaagtcctcaataatctaatctctagaatttcaatggatcacccccatcacactttgtttattatactggccttagcaaatgcaaacagagatgaatttctgactaaaccagaggtagccagaagaagcagaataactaaaaatgtgcctaaacaaagctctcagcttgatgaggatcgaacagaggctgcaaatagaataatatgtactatcagaagtaggagacctcagatggtcagaagtgttgaggcactttgtgatgcttatattatattagcaaacttagatgccactcagtggaagactcagagaaaaggcataaatattccagcagaccagccaattactaaacttaagaatttagaagatgttgttgtccctactatggaaattaaggtggaccacacaggagaatatggaaatctggtgactatacagtcatttaaagcagaatttcgcttagcaggaggtgtaaatttaccaaaaataatagattgtgtaggttccgatggcaaggagaggagacagcttgttaagggccgtgatgacctgagacaagatgctgtcatgcaacaggtcttccagatgtgtaatacattactgcagagaaacacggaaactaggaagaggaaattaactatctgtacttataaggtggttcccctctctcagcgaagtggtgttcttgaatggtgcacaggaactgtccccattggtgaatttcttgttaacaatgaagatggtgctcataaaagatacaggccaaatgatttcagtgcctttcagtgccaaaagaaaatgatggaggtgcaaaaaaagtcttttgaagagaaatatgaagtcttcatggatgtttgccaaaattttcaaccagttttccgttacttctgcatggaaaaattcttggatccagctatttggtttgagaagcgattggcttatacgcgcagtgtagctacttcttctattgttggttacatacttggacttggtgatagacatgtacagaatatcttgataaatgagcagtcagcagaacttgtacatatagatctaggtgttgcttttgaacagggcaaaatccttcctactcctgagacagttccttttagactcaccagagatattgtggatggcatgggcattacgggtgttgaaggtgtcttcagaagatgctgtgagaaaaccatggaagtgatgagaaactctcaggaaactctgttaaccattgtagaggtccttctatatgatccactctttgactggaccatgaatcctttgaaagctttgtatttacagcagaggccggaagatgaaactgagcttcaccctactctgaatgcagatgaccaagaatgcaaacgaaatctcagtgatattgaccagagtttcaacaaagtagctgaacgtgtcttaatgagactacaagagaaactgaaaggagtggaagaaggcactgtgctcagtgttggtggacaagtgaatttgctcatacagcaggccatagaccccaaaaatctcagccgacttttcccaggatggaaagcttgggtgtgatcttcagtatatgaattaccctttcattcagcctttagaaattatattttagcctttatttttaacctgccaacatactttaagtagggattaatatttaagtgaactattgtgggtttttttgaatgttggttttaatacttgatttaatcaccactcaaaaatgttttgatggtcttaaggaacatctctgctttcactctttagaaataatggtcattcgggctgggcgcagcggctcacgcctgtaatcccagcactttgggaggccgaggtgagcggatcacaaggtcaggagttcgagaccagcctggccaagagaccagcctggccagtatggtgaaaccctgtctctactaaaaatacaaaaattagccgagcatggtggcgggcacctgtaatcccagctactcgagaggctgaggcaggagaatctcttgaacctgggaggtgaaggttgctgtgggccaaaatcatgccattgcactccagcctgggtgacaagagcgaaactccatctcaaaaaaaaaaaaaaaaaacagaaacttatttggatttttcctagtaagatcactcagtgttactaaataatgaagttgttatggagaacaaatttcaaagacacagttagtgtagttactatttttttaagtgtgtattaaaacttctcattctattctctttatcttttaagcccttctgtactgtccatgtatgttatctttctgtgataacttcatagattgccttctagttcatgaattctcttgtcagatgtatataatctcttttaccctatccattgggcttcttctttcagaaattgtttttcatttctaattatgcatcatttttcagatctctgtttcttgatgtcatttttaatgtttttttaatgttttttatgtcactaattattttaaatgtctgtacttgatagacactgtaatagttctattaaatttagttcctgctgtttatatctgttgatttttgtatttgataggctgttcatccagttttgtctttttgaaaagtgagtttattttcagcaaggctttatctatgggaatcttgagtgtctgtttatgtcatattcccagggctgttgctgcacacaagcccattcttattttaatttcttggctttagggtttccatacctgaagtgtagcataaatactgataggagatttcccaggccaaggcaaacacacttcctcctcatctccttgtgctagtgggcagaatatttgattgatgcctttttcactgagagtataagcttccatgtgtcccacctttatggcaggggtggaaggaggtacatttaattcccactgcctgcctttggcaagccctgggttctttgctccccatatagatgtctaagctaaaagccgtgggttaatgagactggcaaattgttccaggacagctacagcatcagctcacatattcacctctctggtttttcattcccctcatttttttctgagacagagtcttgctctgtcacccaggctggagtgcagtggcatgatctcagctcactgaaacctctgcctcctgggttcaagcaattctcctgcctcagcctccngagtagctgggactacaggcgtgtgccaacacgcccggctaattttttgtatttttattagagacggagtttcaccgtgttagccaggatggtctcgatcgcttgacctcgtgatccaccctcctcggcctcccaaagtgctgggattacaggtgtgagccaccgcgcccggcctcattcccctcatttttgaccgtaaggatttcccctttcttgtaagttctgctatgtatttaaaagaatgttttctacattttatccagcatttctctgtgttctgttggaagggaagggcttaggtatctagtttgatacataggtagaagtggaacatttctctgtcccccagctgtcatcatataagataaacatcagataaaaagccacctgaaagtaaaactactgactcgtgtattagtgagtataatctcttctccatccttaggaaaatgttcatcccagctgcggagattaacaaatgggtgattgagctttctcctcgtatttggaccttgaaggttatataaatttttttcttatgaagagttggcatttctttttattgccaatggcaggcactcattcatatttgatctcctcaccttcccctcccctaaaaccaatctccagaactttttggactataaatttcttggtttgacttctggagaactgttcagaatattactttgcatttcaaattacaaacttaccttggtgtatctttttcttacaagctgcctaaatgaatatttggtatatattggtagttttattactatagtaaatcaaggaaatgcagtaaacttaaaatgtctttaagaaagccctgaaatcttcatgggtgaaattagaaattatcaactagataatagtatagataaatgaatttgtagctaattcttgctagttgttgcatccagagagctttgaataacatcattaatctactctttagccttgcatggtatgctatgaggctcctgttctgttcaagtattctaatcaatggctttgaaaagtttatcaaatttacatacagatcacaagcctaggagaaataactaattcacagatgacagaattaagattataaaagattttttttttgtaattttagtagagacagggttgccattgtattccagccttggcgacagagcaagactctgcctcaaaaaaaaaaaaaaaaaggttttggcaagctggaactctttctgcaaatgactaagatagaaaactgccaaggacaaatgaggagtagttagattttgaaaatattaatcatagaatagttgttgtatgctaagtcactgacccatattatgtacagcatttctgatctttactttgcaagattagtgatactatcccaatacactgctggagaaatcagaatttggagaaataagttgtccaaggcaagaagatagtaaattataagtacaagtgtaatatggacagtatctaacttgaaaagatttcaggcgaaaagaatctggggtttgccagtcagttgctcaaaaggtcaatgaaaaccaaatagtgaagctatcagagaagctaataaattatagactgcttgaacagttgtgtccagattaagggagataatagctttcccaccctactttgtgcaggtcatacctccccaaagtgtttacctaatcagtaggttcacaaactcttggtcattatagtatatgcctaaaatgtatgcacttaggaatgctaaaaatttaaatatggtctaaagcaaataaaagcaaagaggaaaaactttggacatcgtaaagactagaatagtcttttaaaaagaaagccagtatattggtttgaaatatagagatgtgtcccaatttcaagtattttaattgcaccttaatgaaattatctattttctatagattttagtactattgaatgtattactttactgttacctgaatttattataaagtgtttttgaataaataattctaaaagcatatactaagactcattcactttattcaaatatttgtgtgttctgtgtgccaggcatgggactcgttctaaggagaaagcagtgagcaaggcaggcatagtctgcctatataaagctcccaatctgaggaggataggcaactgaccacgcagtgtgaaccggggagcctattgcacaaccagtctgataatgctgcatctcagtctaaatatcctagtagtgtttcttagtcgcctcctgacaaaaaggcaaatatgaatgttctttctttgggcctagaaagtgatctagttgacatttctagcctaaaag

SEQ ID NO: 279247 - DNA, 13840 bp, Homo sapiens
  misc_feature (340)..(340): n is a, c, g, or t
  misc_feature (2481)..(2481): n is a, c, g, or t
  misc_feature (3071)..(3071): n is a, c, g, or t
  misc_feature (11595)..(11595): n is a, c, g, or t
ccgcgtccgcgcttacccaatacaagccgggctacgtccgagggtaacaacatgatcaaaaccacagcaggaaccacaataaggaacaagactcaggttaaagcaaacacagcgacagctcctgcgccgcatctcctggttccagtggcggcactgaactcgcggcaatttgtcccgcctctttcgcttcacggcagccaatcgcttccgccagagaaagaaaggcgccgaaatgaaacccgcctccgttcgccttcggaactgtcgtcacttccgtcctcagacttggaggggcggggatgaggagggcggggaggacgacgagggcgaagagggtggntgagagccccggagcccgagccgaagggcgagccgcaaacgctaagtcgctggccattggtggacatggcgcaggcgcgtttgctccgacgggccgaatgttttggggcagtgttttgagcgcggagaccgcgtgatactggatgcgcatgggcataccgtgctctgcggctgcttggcgttgcttcttcctccagaagtgggcgctgggcagtcacgcagggtttgaaccggaagcgggagtaggtagctgcgtggctaacggagaaaagaagccgtggccacgggaggaggcgagaggagtcgggatctgcgctgcagccaccgccgcggttgatactactttgaccttccgagtgcagtgaggcatacatcacaatttggaattatgcattggtttatcaatttacttgtttattgtcaccctgctgcccagatatgacttcatgaggacagtgatgtgtgttctgaaattgtgaaccatgagtctagtacttaatgatctgcttatctgctgccgtcaactagaacatgatagagctacagaacgaaagaaagaagttgagaaatttaagcgcctgattcgagatcctgaaacaattaaacatctagatcggcattcagattccaaacaaggaaaatatttgaattgggatgctgtttttagatttttacagaaatatattcagaaagaaacagaatgtctgagaatagcaaaaccaaatgtatcagcctcaacacaagcctccaggcagaaaaagatgcaggaaatcagtagtttggtcaaatacttcatcaaatgtgcaaacagaagagcacctaggctaaaatgtcaagaactcttaaattatatcatggatacagtgaaagattcatctaatggtgctatttacggagctgattgtagcaacatactactcaaagacattctttctgtgagaaaatactggtgtgaaatatctcagcaacagtggttagaattgttctctgtgtacttcaggctctatctgaaaccttcacaagatgttcatagagttttagtggctagaataattcatgctgttaccaaaggatgctgttctcagactgacggattaaattccaaatttttggactttttttccaaggctattcagtgtgcgagacaagaaaagagctcttcaggtctaaatcatatcttagcagctcttactatcttcctcaagactttggctgtcaactttcgaattcgagtgtgtgaattaggagatgaaattcttcccactttgctttatatttggactcaacataggcttaatgattctttaaaagaagtcattattgaattatttcaactgcaaatttatatccatcatccgaaaggagccaaaacccaagaaaaaggtgcttatgaatcaacaaaatggagaagtattttatacaacttatatgatctgctagtgaatgagataagtcatataggaagtagaggaaagtattcttcaggatttcgtaatattgccgtcaaagaaaatttgattgaattgatggcagatatctgtcaccaggtttttaatgaagataccagatccttggagatttctcaatcttacactactacacaaagagaatctagtgattacagtgtcccttgcaaaaggaagaaaatagaactaggctgggaagtaataaaagatcaccttcagaagtcacagaatgattttgatcttgtgccttggctacagattgcaacccaattaatatcaaagtatcctgcaagtttacctaactgtgagctgtctccattactgatgatactatctcagcttctaccccaacagcgacatggggaacgtacaccatatgtgttacgatgccttacggaagttgcattgtgtcaagacaagaggtcaaacctagaaagctcacaaaagtcagatttattaaaactctggaataaaatttggtgtattacctttcgtggtataagttctgagcaaatacaagctgaaaactttggcttacttggagccataattcagggtagtttagttgaggttgacagagaattctggaagttatttactgggtcagcctgcagaccttcatgtcctgcagtatgctgtttgactttggcactgaccaccagtatagttccaggancggtaaaaatgggaatagagcaaaatatgtgtgaagtaaatagaagcttttctttaaaggaatcaataatgaaatggctcttattctatcagttagagggtgacttagaaaatagcacagaagtgcctccaattcttcacagtaattttcctcatcttgtactggagaaaattcttgtgagtctcactatgaaaaactgtaaagctgcaatgaattttttccaaagcgtgccagaatgtgaacaccaccaaaaagataaagaagaactttcattctcagaagtagaagaactatttcttcagacaacttttgacaagatggactttttaaccattgtgagagaatgtggtatagaaaagcaccagtccagtattggcttctctgtccaccagaatctcaaggaatcactggatcgctgtcttctgggattatcagaacagcttctgaataattactcatctgagattacaaattcagaaactcttgtccggtgttcacgtcttttggtgggtgtccttggctgctactgttacatgggtgtaatagctgaagaggaagcatataagtcagaattattccagaaagccaantctctaatgcaatgtgcaggagaaagtatcactctgtttaaaaataagacaaatgaggaattcagaattggttccttgagaaatatgatgcagctatgtacacgttgcttgagcaactgtaccaagaagagtccaaataagattgcatctggctttttcctgcgattgttaacatcaaagctaatgaatgacattgcagatatttgtaaaagtttagcatccttcatcaaaaagccatttgaccgtggagaagtagaatcaatggaagatgatactaatggaaatctaatggaggtggaggatcagtcatccatgaatctatttaacgattaccctgatagtagtgttagtgatgcaaacgaacctggagagagccaaagtaccataggtgccattaatcctttagctgaagaatatctgtcaaagcaagatctacttttcttagacatgctcaagttcttgtgtttgtgtgtaactactgctcagaccaatactgtgtcctttagggcagctgatattcggaggaaattgttaatgttaattgattctagcacgctagaacctaccaaatccctccacctgcatatgtatctaatgcttttaaaggagcttcctggagaagagtaccccttgccaatggaagatgttcttgaacttctgaaaccactatccaatgtgtgttctttgtatcgtcgtgaccaagatgtttgtaaaactattttaaaccatgtccttcatgtagtgaaaaacctaggtcaaagcaatatggactctgagaacacaagggatgctcaaggacagtttcttacagtaattggagcattttggcatctaacaaaggagaggaaatatatattctctgtaagaatggccctagtaaattgccttaaaactttgcttgaggctgatccttattcaaaatgggccattcttaatgtaatgggaaaagactttcctgtaaatgaagtatttacacaatttcttgctgacaatcatcaccaagttcgcatgttggctgcagagtcaatcaatagattgttccaggacacgaagggagattcttccaggttactgaaagcacttcctttgaagcttcagcaaacagcttttgaaaatgcatacttgaaagctcaggaaggaatgagagaaatgtcccatagtgctgagaaccctgaaactttggatgaaatttataatagaaaatctgttttactgacgttgatagctgtggttttatcctgtagccctatctgcgaaaaacaggctttgtttgccctgtgtaaatctgtgaaagagaatggattagaacctcaccttgtgaaaaaggttttagagaaagtttctgaaacttttggatatagacgtttagaagactttatggcatctcatttagattatctggttttggaatggctaaatcttcaagatactgaatacaacttatcttcttttccttttattttattaaactacacaaatattgaggatttctatagatcttgttataaggttttgattccacatctggtgattagaagtcattttgatgaggtgaagtccattgctaatcagattcaagaggactggaaaagtcttctaacagactgctttccaaagattcttgtaaatattcttccttattttgcctatgagggtaccagagacagtgggatggcacagcaaagagagactgctaccaaggtctatgatatgcttaaaagtgaaaacttattgggaaaacagattgatcacttattcattagtaatttaccagagattgtggtggagttattgatgacgttacatgagccagcaaattctagtgccagtcagagcactgacctctgtgacttttcaggggatttggatcctgctcctaatccacctcattttccatcgcatgtgattaaagcaacatttgcctatatcagcaattgtcataaaaccaagttaaaaagcattttagaaattctttccaaaagccctgattcctatcagaaaattcttcttgccatatgtgagcaagcagctgaaacaaataatgtttataagaagcacagaattcttaaaatatatcacctgtttgttagtttattactgaaagatataaaaagtggcttaggaggagcttgggcctttgttcttcgagacgttatttatactttgattcactatatcaaccaaaggccttcttgtatcatggatgtgtcattacgtagcttctccctttgttgtgacttattaagtcaggtttgccagacagccgtgacttactgtaaggatgctctagaaaaccatcttcatgttattgttggtacacttataccccttgtgtatgagcaggtggaggttcagaaacaggtattggacttgttgaaatacttagtgatagataacaaggataatgaaaacctctatatcacgattaagcttttagatccttttcctgaccatgttgtttttaaggatttgcgtattactcagcaaaaaatcaaatacagtagaggacccttttcactcttggaggaaattaaccattttctctcagtaagtgtttatgatgcacttccattgacaagacttgaaggactaaaggatcttcgaagacaactggaactacataaagatcagatggtggacattatgagagcttctcaggataatccgcaagatgggattatggtgaaactagttgtcaatttgttgcagttatccaagatggcaataaaccacactggtgaaaaagaagttctagaggctgttggaagctgcttgggagaagtgggtcctatagatttctctaccatagctatacaacatagtaaagatgcatcttataccaaggcccttaagttatttgaagataaagaacttcagtggaccttcataatgctgacctacctgaataacacactggtagaagattgtgtcaaagttcgatcagcagctgttacctgtttgaaaaacattttagccacaaagactggacatagtttctgggagatttataagatgacaacagatccaatgctggcctatctacagccttttagaacatcaagaaaaaagtttttagaagtacccagatttgacaaagaaaacccttttgaaggcctggatgatataaatctgtggattcctctaagtgaaaatcatgacatttggataaagacactgacttgtgcttttttggacagtggaggcacaaaatgtgaaattcttcaattattaaagccaatgtgtgaagtgaaaactgacttttgtcagactgtacttccatacttgattcatgatattttactccaagatacaaatgaatcatggagaaatctgctttctacacatgttcagggatttttcaccagctgtcttcgacacttctcgcaaacgagccgatccacaacccctgcaaacttggattcagagtcagagcactttttccgatgctgtttggataaaaaatcacaaagaacaatgcttgctgttgtggactacatgagaagacaaaagagaccttcttcaggaacaatttttaatgatgctttctggctggatttaaattatctagaagttgccaaggtagctcagtcttgtgctgctcactttacagctttactctatgcagaaatctatgcagataagaaaagtatggatgatcaagagaaaagaagtcttgcatttgaagaaggaagccagagtacaactatttctagcttgagtgaaaaaagtaaagaagaaactggaataagtttacaggatcttctcttagaaatctacagaagtataggggagccagatagtttgtatggctgtggtggagggaagatgttacaacccattactagactacgaacatatgaacacgaagcaatgtggggcaaagccctagtaacatatgacctcgaaacagcaatcccctcatcaacacgccaggcaggaatcattcaggccttgcagaatttgggactctgccatattctttccgtctatttaaaaggattggattatgaaaataaagactggtgtcctgaactagaagaacttcattaccaagcagcatggaggaatatgcagtgggaccattgcacttccgtcagcaaagaagtagaaggaaccagttaccatgaatcattgtacaatgctctacaatctctaagagacagagaattctctacattttatgaaagtctcaaatatgccagagtaaaagaagtggaagagatgtgtaagcgcagccttgagtctgtgtattcgctctatcccacacttagcaggttgcaggccattggagagctggaaagcattggggagcttttctcaagatcagtcacacatagacaactctctgaagtatatattaagtggcagaaacactcccagcttctcaaggacagtgattttagttttcaggagcctatcatggctctacgcacagtcattttggagatcctgatggaaaaggaaatggacaactcacaaagagaatgtattaaggacattctcaccaaacaccttgtagaactctctatactggccagaactttcaagaacactcagctccctgaaagggcaatatttcaaattaaacagtacaattcagttagctgtggagtctctgagtggcagctggaagaagcacaagtattctgggcaaaaaaggagcagagtcttgccctgagtattctcaagcaaatgatcaagaagttggatgccagctgtgcagcgaacaatcccagcctaaaacttacatacacagaatgtctgagggtttgtggcaactggttagcagaaacgtgcttagaaaatcctgcggtcatcatgcagacctatctagaaaaggcagtagaagttgctggaaattatgatggagaaagtagtgatgagctaagaaatggaaaaatgaaggcatttctctcattagcccggttttcagatactcaataccaaagaattgaaaactacatgaaatcatcggaatttgaaaacaagcaagctctcctgaaaagagccaaagaggaagtaggtctccttagggaacataaaattcagacaaacagatacacagtaaaggttcagcgagagctggagttggatgaattagccctgcgtgcactgaaagaggatcgtaaacgcttcttatgtaaagcagttgaaaattatatcaactgcttattaagtggagaagaacatgatatgtgggtattccgactttgttccctctggcttgaaaattctggagtttctgaagtcaatggcatgatgaagagagacggaatgaagattccaacatataaatttttgcctcttatgtaccaattggctgctagaatggggaccaagatgatgggaggcctaggatttcatgaagtcctcaataatctaatctctagaatttcaatggatcacccccatcacactttgtttattatactggccttagcaaatgcaaacagagatgaatttctgactaaaccagaggtagccagaagaagcagaataactaaaaatgtgcctaaacaaagctctcagcttgatgaggatcgaacagaggctgcaaatagaataatatgtactatcagaagtaggagacctcagatggtcagaagtgttgaggcactttgtgatgcttatattatattagcaaacttagatgccactcagtggaagactcagagaaaaggcataaatattccagcagaccagccaattactaaacttaagaatttagaagatgttgttgtccctactatggaaattaaggtggaccacacaggagaatatggaaatctggtgactatacagtcatttaaagcagaatttcgcttagcaggaggtgtaaatttaccaaaaataatagattgtgtaggttccgatggcaaggagaggagacagcttgttaagggccgtgatgacctgagacaagatgctgtcatgcaacaggtcttccagatgtgtaatacattactgcagagaaacacggaaactaggaagaggaaattaactatctgtacttataaggtggttcccctctctcagcgaagtggtgttcttgaatggtgcacaggaactgtccccattggtgaatttcttgttaacaatgaagatggtgctcataaaagatacaggccaaatgatttcagtgcctttcagtgccaaaagaaaatgatggaggtgcaaaaaaagtcttttgaagagaaatatgaagtcttcatggatgtttgccaaaattttcaaccagttttccgttacttctgcatggaaaaattcttggatccagctatttggtttgagaagcgattggcttatacgcgcagtgtagctacttcttctattgttggttacatacttggacttggtgatagacatgtacagaatatcttgataaatgagcagtcagcagaacttgtacatatagatctaggtgttgcttttgaacagggcaaaatccttcctactcctgagacagttccttttagactcaccagagatattgtggatggcatgggcattacgggtgttgaaggtgtcttcagaagatgctgtgagaaaaccatggaagtgatgagaaactctcaggaaactctgttaaccattgtagaggtccttctatatgatccactctttgactggaccatgaatcctttgaaagctttgtatttacagcagaggccggaagatgaaactgagcttcaccctactctgaatgcagatgaccaagaatgcaaacgaaatctcagtgatattgaccagagtttcaacaaagtagctgaacgtgtcttaatgagactacaagagaaactgaaaggagtggaagaaggcactgtgctcagtgttggtggacaagtgaatttgctcatacagcaggccatagaccccaaaaatctcagccgacttttcccaggatggaaagcttgggtgtgatcttcagtatatgaattaccctttcattcagcctttagaaattatattttagcctttatttttaacctgccaacatactttaagtagggattaatatttaagtgaactattgtgggtttttttgaatgttggttttaatacttgatttaatcaccactcaaaaatgttttgatggtcttaaggaacatctctgctttcactctttagaaataatggtcattcgggctgggcgcagcggctcacgcctgtaatcccagcactttgggaggccgaggtgagcggatcacaaggtcaggagttcgagaccagcctggccaagagaccagcctggccagtatggtgaaaccctgtctctactaaaaatacaaaaattagccgagcatggtggcgggcacctgtaatcccagctactcgagaggctgaggcaggagaatctcttgaacctgggaggtgaaggttgctgtgggccaaaatcatgccattgcactccagcctgggtgacaagagcgaaactccatctcaaaaaaaaaaaaaaaaaacagaaacttatttggatttttcctagtaagatcactcagtgttactaaataatgaagttgttatggagaacaaatttcaaagacacagttagtgtagttactatttttttaagtgtgtattaaaacttctcattctattctctttatcttttaagcccttctgtactgtccatgtatgttatctttctgtgataacttcatagattgccttctagttcatgaattctcttgtcagatgtatataatctcttttaccctatccattgggcttcttctttcagaaattgtttttcatttctaattatgcatcatttttcagatctctgtttcttgatgtcatttttaatgtttttttaatgttttttatgtcactaattattttaaatgtctgtacttgatagacactgtaatagttctattaaatttagttcctgctgtttatatctgttgatttttgtatttgataggctgttcatccagttttgtctttttgaaaagtgagtttattttcagcaaggctttatctatgggaatcttgagtgtctgtttatgtcatattcccagggctgttgctgcacacaagcccattcttattttaatttcttggctttagggtttccatacctgaagtgtagcataaatactgataggagatttcccaggccaaggcaaacacacttcctcctcatctccttgtgctagtgggcagaatatttgattgatgcctttttcactgagagtataagcttccatgtgtcccacctttatggcaggggtggaaggaggtacatttaattcccactgcctgcctttggcaagccctgggttctttgctccccatatagatgtctaagctaaaagccgtgggttaatgagactggcaaattgttccaggacagctacagcatcagctcacatattcacctctctggtttttcattcccctcatttttttctgagacagagtcttgctctgtcacccaggctggagtgcagtggcatgatctcagctcactgaaacctctgcctcctgggttcaagcaattctcctgcctcagcctccngagtagctgggactacaggcgtgtgccaacacgcccggctaattttttgtatttttattagagacggagtttcaccgtgttagccaggatggtctcgatcgcttgacctcgtgatccaccctcctcggcctcccaaagtgctgggattacaggtgtgagccaccgcgcccggcctcattcccctcatttttgaccgtaaggatttcccctttcttgtaagttctgctatgtatttaaaagaatgttttctacattttatccagcatttctctgtgttctgttggaagggaagggcttaggtatctagtttgatacataggtagaagtggaacatttctctgtcccccagctgtcatcatataagataaacatcagataaaaagccacctgaaagtaaaactactgactcgtgtattagtgagtataatctcttctccatccttaggaaaatgttcatcccagctgcggagattaacaaatgggtgattgagctttctcctcgtatttggaccttgaaggttatataaatttttttcttatgaagagttggcatttctttttattgccaatggcaggcactcattcatatttgatctcctcaccttcccctcccctaaaaccaatctccagaactttttggactataaatttcttggtttgacttctggagaactgttcagaatattactttgcatttcaaattacaaacttaccttggtgtatctttttcttacaagctgcctaaatgaatatttggtatatattggtagttttattactatagtaaatcaaggaaatgcagtaaacttaatagataatagtatagataaatgaatttgtagctaattcttgctagttgttgcatccagagagctttgaataacatcattaatctactctttagccttgcatggtatgctatgaggctcctgttctgttcaagtattctaatcaatggctttgaaaagtttatcaaatttacatacagatcacaagcctaggagaaataactaattcacagatgacagaattaagattataaaagattttttttttgtaattttagtagagacagggttgccattgtattccagccttggcgacagagcaagactctgcctcaaaaaaaaaaaaaaaaaggttttggcaagctggaactctttctgcaaatgactaagatagaaaactgccaaggacaaatgaggagtagttagattttgaaaatattaatcatagaatagttgttgtatgctaagtcactgacccatattatgtacagcatttctgatctttactttgcaagattagtgatactatcccaatacactgctggagaaatcagaatttggagaaataagttgtccaaggcaagaagatagtaaattataagtacaagtgtaatatggacagtatctaacttgaaaagatttcaggcgaaaagaatctggggtttgccagtcagttgctcaaaaggtcaatgaaaaccaaatagtgaagctatcagagaagctaataaattatagactgcttgaacagttgtgtccagattaagggagataatagctttcccaccctactttgtgcaggtcatacctccccaaagtgtttacctaatcagtaggttcacaaactcttggtcattatagtatatgcctaaaatgtatgcacttaggaatgctaaaaatttaaatatggtctaaagcaaataaaagcaaagaggaaaaactttggacatcgtaaagactagaatagtcttttaaaaagaaagccagtatattggtttgaaatatagagatgtgtcccaatttcaagtattttaattgcaccttaatgaaattatctattttctatagattttagtactattgaatgtattactttactgttacctgaatttattataaagtgtttttgaataaataattctaaaagcatatactaagactcattcactttattcaaatatttgtgtgttctgtgtgccaggcatgggactcgttctaaggagaaagcagtgagcaaggcaggcatagtctgcctatataaagctcccaatctgaggaggataggcaactgaccacgcagtgtgaaccggggagcctattgcacaaccagtctgataatgctgcatctcagtctaaatatcctagtagtgtttcttagtcgcctcctgacaaaaaggcaaatatgaatgttctttctttgggcctagaaagtgatctagttgacatttctagcctaaaag

SEQ ID NO: 279248 - DNA, 11573 bp, Homo sapiens
  misc_feature (340)..(340): n is a, c, g, or t
  misc_feature (2481)..(2481): n is a, c, g, or t
  misc_feature (3071)..(3071): n is a, c, g, or t
ccgcgtccgcgcttacccaatacaagccgggctacgtccgagggtaacaacatgatcaaaaccacagcaggaaccacaataaggaacaagactcaggttaaagcaaacacagcgacagctcctgcgccgcatctcctggttccagtggcggcactgaactcgcggcaatttgtcccgcctctttcgcttcacggcagccaatcgcttccgccagagaaagaaaggcgccgaaatgaaacccgcctccgttcgccttcggaactgtcgtcacttccgtcctcagacttggaggggcggggatgaggagggcggggaggacgacgagggcgaagagggtggntgagagccccggagcccgagccgaagggcgagccgcaaacgctaagtcgctggccattggtggacatggcgcaggcgcgtttgctccgacgggccgaatgttttggggcagtgttttgagcgcggagaccgcgtgatactggatgcgcatgggcataccgtgctctgcggctgcttggcgttgcttcttcctccagaagtgggcgctgggcagtcacgcagggtttgaaccggaagcgggagtaggtagctgcgtggctaacggagaaaagaagccgtggccacgggaggaggcgagaggagtcgggatctgcgctgcagccaccgccgcggttgatactactttgaccttccgagtgcagtgaggcatacatcacaatttggaattatgcattggtttatcaatttacttgtttattgtcaccctgctgcccagatatgacttcatgaggacagtgatgtgtgttctgaaattgtgaaccatgagtctagtacttaatgatctgcttatctgctgccgtcaactagaacatgatagagctacagaacgaaagaaagaagttgagaaatttaagcgcctgattcgagatcctgaaacaattaaacatctagatcggcattcagattccaaacaaggaaaatatttgaattgggatgctgtttttagatttttacagaaatatattcagaaagaaacagaatgtctgagaatagcaaaaccaaatgtatcagcctcaacacaagcctccaggcagaaaaagatgcaggaaatcagtagtttggtcaaatacttcatcaaatgtgcaaacagaagagcacctaggctaaaatgtcaagaactcttaaattatatcatggatacagtgaaagattcatctaatggtgctatttacggagctgattgtagcaacatactactcaaagacattctttctgtgagaaaatactggtgtgaaatatctcagcaacagtggttagaattgttctctgtgtacttcaggctctatctgaaaccttcacaagatgttcatagagttttagtggctagaataattcatgctgttaccaaaggatgctgttctcagactgacggattaaattccaaatttttggactttttttccaaggctattcagtgtgcgagacaagaaaagagctcttcaggtctaaatcatatcttagcagctcttactatcttcctcaagactttggctgtcaactttcgaattcgagtgtgtgaattaggagatgaaattcttcccactttgctttatatttggactcaacataggcttaatgattctttaaaagaagtcattattgaattatttcaactgcaaatttatatccatcatccgaaaggagccaaaacccaagaaaaaggtgcttatgaatcaacaaaatggagaagtattttatacaacttatatgatctgctagtgaatgagataagtcatataggaagtagaggaaagtattcttcaggatttcgtaatattgccgtcaaagaaaatttgattgaattgatggcagatatctgtcaccaggtttttaatgaagataccagatccttggagatttctcaatcttacactactacacaaagagaatctagtgattacagtgtcccttgcaaaaggaagaaaatagaactaggctgggaagtaataaaagatcaccttcagaagtcacagaatgattttgatcttgtgccttggctacagattgcaacccaattaatatcaaagtatcctgcaagtttacctaactgtgagctgtctccattactgatgatactatctcagcttctaccccaacagcgacatggggaacgtacaccatatgtgttacgatgccttacggaagttgcattgtgtcaagacaagaggtcaaacctagaaagctcacaaaagtcagatttattaaaactctggaataaaatttggtgtattacctttcgtggtataagttctgagcaaatacaagctgaaaactttggcttacttggagccataattcagggtagtttagttgaggttgacagagaattctggaagttatttactgggtcagcctgcagaccttcatgtcctgcagtatgctgtttgactttggcactgaccaccagtatagttccaggancggtaaaaatgggaatagagcaaaatatgtgtgaagtaaatagaagcttttctttaaaggaatcaataatgaaatggctcttattctatcagttagagggtgacttagaaaatagcacagaagtgcctccaattcttcacagtaattttcctcatcttgtactggagaaaattcttgtgagtctcactatgaaaaactgtaaagctgcaatgaattttttccaaagcgtgccagaatgtgaacaccaccaaaaagataaagaagaactttcattctcagaagtagaagaactatttcttcagacaacttttgacaagatggactttttaaccattgtgagagaatgtggtatagaaaagcaccagtccagtattggcttctctgtccaccagaatctcaaggaatcactggatcgctgtcttctgggattatcagaacagcttctgaataattactcatctgagattacaaattcagaaactcttgtccggtgttcacgtcttttggtgggtgtccttggctgctactgttacatgggtgtaatagctgaagaggaagcatataagtcagaattattccagaaagccaantctctaatgcaatgtgcaggagaaagtatcactctgtttaaaaataagacaaatgaggaattcagaattggttccttgagaaatatgatgcagctatgtacacgttgcttgagcaactgtaccaagaagagtccaaataagattgcatctggctttttcctgcgattgttaacatcaaagctaatgaatgacattgcagatatttgtaaaagtttagcatccttcatcaaaaagccatttgaccgtggagaagtagaatcaatggaagatgatactaatggaaatctaatggaggtggaggatcagtcatccatgaatctatttaacgattaccctgatagtagtgttagtgatgcaaacgaacctggagagagccaaagtaccataggtgccattaatcctttagctgaagaatatctgtcaaagcaagatctacttttcttagacatgctcaagttcttgtgtttgtgtgtaactactgctcagaccaatactgtgtcctttagggcagctgatattcggaggaaattgttaatgttaattgattctagcacgctagaacctaccaaatccctccacctgcatatgtatctaatgcttttaaaggagcttcctggagaagagtaccccttgccaatggaagatgttcttgaacttctgaaaccactatccaatgtgtgttctttgtatcgtcgtgaccaagatgtttgtaaaactattttaaaccatgtccttcatgtagtgaaaaacctaggtcaaagcaatatggactctgagaacacaagggatgctcaaggacagtttcttacagtaattggagcattttggcatctaacaaaggagaggaaatatatattctctgtaagaatggccctagtaaattgccttaaaactttgcttgaggctgatccttattcaaaatgggccattcttaatgtaatgggaaaagactttcctgtaaatgaagtatttacacaatttcttgctgacaatcatcaccaagttcgcatgttggctgcagagtcaatcaatagattgttccaggacacgaagggagattcttccaggttactgaaagcacttcctttgaagcttcagcaaacagcttttgaaaatgcatacttgaaagctcaggaaggaatgagagaaatgtcccatagtgctgagaaccctgaaactttggatgaaatttataatagaaaatctgttttactgacgttgatagctgtggttttatcctgtagccctatctgcgaaaaacaggctttgtttgccctgtgtaaatctgtgaaagagaatggattagaacctcaccttgtgaaaaaggttttagagaaagtttctgaaacttttggatatagacgtttagaagactttatggcatctcatttagattatctggttttggaatggctaaatcttcaagatactgaatacaacttatcttcttttccttttattttattaaactacacaaatattgaggatttctatagatcttgttataaggttttgattccacatctggtgattagaagtcattttgatgaggtgaagtccattgctaatcagattcaagaggactggaaaagtcttctaacagactgctttccaaagattcttgtaaatattcttccttattttgcctatgagggtaccagagacagtgggatggcacagcaaagagagactgctaccaaggtctatgatatgcttaaaagtgaaaacttattgggaaaacagattgatcacttattcattagtaatttaccagagattgtggtggagttattgatgacgttacatgagccagcaaattctagtgccagtcagagcactgacctctgtgacttttcaggggatttggatcctgctcctaatccacctcattttccatcgcatgtgattaaagcaacatttgcctatatcagcaattgtcataaaaccaagttaaaaagcattttagaaattctttccaaaagccctgattcctatcagaaaattcttcttgccatatgtgagcaagcagctgaaacaaataatgtttataagaagcacagaattcttaaaatatatcacctgtttgttagtttattactgaaagatataaaaagtggcttaggaggagcttgggcctttgttcttcgagacgttatttatactttgattcactatatcaaccaaaggccttcttgtatcatggatgtgtcattacgtagcttctccctttgttgtgacttattaagtcaggtttgccagacagccgtgacttactgtaaggatgctctagaaaaccatcttcatgttattgttggtacacttataccccttgtgtatgagcaggtggaggttcagaaacaggtattggacttgttgaaatacttagtgatagataacaaggataatgaaaacctctatatcacgattaagcttttagatccttttcctgaccatgttgtttttaaggatttgcgtattactcagcaaaaaatcaaatacagtagaggacccttttcactcttggaggaaattaaccattttctctcagtaagtgtttatgatgcacttccattgacaagacttgaaggactaaaggatcttcgaagacaactggaactacataaagatcagatggtggacattatgagagcttctcaggataatccgcaagatgggattatggtgaaactagttgtcaatttgttgcagttatccaagatggcaataaaccacactggtgaaaaagaagttctagaggctgttggaagctgcttgggagaagtgggtcctatagatttctctaccatagctatacaacatagtaaagatgcatcttataccaaggcccttaagttatttgaagataaagaacttcagtggaccttcataatgctgacctacctgaataacacactggtagaagattgtgtcaaagttcgatcagcagctgttacctgtttgaaaaacattttagccacaaagactggacatagtttctgggagatttataagatgacaacagatccaatgctggcctatctacagccttttagaacatcaagaaaaaagtttttagaagtacccagatttgacaaagaaaacccttttgaaggcctggatgatataaatctgtggattcctctaagtgaaaatcatgacatttggataaagacactgacttgtgcttttttggacagtggaggcacaaaatgtgaaattcttcaattattaaagccaatgtgtgaagtgaaaactgacttttgtcagactgtacttccatacttgattcatgatattttactccaagatacaaatgaatcatggagaaatctgctttctacacatgttcagggatttttcaccagctgtcttcgacacttctcgcaaacgagccgatccacaacccctgcaaacttggattcagagtcagagcactttttccgatgctgtttggataaaaaatcacaaagaacaatgcttgctgttgtggactacatgagaagacaaaagagaccttcttcaggaacaatttttaatgatgctttctggctggatttaaattatctagaagttgccaaggtagctcagtcttgtgctgctcactttacagctttactctatgcagaaatctatgcagataagaaaagtatggatgatcaagagaaaagaagtcttgcatttgaagaaggaagccagagtacaactatttctagcttgagtgaaaaaagtaaagaagaaactggaataagtttacaggatcttctcttagaaatctacagaagtataggggagccagatagtttgtatggctgtggtggagggaagatgttacaacccattactagactacgaacatatgaacacgaagcaatgtggggcaaagccctagtaacatatgacctcgaaacagcaatcccctcatcaacacgccaggcaggaatcattcaggccttgcagaatttgggactctgccatattctttccgtctatttaaaaggattggattatgaaaataaagactggtgtcctgaactagaagaacttcattaccaagcagcatggaggaatatgcagtgggaccattgcacttccgtcagcaaagaagtagaaggaaccagttaccatgaatcattgtacaatgctctacaatctctaagagacagagaattctctacattttatgaaagtctcaaatatgccagagtaaaagaagtggaagagatgtgtaagcgcagccttgagtctgtgtattcgctctatcccacacttagcaggttgcaggccattggagagctggaaagcattggggagcttttctcaagatcagtcacacatagacaactctctgaagtatatattaagtggcagaaacactcccagcttctcaaggacagtgattttagttttcaggagcctatcatggctctacgcacagtcattttggagatcctgatggaaaaggaaatggacaactcacaaagagaatgtattaaggacattctcaccaaacaccttgtagaactctctatactggccagaactttcaagaacactcagctccctgaaagggcaatatttcaaattaaacagtacaattcagttagctgtggagtctctgagtggcagctggaagaagcacaagtattctgggcaaaaaaggagcagagtcttgccctgagtattctcaagcaaatgatcaagaagttggatgccagctgtgcagcgaacaatcccagcctaaaacttacatacacagaatgtctgagggtttgtggcaactggttagcagaaacgtgcttagaaaatcctgcggtcatcatgcagacctatctagaaaaggcagtagaagttgctggaaattatgatggagaaagtagtgatgagctaagaaatggaaaaatgaaggcatttctctcattagcccggttttcagatactcaataccaaagaattgaaaactacatgaaatcatcggaatttgaaaacaagcaagctctcctgaaaagagccaaagaggaagtaggtctccttagggaacataaaattcagacaaacagatacacagtaaaggttcagcgagagctggagttggatgaattagccctgcgtgcactgaaagaggatcgtaaacgcttcttatgtaaagcagttgaaaattatatcaactgcttattaagtggagaagaacatgatatgtgggtattccgactttgttccctctggcttgaaaattctggagtttctgaagtcaatggcatgatgaagagagacggaatgaagattccaacatataaatttttgcctcttatgtaccaattggctgctagaatggggaccaagatgatgggaggcctaggatttcatgaagtcctcaataatctaatctctagaatttcaatggatcacccccatcacactttgtttattatactggccttagcaaatgcaaacagagatgaatttctgactaaaccagaggtagccagaagaagcagaataactaaaaatgtgcctaaacaaagctctcagcttgatgaggatcgaacagaggctgcaaatagaataatatgtactatcagaagtaggagacctcagatggtcagaagtgttgaggcactttgtgatgcttatattatattagcaaacttagatgccactcagtggaagactcagagaaaaggcataaatattccagcagaccagccaattactaaacttaagaatttagaagatgttgttgtccctactatggaaattaaggtggaccacacaggagaatatggaaatctggtgactatacagtcatttaaagcagaatttcgcttagcaggaggtgtaaatttaccaaaaataatagattgtgtaggttccgatggcaaggagaggagacagcttgttaagggccgtgatgacctgagacaagatgctgtcatgcaacaggtcttccagatgtgtaatacattactgcagagaaacacggaaactaggaagaggaaattaactatctgtacttataaggtggttcccctctctcagcgaagtggtgttcttgaatggtgcacaggaactgtccccattggtgaatttcttgttaacaatgaagatggtgctcataaaagatacaggccaaatgatttcagtgcctttcagtgccaaaagaaaatgatggaggtgcaaaaaaagtcttttgaagagaaatatgaagtcttcatggatgtttgccaaaattttcaaccagttttccgttacttctgcatggaaaaattcttggatccagctatttggtttgagaagcgattggcttatacgcgcagtgtagctacttcttctattgttggttacatacttggacttggtgatagacatgtacagaatatcttgataaatgagcagtcagcagaacttgtacatatagatctaggtgttgcttttgaacagggcaaaatccttcctactcctgagacagttccttttagactcaccagagatattgtggatggcatgggcattacgggtgttgaaggtgtcttcagaagatgctgtgagaaaaccatggaagtgatgagaaactctcaggaaactctgttaaccattgtagaggtccttctatatgatccactctttgactggaccatgaatcctttgaaagctttgtatttacagcagaggccggaagatgaaactgagcttcaccctactctgaatgcagatgaccaagaatgcaaacgaaatctcagtgatattgaccagagtttcaacaaagtagctgaacgtgtcttaatgagactacaagagaaactgaaaggagtggaagaaggcactgtgctcagtgttggtggacaagtgaatttgctcatacagcaggccatagaccccaaaaatctcagccgacttttcccaggatggaaagcttgggtgtgatcttcagtatatgaattaccctttcattcagcctttagaaattatattttagcctttatttttaacctgccaacatactttaagtagggattaatatttaagtgaactattgtgggtttttttgaatgttggttttaatacttgatttaatcaccactcaaaaatgttttgatggtcttaaggaacatctctgctttcactctttagaaataatggtcattcgggctgggcgcagcggctcacgcctgtaatcccagcactttgggaggccgaggtgagcggatcacaaggtcaggagttcgagaccagcctggccaagagaccagcctggccagtatggtgaaaccctgtctctactaaaaatacaaaaattagccgagcatggtggcgggcacctgtaatcccagctactcgagaggctgaggcaggagaatctcttgaacctgggaggtgaaggttgctgtgggccaaaatcatgccattgcactccagcctgggtgacaagagcgaaactccatctcaaaaaaaaaaaaaaaaaacagaaacttatttggatttttcctagtaagatcactcagtgttactaaataatgaagttgttatggagaacaaatttcaaagacacagttagtgtagttactatttttttaagtgtgtattaaaacttctcattctattctctttatcttttaagcccttctgtactgtccatgtatgttatctttctgtgataacttcatagattgccttctagttcatgaattctcttgtcagatgtatataatctcttttaccctatccattgggcttcttctttcagaaattgtttttcatttctaattatgcatcatttttcagatctctgtttcttgatgtcatttttaatgtttttttaatgttttttatgtcactaattattttaaatgtctgtacttgatagacactgtaatagttctattaaatttagttcctgctgtttatatctgttgatttttgtatttgataggctgttcatccagttttgtctttttgaaaagtgagtttattttcagcaaggctttatctatgggaatcttgagtgtctgtttatgtcatattcccagggctgttgctgcacacaagcccattcttattttaatttcttggctttagggtttccatacctgaagtgtagcataaatactgataggagatttcccaggccaaggcaaacacacttcctcctcatctccttgtgctagtgggcagaatatttgattgatgcctttttcactgagagtataagcttccatgtgtcccacctttatggcaggggtggaaggaggtacatttaattcccactgcctgcctttggcaagccctgggttctttgactccagcctgggcgacagagcaagactccatctcaaaaaaaaaaaaaaaaaaacagaacccgttttggatttttcctaataagatcactcaggggtactaaataatgaaagttgttatgggaacaaatttcaaagacacagctagggtaggttctattttttttaagtgggggattaaaaacttctaattctattctctttattcttt

SEQ ID NO: 279249 - DNA, 13407 bp, Homo sapiens
  misc_feature (340)..(340): n is a, c, g, or t
  misc_feature (2393)..(2393): n is a, c, g, or t
  misc_feature (2983)..(2983): n is a, c, g, or t
  misc_feature (11419)..(11419): n is a, c, g, or t
ccgcgtccgcgcttacccaatacaagccgggctacgtccgagggtaacaacatgatcaaaaccacagcaggaaccacaataaggaacaagactcaggttaaagcaaacacagcgacagctcctgcgccgcatctcctggttccagtggcggcactgaactcgcggcaatttgtcccgcctctttcgcttcacggcagccaatcgcttccgccagagaaagaaaggcgccgaaatgaaacccgcctccgttcgccttcggaactgtcgtcacttccgtcctcagacttggaggggcggggatgaggagggcggggaggacgacgagggcgaagagggtggntgagagccccggagcccgagccgaagggcgagccgcaaacgctaagtcgctggccattggtggacatggcgcaggcgcgtttgctccgacgggccgaatgttttggggcagtgttttgagcgcggagaccgcgtgatactggatgcgcatgggcataccgtgctctgcggctgcttggcgttgcttcttcctccagaagtgggcgctgggcagtcacgcagggtttgaaccggaagcgggagtaggtagctgcgtggctaacggagaaaagaagccgtggccacgggaggaggcgagaggagtcgggatctgcgctgcagccaccgccgcggttgatactactttgaccttccgagtgcagtgacagtgatgtgtgttctgaaattgtgaaccatgagtctagtacttaatgatctgcttatctgctgccgtcaactagaacatgatagagctacagaacgaaagaaagaagttgagaaatttaagcgcctgattcgagatcctgaaacaattaaacatctagatcggcattcagattccaaacaaggaaaatatttgaattgggatgctgtttttagatttttacagaaatatattcagaaagaaacagaatgtctgagaatagcaaaaccaaatgtatcagcctcaacacaagcctccaggcagaaaaagatgcaggaaatcagtagtttggtcaaatacttcatcaaatgtgcaaacagaagagcacctaggctaaaatgtcaagaactcttaaattatatcatggatacagtgaaagattcatctaatggtgctatttacggagctgattgtagcaacatactactcaaagacattctttctgtgagaaaatactggtgtgaaatatctcagcaacagtggttagaattgttctctgtgtacttcaggctctatctgaaaccttcacaagatgttcatagagttttagtggctagaataattcatgctgttaccaaaggatgctgttctcagactgacggattaaattccaaatttttggactttttttccaaggctattcagtgtgcgagacaagaaaagagctcttcaggtctaaatcatatcttagcagctcttactatcttcctcaagactttggctgtcaactttcgaattcgagtgtgtgaattaggagatgaaattcttcccactttgctttatatttggactcaacataggcttaatgattctttaaaagaagtcattattgaattatttcaactgcaaatttatatccatcatccgaaaggagccaaaacccaagaaaaaggtgcttatgaatcaacaaaatggagaagtattttatacaacttatatgatctgctagtgaatgagataagtcatataggaagtagaggaaagtattcttcaggatttcgtaatattgccgtcaaagaaaatttgattgaattgatggcagatatctgtcaccaggtttttaatgaagataccagatccttggagatttctcaatcttacactactacacaaagagaatctagtgattacagtgtcccttgcaaaaggaagaaaatagaactaggctgggaagtaataaaagatcaccttcagaagtcacagaatgattttgatcttgtgccttggctacagattgcaacccaattaatatcaaagtatcctgcaagtttacctaactgtgagctgtctccattactgatgatactatctcagcttctaccccaacagcgacatggggaacgtacaccatatgtgttacgatgccttacggaagttgcattgtgtcaagacaagaggtcaaacctagaaagctcacaaaagtcagatttattaaaactctggaataaaatttggtgtattacctttcgtggtataagttctgagcaaatacaagctgaaaactttggcttacttggagccataattcagggtagtttagttgaggttgacagagaattctggaagttatttactgggtcagcctgcagaccttcatgtcctgcagtatgctgtttgactttggcactgaccaccagtatagttccaggancggtaaaaatgggaatagagcaaaatatgtgtgaagtaaatagaagcttttctttaaaggaatcaataatgaaatggctcttattctatcagttagagggtgacttagaaaatagcacagaagtgcctccaattcttcacagtaattttcctcatcttgtactggagaaaattcttgtgagtctcactatgaaaaactgtaaagctgcaatgaattttttccaaagcgtgccagaatgtgaacaccaccaaaaagataaagaagaactttcattctcagaagtagaagaactatttcttcagacaacttttgacaagatggactttttaaccattgtgagagaatgtggtatagaaaagcaccagtccagtattggcttctctgtccaccagaatctcaaggaatcactggatcgctgtcttctgggattatcagaacagcttctgaataattactcatctgagattacaaattcagaaactcttgtccggtgttcacgtcttttggtgggtgtccttggctgctactgttacatgggtgtaatagctgaagaggaagcatataagtcagaattattccagaaagccaantctctaatgcaatgtgcaggagaaagtatcactctgtttaaaaataagacaaatgaggaattcagaattggttccttgagaaatatgatgcagctatgtacacgttgcttgagcaactgtaccaagaagagtccaaataagattgcatctggctttttcctgcgattgttaacatcaaagctaatgaatgacattgcagatatttgtaaaagtttagcatccttcatcaaaaagccatttgaccgtggagaagtagaatcaatggaagatgatactaatggaaatctaatggaggtggaggatcagtcatccatgaatctatttaacgattaccctgatagtagtgttagtgatgcaaacgaacctggagagagccaaagtaccataggtgccattaatcctttagctgaagaatatctgtcaaagcaagatctacttttcttagacatgctcaagttcttgtgtttgtgtgtaactactgctcagaccaatactgtgtcctttagggcagctgatattcggaggaaattgttaatgttaattgattctagcacgctagaacctaccaaatccctccacctgcatatgtatctaatgcttttaaaggagcttcctggagaagagtaccccttgccaatggaagatgttcttgaacttctgaaaccactatccaatgtgtgttctttgtatcgtcgtgaccaagatgtttgtaaaactattttaaaccatgtccttcatgtagtgaaaaacctaggtcaaagcaatatggactctgagaacacaagggatgctcaaggacagtttcttacagtaattggagcattttggcatctaacaaaggagaggaaatatatattctctgtaagaatggccctagtaaattgccttaaaactttgcttgaggctgatccttattcaaaatgggccattcttaatgtaatgggaaaagactttcctgtaaatgaagtatttacacaatttcttgctgacaatcatcaccaagttcgcatgttggctgcagagtcaatcaatagattgttccaggacacgaagggagattcttccaggttactgaaagcacttcctttgaagcttcagcaaacagcttttgaaaatgcatacttgaaagctcaggaaggaatgagagaaatgtcccatagtgctgagaaccctgaaactttggatgaaatttataatagaaaatctgttttactgacgttgatagctgtggttttatcctgtagccctatctgcgaaaaacaggctttgtttgccctgtgtaaatctgtgaaagagaatggattagaacctcaccttgtgaaaaaggttttagagaaagtttctgaaacttttggatatagacgtttagaagactttatggcatctcatttagattatctggttttggaatggctaaatcttcaagatactgaatacaacttatcttcttttccttttattttattaaactacacaaatattgaggatttctatagatcttgttataaggttttgattccacatctggtgattagaagtcattttgatgaggtgaagtccattgctaatcagattcaagaggactggaaaagtcttctaacagactgctttccaaagattcttgtaaatattcttccttattttgcctatgagggtaccagagacagtgggatggcacagcaaagagagactgctaccaaggtctatgatatgcttaaaagtgaaaacttattgggaaaacagattgatcacttattcattagtaatttaccagagattgtggtggagttattgatgacgttacatgagccagcaaattctagtgccagtcagagcactgacctctgtgacttttcaggggatttggatcctgctcctaatccacctcattttccatcgcatgtgattaaagcaacatttgcctatatcagcaattgtcataaaaccaagttaaaaagcattttagaaattctttccaaaagccctgattcctatcagaaaattcttcttgccatatgtgagcaagcagctgaaacaaataatgtttataagaagcacagaattcttaaaatatatcacctgtttgttagtttattactgaaagatataaaaagtggcttaggaggagcttgggcctttgttcttcgagacgttatttatactttgattcactatatcaaccaaaggccttcttgtatcatggatgtgtcattacgtagcttctccctttgttgtgacttattaagtcaggtttgccagacagccgtgacttactgtaaggatgctctagaaaaccatcttcatgttattgttggtacacttataccccttgtgtatgagcaggtggaggttcagaaacaggtattggacttgttgaaatacttagtgatagataacaaggataatgaaaacctctatatcacgattaagcttttagatccttttcctgaccatgttgtttttaaggatttgcgtattactcagcaaaaaatcaaatacagtagaggacccttttcactcttggaggaaattaaccattttctctcagtaagtgtttatgatgcacttccattgacaagacttgaaggactaaaggatcttcgaagacaactggaactacataaagatcagatggtggacattatgagagcttctcaggataatccgcaagatgggattatggtgaaactagttgtcaatttgttgcagttatccaagatggcaataaaccacactggtgaaaaagaagttctagaggctgttggaagctgcttgggagaagtgggtcctatagatttctctaccatagctatacaacatagtaaagatgcatcttataccaaggcccttaagttatttgaagataaagaacttcagtggaccttcataatgctgacctacctgaataacacactggtagaagattgtgtcaaagttcgatcagcagctgttacctgtttgaaaaacattttagccacaaagactggacatagtttctgggagatttataagatgacaacagatccaatgctggcctatctacagccttttagaacatcaagaaaaaagtttttagaagtacccagatttgacaaagaaaacccttttgaaggcctggatgatataaatctgtggattcctctaagtgaaaatcatgacatttggataaagacactgacttgtgcttttttggacagtggaggcacaaaatgtgaaattcttcaattattaaagccaatgtgtgaagtgaaaactgacttttgtcagactgtacttccatacttgattcatgatattttactccaagatacaaatgaatcatggagaaatctgctttctacacatgttcagggatttttcaccagctgtcttcgacacttctcgcaaacgagccgatccacaacccctgcaaacttggattcagaccttcttcaggaacaatttttaatgatgctttctggctggatttaaattatctagaagttgccaaggtagctcagtcttgtgctgctcactttacagctttactctatgcagaaatctatgcagataagaaaagtatggatgatcaagagaaaagaagtcttgcatttgaagaaggaagccagagtacaactatttctagcttgagtgaaaaaagtaaagaagaaactggaataagtttacaggatcttctcttagaaatctacagaagtataggggagccagatagtttgtatggctgtggtggagggaagatgttacaacccattactagactacgaacatatgaacacgaagcaatgtggggcaaagccctagtaacatatgacctcgaaacagcaatcccctcatcaacacgccaggcaggaatcattcaggccttgcagaatttgggactctgccatattctttccgtctatttaaaaggattggattatgaaaataaagactggtgtcctgaactagaagaacttcattaccaagcagcatggaggaatatgcagtgggaccattgcacttccgtcagcaaagaagtagaaggaaccagttaccatgaatcattgtacaatgctctacaatctctaagagacagagaattctctacattttatgaaagtctcaaatatgccagagtaaaagaagtggaagagatgtgtaagcgcagccttgagtctgtgtattcgctctatcccacacttagcaggttgcaggccattggagagctggaaagcattggggagcttttctcaagatcagtcacacatagacaactctctgaagtatatattaagtggcagaaacactcccagcttctcaaggacagtgattttagttttcaggagcctatcatggctctacgcacagtcattttggagatcctgatggaaaaggaaatggacaactcacaaagagaatgtattaaggacattctcaccaaacaccttgtagaactctctatactggccagaactttcaagaacactcagctccctgaaagggcaatatttcaaattaaacagtacaattcagttagctgtggagtctctgagtggcagctggaagaagcacaagtattctgggcaaaaaaggagcagagtcttgccctgagtattctcaagcaaatgatcaagaagttggatgccagctgtgcagcgaacaatcccagcctaaaacttacatacacagaatgtctgagggtttgtggcaactggttagcagaaacgtgcttagaaaatcctgcggtcatcatgcagacctatctagaaaaggcagtagaagttgctggaaattatgatggagaaagtagtgatgagctaagaaatggaaaaatgaaggcatttctctcattagcccggttttcagatactcaataccaaagaattgaaaactacatgaaatcatcggaatttgaaaacaagcaagctctcctgaaaagagccaaagaggaagtaggtctccttagggaacataaaattcagacaaacagatacacagtaaaggttcagcgagagctggagttggatgaattagccctgcgtgcactgaaagaggatcgtaaacgcttcttatgtaaagcagttgaaaattatatcaactgcttattaagtggagaagaacatgatatgtgggtattccgactttgttccctctggcttgaaaattctggagtttctgaagtcaatggcatgatgaagagagacggaatgaagattccaacatataaatttttgcctcttatgtaccaattggctgctagaatggggaccaagatgatgggaggcctaggatttcatgaagtcctcaataatctaatctctagaatttcaatggatcacccccatcacactttgtttattatactggccttagcaaatgcaaacagagatgaatttctgactaaaccagaggtagccagaagaagcagaataactaaaaatgtgcctaaacaaagctctcagcttgatgaggatcgaacagaggctgcaaatagaataatatgtactatcagaagtaggagacctcagatggtcagaagtgttgaggcactttgtgatgcttatattatattagcaaacttagatgccactcagtggaagactcagagaaaaggcataaatattccagcagaccagccaattactaaacttaagaatttagaagatgttgttgtccctactatggaaattaaggtggaccacacaggagaatatggaaatctggtgactatacagtcatttaaagcagaatttcgcttagcaggaggtgtaaatttaccaaaaataatagattgtgtaggttccgatggcaaggagaggagacagcttgttaagggccgtgatgacctgagacaagatgctgtcatgcaacaggtcttccagatgtgtaatacattactgcagagaaacacggaaactaggaagaggaaattaactatctgtacttataaggtggttcccctctctcagcgaagtggtgttcttgaatggtgcacaggaactgtccccattggtgaatttcttgttaacaatgaagatggtgctcataaaagatacaggccaaatgatttcagtgcctttcagtgccaaaagaaaatgatggaggtgcaaaaaaagtcttttgaagagaaatatgaagtcttcatggatgtttgccaaaattttcaaccagttttccgttacttctgcatggaaaaattcttggatccagctatttggtttgagaagcgattggcttatacgcgcagtgtagctacttcttctattgttggttacatacttggacttggtgatagacatgtacagaatatcttgataaatgagcagtcagcagaacttgtacatatagatctaggtgttgcttttgaacagggcaaaatccttcctactcctgagacagttccttttagactcaccagagatattgtggatggcatgggcattacgggtgttgaaggtgtcttcagaagatgctgtgagaaaaccatggaagtgatgagaaactctcaggaaactctgttaaccattgtagaggtccttctatatgatccactctttgactggaccatgaatcctttgaaagctttgtatttacagcagaggccggaagatgaaactgagcttcaccctactctgaatgcagatgaccaagaatgcaaacgaaatctcagtgatattgaccagagtttcaacaaagtagctgaacgtgtcttaatgagactacaagagaaactgaaaggagtggaagaaggcactgtgctcagtgttggtggacaagtgaatttgctcatacagcaggccatagaccccaaaaatctcagccgacttttcccaggatggaaagcttgggtgtgatcttcagtatatgaattaccctttcattcagcctttagaaattatattttagcctttatttttaacctgccaacatactttaagtagggattaatatttaagtgaactattgtgggtttttttgaatgttggttttaatacttgatttaatcaccactcaaaaatgttttgatggtcttaaggaacatctctgctttcactctttagaaataatggtcattcgggctgggcgcagcggctcacgcctgtaatcccagcactttgggaggccgaggtgagcggatcacaaggtcaggagttcgagaccagcctggccaagagaccagcctggccagtatggtgaaaccctgtctctactaaaaatacaaaaattagccgagcatggtggcgggcacctgtaatcccagctactcgagaggctgaggcaggagaatctcttgaacctgggaggtgaaggttgctgtgggccaaaatcatgccattgcactccagcctgggtgacaagagcgaaactccatctcaaaaaaaaaaaaaaaaaacagaaacttatttggatttttcctagtaagatcactcagtgttactaaataatgaagttgttatggagaacaaatttcaaagacacagttagtgtagttactatttttttaagtgtgtattaaaacttctcattctattctctttatcttttaagcccttctgtactgtccatgtatgttatctttctgtgataacttcatagattgccttctagttcatgaattctcttgtcagatgtatataatctcttttaccctatccattgggcttcttctttcagaaattgtttttcatttctaattatgcatcatttttcagatctctgtttcttgatgtcatttttaatgtttttttaatgttttttatgtcactaattattttaaatgtctgtacttgatagacactgtaatagttctattaaatttagttcctgctgtttatatctgttgatttttgtatttgataggctgttcatccagttttgtctttttgaaaagtgagtttattttcagcaaggctttatctatgggaatcttgagtgtctgtttatgtcatattcccagggctgttgctgcacacaagcccattcttattttaatttcttggctttagggtttccatacctgaagtgtagcataaatactgataggagatttcccaggccaaggcaaacacacttcctcctcatctccttgtgctagtgggcagaatatttgattgatgcctttttcactgagagtataagcttccatgtgtcccacctttatggcaggggtggaaggaggtacatttaattcccactgcctgcctttggcaagccctgggttctttgctccccatatagatgtctaagctaaaagccgtgggttaatgagactggcaaattgttccaggacagctacagcatcagctcacatattcacctctctggtttttcattcccctcatttttttctgagacagagtcttgctctgtcacccaggctggagtgcagtggcatgatctcagctcactgaaacctctgcctcctgggttcaagcaattctcctgcctcagcctccngagtagctgggactacaggcgtgtgccaacacgcccggctaattttttgtatttttattagagacggagtttcaccgtgttagccaggatggtctcgatcgcttgacctcgtgatccaccctcctcggcctcccaaagtgctgggattacaggtgtgagccaccgcgcccggcctcattcccctcatttttgaccgtaaggatttcccctttcttgtaagttctgctatgtatttaaaagaatgttttctacattttatccagcatttctctgtgttctgttggaagggaagggcttaggtatctagtttgatacataggtagaagtggaacatttctctgtcccccagctgtcatcatataagataaacatcagataaaaagccacctgaaagtaaaactactgactcgtgtattagtgagtataatctcttctccatccttaggaaaatgttcatcccagctgcggagattaacaaatgggtgattgagctttctcctcgtatttggaccttgaaggttatataaatttttttcttatgaagagttggcatttctttttattgccaatggcaggcactcattcatatttgatctcctcaccttcccctcccctaaaaccaatctccagaactttttggactataaatttcttggtttgacttctggagaactgttcagaatattactttgcatttcaaattacaaacttaccttggtgtatctttttcttacaagctgcctaaatgaatatttggtatatattggtagttttattactatagtaaatcaaggaaatgcagtaaacttaaaatgtctttaagaaagccctgaaatcttcatgggtgaaattagaaattatcaactagataatagtatagataaatgaatttgtagctaattcttgctagttgttgcatccagagagctttgaataacatcattaatctactctttagccttgcatggtatgctatgaggctcctgttctgttcaagtattctaatcaatggctttgaaaagtttatcaaatttacatacagatcacaagcctaggagaaataactaattcacagatgacagaattaagattataaaagattttttttttgtaattttagtagagacagggttgccattgtattccagccttggcgacagagcaagactctgcctcaaaaaaaaaaaaaaaaaggttttggcaagctggaactctttctgcaaatgactaagatagaaaactgccaaggacaaatgaggagtagttagattttgaaaatattaatcatagaatagttgttgtatgctaagtcactgacccatattatgtacagcatttctgatctttactttgcaagattagtgatactatcccaatacactgctggagaaatcagaatttggagaaataagttgtccaaggcaagaagatagtaaattataagtacaagtgtaatatggacagtatctaacttgaaaagatttcaggcgaaaagaatctggggtttgccagtcagttgctcaaaaggtcaatgaaaaccaaatagtgaagctatcagagaagctaataaattatagactgcttgaacagttgtgtccagattaagggagataatagctttcccaccctactttgtgcaggtcatacctccccaaagtgtttacctaatcagtaggttcacaaactcttggtcattatagtatatgcctaaaatgtatgcacttaggaatgctaaaaatttaaatatggtctaaagcaaataaaagcaaagaggaaaaactttggacatcgtaaagactagaatagtcttttaaaaagaaagccagtatattggtttgaaatatagagatgtgtcccaatttcaagtattttaattgcaccttaatgaaattatctattttctatagattttagtactattgaatgtattactttactgttacctgaatttattataaagtgtttttgaataaataattctaaaagca

SEQ ID NO: 279250 - DNA, 9613 bp, Homo sapiens
  misc_feature (340)..(340): n is a, c, g, or t
  misc_feature (2393)..(2393): n is a, c, g, or t
  misc_feature (2983)..(2983): n is a, c, g, or t
  misc_feature (7314)..(7314): n is a, c, g, or t
ccgcgtccgcgcttacccaatacaagccgggctacgtccgagggtaacaacatgatcaaaaccacagcaggaaccacaataaggaacaagactcaggttaaagcaaacacagcgacagctcctgcgccgcatctcctggttccagtggcggcactgaactcgcggcaatttgtcccgcctctttcgcttcacggcagccaatcgcttccgccagagaaagaaaggcgccgaaatgaaacccgcctccgttcgccttcggaactgtcgtcacttccgtcctcagacttggaggggcggggatgaggagggcggggaggacgacgagggcgaagagggtggntgagagccccggagcccgagccgaagggcgagccgcaaacgctaagtcgctggccattggtggacatggcgcaggcgcgtttgctccgacgggccgaatgttttggggcagtgttttgagcgcggagaccgcgtgatactggatgcgcatgggcataccgtgctctgcggctgcttggcgttgcttcttcctccagaagtgggcgctgggcagtcacgcagggtttgaaccggaagcgggagtaggtagctgcgtggctaacggagaaaagaagccgtggccacgggaggaggcgagaggagtcgggatctgcgctgcagccaccgccgcggttgatactactttgaccttccgagtgcagtgacagtgatgtgtgttctgaaattgtgaaccatgagtctagtacttaatgatctgcttatctgctgccgtcaactagaacatgatagagctacagaacgaaagaaagaagttgagaaatttaagcgcctgattcgagatcctgaaacaattaaacatctagatcggcattcagattccaaacaaggaaaatatttgaattgggatgctgtttttagatttttacagaaatatattcagaaagaaacagaatgtctgagaatagcaaaaccaaatgtatcagcctcaacacaagcctccaggcagaaaaagatgcaggaaatcagtagtttggtcaaatacttcatcaaatgtgcaaacagaagagcacctaggctaaaatgtcaagaactcttaaattatatcatggatacagtgaaagattcatctaatggtgctatttacggagctgattgtagcaacatactactcaaagacattctttctgtgagaaaatactggtgtgaaatatctcagcaacagtggttagaattgttctctgtgtacttcaggctctatctgaaaccttcacaagatgttcatagagttttagtggctagaataattcatgctgttaccaaaggatgctgttctcagactgacggattaaattccaaatttttggactttttttccaaggctattcagtgtgcgagacaagaaaagagctcttcaggtctaaatcatatcttagcagctcttactatcttcctcaagactttggctgtcaactttcgaattcgagtgtgtgaattaggagatgaaattcttcccactttgctttatatttggactcaacataggcttaatgattctttaaaagaagtcattattgaattatttcaactgcaaatttatatccatcatccgaaaggagccaaaacccaagaaaaaggtgcttatgaatcaacaaaatggagaagtattttatacaacttatatgatctgctagtgaatgagataagtcatataggaagtagaggaaagtattcttcaggatttcgtaatattgccgtcaaagaaaatttgattgaattgatggcagatatctgtcaccaggtttttaatgaagataccagatccttggagatttctcaatcttacactactacacaaagagaatctagtgattacagtgtcccttgcaaaaggaagaaaatagaactaggctgggaagtaataaaagatcaccttcagaagtcacagaatgattttgatcttgtgccttggctacagattgcaacccaattaatatcaaagtatcctgcaagtttacctaactgtgagctgtctccattactgatgatactatctcagcttctaccccaacagcgacatggggaacgtacaccatatgtgttacgatgccttacggaagttgcattgtgtcaagacaagaggtcaaacctagaaagctcacaaaagtcagatttattaaaactctggaataaaatttggtgtattacctttcgtggtataagttctgagcaaatacaagctgaaaactttggcttacttggagccataattcagggtagtttagttgaggttgacagagaattctggaagttatttactgggtcagcctgcagaccttcatgtcctgcagtatgctgtttgactttggcactgaccaccagtatagttccaggancggtaaaaatgggaatagagcaaaatatgtgtgaagtaaatagaagcttttctttaaaggaatcaataatgaaatggctcttattctatcagttagagggtgacttagaaaatagcacagaagtgcctccaattcttcacagtaattttcctcatcttgtactggagaaaattcttgtgagtctcactatgaaaaactgtaaagctgcaatgaattttttccaaagcgtgccagaatgtgaacaccaccaaaaagataaagaagaactttcattctcagaagtagaagaactatttcttcagacaacttttgacaagatggactttttaaccattgtgagagaatgtggtatagaaaagcaccagtccagtattggcttctctgtccaccagaatctcaaggaatcactggatcgctgtcttctgggattatcagaacagcttctgaataattactcatctgagattacaaattcagaaactcttgtccggtgttcacgtcttttggtgggtgtccttggctgctactgttacatgggtgtaatagctgaagaggaagcatataagtcagaattattccagaaagccaantctctaatgcaatgtgcaggagaaagtatcactctgtttaaaaataagacaaatgaggaattcagaattggttccttgagaaatatgatgcagctatgtacacgttgcttgagcaactgtaccaagaagagtccaaataagattgcatctggctttttcctgcgattgttaacatcaaagctaatgaatgacattgcagatatttgtaaaagtttagcatccttcatcaaaaagccatttgaccgtggagaagtagaatcaatggaagatgatactaatggaaatctaatggaggtggaggatcagtcatccatgaatctatttaacgattaccctgatagtagtgttagtgatgcaaacgaacctggagagagccaaagtaccataggtgccattaatcctttagctgaagaatatctgtcaaagcaagatctacttttcttagacatgctcaagttcttgtgtttgtgtgtaactactgctcagaccaatactgtgtcctttagggcagctgatattcggaggaaattgttaatgttaattgattctagcacgctagaacctaccaaatccctccacctgcatatgtatctaatgcttttaaaggagcttcctggagaagagtaccccttgccaatggaagatgttcttgaacttctgaaaccactatccaatgtgtgttctttgtatcgtcgtgaccaagatgtttgtaaaactattttaaaccatgtccttcatgtagtgaaaaacctaggtcaaagcaatatggactctgagaacacaagggatgctcaaggacagtttcttacagtaattggagcattttggcatctaacaaaggagaggaaatatatattctctgtaagaatggccctagtaaattgccttaaaactttgcttgaggctgatccttattcaaaatgggccattcttaatgtaatgggaaaagactttcctgtaaatgaagtatttacacaatttcttgctgacaatcatcaccaagttcgcatgttggctgcagagtcaatcaatagattgttccaggacacgaagggagattcttccaggttactgaaagcacttcctttgaagcttcagcaaacagcttttgaaaatgcatacttgaaagctcaggaaggaatgagagaaatgtcccatagtgctgagaaccctgaaactttggatgaaatttataatagaaaatctgttttactgacgttgatagctgtggttttatcctgtagccctatctgcgaaaaacaggctttgtttgccctgtgtaaatctgtgaaagagaatggattagaacctcaccttgtgaaaaaggttttagagaaagtttctgaaacttttggatatagacgtttagaagactttatggcatctcatttagattatctggttttggaatggctaaatcttcaagatactgaatacaacttatcttcttttccttttattttattaaactacacaaatattgaggatttctatagatcttgttataaggttttgattccacatctggtgattagaagtcattttgatgaggtgaagtccattgctaatcagattcaagaggactggaaaagtcttctaacagactgctttccaaagattcttgtaaatattcttccttattttgcctatgagggtaccagagacagtgggatggcacagcaaagagagactgctaccaaggtctatgatatgcttaaaagtgaaaacttattgggaaaacagattgatcacttattcattagtaatttaccagagattgtggtggagttattgatgacgttacatgagccagcaaattctagtgccagtcagagcactgacctctgtgacttttcaggggatttggatcctgctcctaatccacctcattttccatcgcatgtgattaaagcaacatttgcctatatcagcaattgtcataaaaccaagttaaaaagcattttagaaattctttccaaaagccctgattcctatcagaaaattcttcttgccatatgtgagcaagcagctgaaacaaataatgtttataagaagcacagaattcttaaaatatatcacctgtttgttagtttattactgaaagatataaaaagtggcttaggaggagcttgggcctttgttcttcgagacgttatttatactttgattcactatatcaaccaaaggccttcttgtatcatggatgtgtcattacgtagcttctccctttgttgtgacttattaagtcaggtttgccagacagccgtgacttactgtaaggatgctctagaaaaccatcttcatgttattgttggtacacttataccccttgtgtatgagcaggtggaggttcagaaacaggtattggacttgttgaaatacttagtgatagataacaaggataatgaaaacctctatatcacgattaagcttttagatccttttcctgaccatgttgtttttaaggatttgcgtattactcagcaaaaaatcaaatacagtagaggacccttttcactcttggaggaaattaaccattttctctcagtaagtgtttatgatgcacttccattgacaagacttgaaggactaaaggatcttcgaagacaactggaactacataaagatcagatggtggacattatgagagcttctcagggtgctaattttaaatgacatgggctatttctacctgtttctttttgaaagaatattttgcaaagtcttgctcttggtttcattgtcacagacttagttcagactctcatcatttagttcagaccctcatttctcatctaactgtaaaactggtcctaactggtcttctcaccctgaactcttcctgttttattcatcctctgccagatgatttctctaaacccaaatatgatcatgtttttctactgcctaaattttttttttaagagacagagtttttttttttttttaagagtctcactctgtcacctaggctggagtgtagtggcaccatcataacttactatgaccttgaattcctgggtacaaggaattctcctgtctcagccttctgaatagctggaacaacaggcacacaccactacacctagctactttatttattttttttattttttgtagggacaggggtcccactatgttgcctaggttggtctcgaattcttggcctcaagtgatcctcctgccttagcctcacaaagcattgggattagaggtgtgacctgggtgacaagagcgaaactccatctcaaaaaaaaaaaaaaaaaacagaaacttatttggatttttcctagtaagatcactcagtgttactaaataatgaagttgttatggagaacaaatttcaaagacacagttagtgtagttactatttttttaagtgtgtattaaaacttctcattctattctctttatcttttaagcccttctgtactgtccatgtatgttatctttctgtgataacttcatagattgccttctagttcatgaattctcttgtcagatgtatataatctcttttaccctatccattgggcttcttctttcagaaattgtttttcatttctaattatgcatcatttttcagatctctgtttcttgatgtcatttttaatgtttttttaatgttttttatgtcactaattattttaaatgtctgtacttgatagacactgtaatagttctattaaatttagttcctgctgtttatatctgttgatttttgtatttgataggctgttcatccagttttgtctttttgaaaagtgagtttattttcagcaaggctttatctatgggaatcttgagtgtctgtttatgtcatattcccagggctgttgctgcacacaagcccattcttattttaatttcttggctttagggtttccatacctgaagtgtagcataaatactgataggagatttcccaggccaaggcaaacacacttcctcctcatctccttgtgctagtgggcagaatatttgattgatgcctttttcactgagagtataagcttccatgtgtcccacctttatggcaggggtggaaggaggtacatttaattcccactgcctgcctttggcaagccctgggttctttgctccccatatagatgtctaagctaaaagccgtgggttaatgagactggcaaattgttccaggacagctacagcatcagctcacatattcacctctctggtttttcattcccctcatttttttctgagacagagtcttgctctgtcacccaggctggagtgcagtggcatgatctcagctcactgaaacctctgcctcctgggttcaagcaattctcctgcctcagcctccngagtagctgggactacaggcgtgtgccaacacgcccggctaattttttgtatttttattagagacggagtttcaccgtgttagccaggatggtctcgatcgcttgacctcgtgatccaccctcctcggcctcccaaagtgctgggattacaggtgtgagccaccgcgcccggcctcattcccctcatttttgaccgtaaggatttcccctttcttgtaagttctgctatgtatttaaaagaatgttttctacattttatccagcatttctctgtgttctgttggaagggaagggcttaggtatctagtttgatacataggtagaagtggaacatttctctgtcccccagctgtcatcatataagataaacatcagataaaaagccacctgaaagtaaaactactgactcgtgtattagtgagtataatctcttctccatccttaggaaaatgttcatcccagctgcggagattaacaaatgggtgattgagctttctcctcgtatttggaccttgaaggttatataaatttttttcttatgaagagttggcatttctttttattgccaatggcaggcactcattcatatttgatctcctcaccttcccctcccctaaaaccaatctccagaactttttggactataaatttcttggtttgacttctggagaactgttcagaatattactttgcatttcaaattacaaacttaccttggtgtatctttttcttacaagctgcctaaatgaatatttggtatatattggtagttttattactatagtaaatcaaggaaatgcagtaaacttaaaatgtctttaagaaagccctgaaatcttcatgggtgaaattagaaattatcaactagataatagtatagataaatgaatttgtagctaattcttgctagttgttgcatccagagagctttgaataacatcattaatctactctttagccttgcatggtatgctatgaggctcctgttctgttcaagtattctaatcaatggctttgaaaagtttatcaaatttacatacagatcacaagcctaggagaaataactaattcacagatgacagaattaagattataaaagattttttttttgtaattttagtagagacagggttgccattgtattccagccttggcgacagagcaagactctgcctcaaaaaaaaaaaaaaaaaggttttggcaagctggaactctttctgcaaatgactaagatagaaaactgccaaggacaaatgaggagtagttagattttgaaaatattaatcatagaatagttgttgtatgctaagtcactgacccatattatgtacagcatttctgatctttactttgcaagattagtgatactatcccaatacactgctggagaaatcagaatttggagaaataagttgtccaaggcaagaagatagtaaattataagtacaagtgtaatatggacagtatctaacttgaaaagatttcaggcgaaaagaatctggggtttgccagtcagttgctcaaaaggtcaatgaaaaccaaatagtgaagctatcagagaagctaataaattatagactgcttgaacagttgtgtccagattaagggagataatagctttcccaccctactttgtgcaggtcatacctccccaaagtgtttacctaatcagtaggttcacaaactcttggtcattatagtatatgcctaaaatgtatgcacttaggaatgctaaaaatttaaatatggtctaaagcaaataaaagcaaagaggaaaaactttggacatcgtaaagactagaatagtcttttaaaaagaaagccagtatattggtttgaaatatagagatgtgtcccaatttcaagtattttaattgcaccttaatgaaattatctattttctatagattttagtactattgaatgtattactttactgttacctgaatttattataaagtgtttttgaataaataattctaaaagcatatactaagactcattcactttattcaaatatttgtgtgttctgtgtgccaggcatgggactcgttctaaggagaaagcagtgagcaaggcaggcatagtctgcctatataaagctcccaatctgaggaggataggcaactgaccacgcagtgtgaaccggggagcctattgcacaaccagtctgataatgctgcatctcagtctaaatatcctagtagtgtttcttagtcgcctcctgacaaaaaggcaaatatgaatgttctttctttgggcctagaaagtgatctagttgacatttctagcctaaaag

SEQ ID NO: 279251 - DNA, 9784 bp, Homo sapiens
  misc_feature (340)..(340): n is a, c, g, or t
  misc_feature (2393)..(2393): n is a, c, g, or t
  misc_feature (2983)..(2983): n is a, c, g, or t
ccgcgtccgcgcttacccaatacaagccgggctacgtccgagggtaacaacatgatcaaaaccacagcaggaaccacaataaggaacaagactcaggttaaagcaaacacagcgacagctcctgcgccgcatctcctggttccagtggcggcactgaactcgcggcaatttgtcccgcctctttcgcttcacggcagccaatcgcttccgccagagaaagaaaggcgccgaaatgaaacccgcctccgttcgccttcggaactgtcgtcacttccgtcctcagacttggaggggcggggatgaggagggcggggaggacgacgagggcgaagagggtggntgagagccccggagcccgagccgaagggcgagccgcaaacgctaagtcgctggccattggtggacatggcgcaggcgcgtttgctccgacgggccgaatgttttggggcagtgttttgagcgcggagaccgcgtgatactggatgcgcatgggcataccgtgctctgcggctgcttggcgttgcttcttcctccagaagtgggcgctgggcagtcacgcagggtttgaaccggaagcgggagtaggtagctgcgtggctaacggagaaaagaagccgtggccacgggaggaggcgagaggagtcgggatctgcgctgcagccaccgccgcggttgatactactttgaccttccgagtgcagtgacagtgatgtgtgttctgaaattgtgaaccatgagtctagtacttaatgatctgcttatctgctgccgtcaactagaacatgatagagctacagaacgaaagaaagaagttgagaaatttaagcgcctgattcgagatcctgaaacaattaaacatctagatcggcattcagattccaaacaaggaaaatatttgaattgggatgctgtttttagatttttacagaaatatattcagaaagaaacagaatgtctgagaatagcaaaaccaaatgtatcagcctcaacacaagcctccaggcagaaaaagatgcaggaaatcagtagtttggtcaaatacttcatcaaatgtgcaaacagaagagcacctaggctaaaatgtcaagaactcttaaattatatcatggatacagtgaaagattcatctaatggtgctatttacggagctgattgtagcaacatactactcaaagacattctttctgtgagaaaatactggtgtgaaatatctcagcaacagtggttagaattgttctctgtgtacttcaggctctatctgaaaccttcacaagatgttcatagagttttagtggctagaataattcatgctgttaccaaaggatgctgttctcagactgacggattaaattccaaatttttggactttttttccaaggctattcagtgtgcgagacaagaaaagagctcttcaggtctaaatcatatcttagcagctcttactatcttcctcaagactttggctgtcaactttcgaattcgagtgtgtgaattaggagatgaaattcttcccactttgctttatatttggactcaacataggcttaatgattctttaaaagaagtcattattgaattatttcaactgcaaatttatatccatcatccgaaaggagccaaaacccaagaaaaaggtgcttatgaatcaacaaaatggagaagtattttatacaacttatatgatctgctagtgaatgagataagtcatataggaagtagaggaaagtattcttcaggatttcgtaatattgccgtcaaagaaaatttgattgaattgatggcagatatctgtcaccaggtttttaatgaagataccagatccttggagatttctcaatcttacactactacacaaagagaatctagtgattacagtgtcccttgcaaaaggaagaaaatagaactaggctgggaagtaataaaagatcaccttcagaagtcacagaatgattttgatcttgtgccttggctacagattgcaacccaattaatatcaaagtatcctgcaagtttacctaactgtgagctgtctccattactgatgatactatctcagcttctaccccaacagcgacatggggaacgtacaccatatgtgttacgatgccttacggaagttgcattgtgtcaagacaagaggtcaaacctagaaagctcacaaaagtcagatttattaaaactctggaataaaatttggtgtattacctttcgtggtataagttctgagcaaatacaagctgaaaactttggcttacttggagccataattcagggtagtttagttgaggttgacagagaattctggaagttatttactgggtcagcctgcagaccttcatgtcctgcagtatgctgtttgactttggcactgaccaccagtatagttccaggancggtaaaaatgggaatagagcaaaatatgtgtgaagtaaatagaagcttttctttaaaggaatcaataatgaaatggctcttattctatcagttagagggtgacttagaaaatagcacagaagtgcctccaattcttcacagtaattttcctcatcttgtactggagaaaattcttgtgagtctcactatgaaaaactgtaaagctgcaatgaattttttccaaagcgtgccagaatgtgaacaccaccaaaaagataaagaagaactttcattctcagaagtagaagaactatttcttcagacaacttttgacaagatggactttttaaccattgtgagagaatgtggtatagaaaagcaccagtccagtattggcttctctgtccaccagaatctcaaggaatcactggatcgctgtcttctgggattatcagaacagcttctgaataattactcatctgagattacaaattcagaaactcttgtccggtgttcacgtcttttggtgggtgtccttggctgctactgttacatgggtgtaatagctgaagaggaagcatataagtcagaattattccagaaagccaantctctaatgcaatgtgcaggagaaagtatcactctgtttaaaaataagacaaatgaggaattcagaattggttccttgagaaatatgatgcagctatgtacacgttgcttgagcaactgtaccaagaagagtccaaataagattgcatctggctttttcctgcgattgttaacatcaaagctaatgaatgacattgcagatatttgtaaaagtttagcatccttcatcaaaaagccatttgaccgtggagaagtagaatcaatggaagatgatactaatggaaatctaatggaggtggaggatcagtcatccatgaatctatttaacgattaccctgatagtagtgttagtgatgcaaacgaacctggagagagccaaagtaccataggtgccattaatcctttagctgaagaatatctgtcaaagcaagatctacttttcttagacatgctcaagttcttgtgtttgtgtgtaactactgctcagaccaatactgtgtcctttagggcagctgatattcggaggaaattgttaatgttaattgattctagcacgctagaacctaccaaatccctccacctgcatatgtatctaatgcttttaaaggagcttcctggagaagagtaccccttgccaatggaagatgttcttgaacttctgaaaccactatccaatgtgtgttctttgtatcgtcgtgaccaagatgtttgtaaaactattttaaaccatgtccttcatgtagtgaaaaacctaggtcaaagcaatatggactctgagaacacaagggatgctcaaggacagtttcttacagtaattggagcattttggcatctaacaaaggagaggaaatatatattctctgtaagaatggccctagtaaattgccttaaaactttgcttgaggctgatccttattcaaaatgggccattcttaatgtaatgggaaaagactttcctgtaaatgaagtatttacacaatttcttgctgacaatcatcaccaagttcgcatgttggctgcagagtcaatcaatagattgttccaggacacgaagggagattcttccaggttactgaaagcacttcctttgaagcttcagcaaacagcttttgaaaatgcatacttgaaagctcaggaaggaatgagagaaatgtcccatagtgctgagaaccctgaaactttggatgaaatttataatagaaaatctgttttactgacgttgatagctgtggttttatcctgtagccctatctgcgaaaaacaggctttgtttgccctgtgtaaatctgtgaaagagaatggattagaacctcaccttgtgaaaaaggttttagagaaagtttctgaaacttttggatatagacgtttagaagactttatggcatctcatttagattatctggttttggaatggctaaatcttcaagatactgaatacaacttatcttcttttccttttattttattaaactacacaaatattgaggatttctatagatcttgttataaggttttgattccacatctggtgattagaagtcattttgatgaggtgaagtccattgctaatcagattcaagaggactggaaaagtcttctaacagactgctttccaaagattcttgtaaatattcttccttattttgcctatgagggtaccagagacagtgggatggcacagcaaagagagactgctaccaaggtctatgatatgcttaaaagtgaaaacttattgggaaaacagattgatcacttattcattagtaatttaccagagattgtggtggagttattgatgacgttacatgagccagcaaattctagtgccagtcagagcactgacctctgtgacttttcaggggatttggatcctgctcctaatccacctcattttccatcgcatgtgattaaagcaacatttgcctatatcagcaattgtcataaaaccaagttaaaaagcattttagaaattctttccaaaagccctgattcctatcagaaaattcttcttgccatatgtgagcaagcagctgaaacaaataatgtttataagaagcacagaattcttaaaatatatcacctgtttgttagtttattactgaaagatataaaaagtggcttaggaggagcttgggcctttgttcttcgagacgttatttatactttgattcactatatcaaccaaaggccttcttgtatcatggatgtgtcattacgtagcttctccctttgttgtgacttattaagtcaggtttgccagacagccgtgacttactgtaaggatgctctagaaaaccatcttcatgttattgttggtacacttataccccttgtgtatgagcaggtggaggttcagaaacaggtattggacttgttgaaatacttagtgatagataacaaggataatgaaaacctctatatcacgattaagcttttagatccttttcctgaccatgttgtttttaaggatttgcgtattactcagcaaaaaatcaaatacagtagaggacccttttcactcttggaggaaattaaccattttctctcagtaagtgtttatgatgcacttccattgacaagacttgaaggactaaaggatcttcgaagacaactggaactacataaagatcagatggtggacattatgagagcttctcaggataatccgcaagatgggattatggtgaaactagttgtcaatttgttgcagttatccaagatggcaataaaccacactggtgaaaaagaagttctagaggctgttggaagctgcttgggagaagtgggtcctatagatttctctaccatagctatacaacatagtaaagatgcatcttataccaaggcccttaagttatttgaagataaagaacttcagtggaccttcataatgctgacctacctgaataacacactggtagaagattgtgtcaaagttcgatcagcagctgttacctgtttgaaaaacattttagccacaaagactggacatagtttctgggagatttataagatgacaacagatccaatgctggcctatctacagccttttagaacatcaagaaaaaagtttttagaagtacccagatttgacaaagaaaacccttttgaaggcctggatgatataaatctgtggattcctctaagtgaaaatcatgacatttggataaagacactgacttgtgcttttttggacagtggaggcacaaaatgtgaaattcttcaattattaaagccaatgtgtgaagtgaaaactgacttttgtcagactgtacttccatacttgattcatgatattttactccaagatacaaatgaatcatggagaaatctgctttctacacatgttcagggatttttcaccagctgtcttcgacacttctcgcaaacgagccgatccacaacccctgcaaacttggattcagaccttcttcaggaacaatttttaatgatgctttctggctggatttaaattatctagaagttgccaaggtagctcagtcttgtgctgctcactttacagctttactctatgcagaaatctatgcagataagaaaagtatggatgatcaagagaaaagaagtcttgcatttgaagaaggaagccagagtacaactatttctagcttgagtgaaaaaagtaaagaagaaactggaataagtttacaggatcttctcttagaaatctacagaagtataggggagccagatagtttgtatggctgtggtggagggaagatgttacaacccattactagactacgaacatatgaacacgaagcaatgtggggcaaagccctagtaacatatgacctcgaaacagcaatcccctcatcaacacgccaggcaggaatcattcaggccttgcagaatttgggactctgccatattctttccgtctatttaaaaggattggattatgaaaataaagactggtgtcctgaactagaagaacttcattaccaagcagcatggaggaatatgcagtgggaccattgcacttccgtcagcaaagaagtagaaggaaccagttaccatgaatcattgtacaatgctctacaatctctaagagacagagaattctctacattttatgaaagtctcaaatatgccagagtaaaagaagtggaagagatgtgtaagcgcagccttgagtctgtgtattcgctctatcccacacttagcaggttgcaggccattggagagctggaaagcattggggagcttttctcaagatcagtcacacatagacaactctctgaagtatatattaagtggcagaaacactcccagcttctcaaggacagtgattttagttttcaggagcctatcatggctctacgcacagtcattttggagatcctgatggaaaaggaaatggacaactcacaaagagaatgtattaaggacattctcaccaaacaccttgtagaactctctatactggccagaactttcaagaacactcagctccctgaaagggcaatatttcaaattaaacagtacaattcagttagctgtggagtctctgagtggcagctggaagaagcacaagtattctgggcaaaaaaggagcagagtcttgccctgagtattctcaagcaaatgatcaagaagttggatgccagctgtgcagcgaacaatcccagcctaaaacttacatacacagaatgtctgagggtttgtggcaactggttagcagaaacgtgcttagaaaatcctgcggtcatcatgcagacctatctagaaaaggcagtagaagttgctggaaattatgatggagaaagtagtgatgagctaagaaatggaaaaatgaaggcatttctctcattagcccggttttcagatactcaataccaaagaattgaaaactacatgaaatcatcggaatttgaaaacaagcaagctctcctgaaaagagccaaagaggaagtaggtctccttagggaacataaaattcagacaaacagatacacagtaaaggttcagcgagagctggagttggatgaattagccctgcgtgcactgaaagaggatcgtaaacgcttcttatgtaaagcagttgaaaattatatcaactgcttattaagtggagaagaacatgatatgtgggtattccgactttgttccctctggcttgaaaattctggagtttctgaagtcaatggcatgatgaagagagacggaatgaagattccaacatataaatttttgcctcttatgtaccaattggctgctagaatggggaccaagatgatgggaggcctaggatttcatgaagtcctcaataatctaatctctagaatttcaatggatcacccccatcacactttgtttattatactggccttagcaaatgcaaacagagatgaatttctgactaaaccagaggtagccagaagaagcagaataactaaaaatgtgcctaaacaaagctctcagcttgatgaggatcgaacagaggctgcaaatagaataatatgtactatcagaagtaggagacctcagatggtcagaagtgttgaggcactttgtgatgcttatattatattagcaaacttagatgccactcagtggaagactcagagaaaaggcataaatattccagcagaccagccaattactaaacttaagaatttagaagatgttgttgtccctactatggaaattaaggtggaccacacaggagaatatggaaatctggtgactatacagtcatttaaagcagaatttcgcttagcaggaggtgtaaatttaccaaaaataatagattgtgtaggttccgatggcaaggagaggagacagcttgttaagggccgtgatgacctgagacaagatgctgtcatgcaacaggtcttccagatgtgtaatacattactgcagagaaacacggaaactaggaagaggaaattaactatctgtacttataaggtggttcccctctctcagcgaagtggtgttcttgaatggtgcacaggaactgtccccattggtgaatttcttgttaacaatgaagatggtgctcataaaagatacaggccaaatgatttcagtgcctttcagtgccaaaagaaaatgatggaggtgcaaaaaaagtcttttgaagagaaatatgaagtcttcatggatgtttgccaaaattttcaaccagttttccgttacttctgcatggaaaaattcttggatccagctatttggtttgagaagcgattggcttatacgcgcagtgtagctacttcttctattgttggttacatacttggacttggtgatagacatgtacagaatatcttgataaatgagcagtcagcagaacttgtacatatagatctaggtgttgcttttgaacagggcaaaatccttcctactcctgagacagttccttttagactcaccagagatattgtggatggcatgggcattacgggtgttgaaggtgtcttcagaagatgctgtgagaaaaccatggaagtgatgagaaactctcaggaaactctgttaaccattgtagaggtccttctatatgatccactctttgactggaccatgaatcctttgaaagctttgtatttacagcagaggccggaagatgaaactgagcttcaccctactctgaatgcagatgaccaagaatgcaaacgaaatctcagtgatattgaccagagtttcaacaaagtagctgaacgtgtcttaatgagactacaagagaaactgaaaggagtggaagaaggcactgtgctcagtgttggtggacaagtgaatttgctcatacagcagacgcccgttactttacatttggcat

SEQ ID NO: 279252 - DNA, 9364 bp, Homo sapiens
  misc_feature (340)..(340): n is a, c, g, or t
  misc_feature (2393)..(2393): n is a, c, g, or t
  misc_feature (2983)..(2983): n is a, c, g, or t
ccgcgtccgcgcttacccaatacaagccgggctacgtccgagggtaacaacatgatcaaaaccacagcaggaaccacaataaggaacaagactcaggttaaagcaaacacagcgacagctcctgcgccgcatctcctggttccagtggcggcactgaactcgcggcaatttgtcccgcctctttcgcttcacggcagccaatcgcttccgccagagaaagaaaggcgccgaaatgaaacccgcctccgttcgccttcggaactgtcgtcacttccgtcctcagacttggaggggcggggatgaggagggcggggaggacgacgagggcgaagagggtggntgagagccccggagcccgagccgaagggcgagccgcaaacgctaagtcgctggccattggtggacatggcgcaggcgcgtttgctccgacgggccgaatgttttggggcagtgttttgagcgcggagaccgcgtgatactggatgcgcatgggcataccgtgctctgcggctgcttggcgttgcttcttcctccagaagtgggcgctgggcagtcacgcagggtttgaaccggaagcgggagtaggtagctgcgtggctaacggagaaaagaagccgtggccacgggaggaggcgagaggagtcgggatctgcgctgcagccaccgccgcggttgatactactttgaccttccgagtgcagtgacagtgatgtgtgttctgaaattgtgaaccatgagtctagtacttaatgatctgcttatctgctgccgtcaactagaacatgatagagctacagaacgaaagaaagaagttgagaaatttaagcgcctgattcgagatcctgaaacaattaaacatctagatcggcattcagattccaaacaaggaaaatatttgaattgggatgctgtttttagatttttacagaaatatattcagaaagaaacagaatgtctgagaatagcaaaaccaaatgtatcagcctcaacacaagcctccaggcagaaaaagatgcaggaaatcagtagtttggtcaaatacttcatcaaatgtgcaaacagaagagcacctaggctaaaatgtcaagaactcttaaattatatcatggatacagtgaaagattcatctaatggtgctatttacggagctgattgtagcaacatactactcaaagacattctttctgtgagaaaatactggtgtgaaatatctcagcaacagtggttagaattgttctctgtgtacttcaggctctatctgaaaccttcacaagatgttcatagagttttagtggctagaataattcatgctgttaccaaaggatgctgttctcagactgacggattaaattccaaatttttggactttttttccaaggctattcagtgtgcgagacaagaaaagagctcttcaggtctaaatcatatcttagcagctcttactatcttcctcaagactttggctgtcaactttcgaattcgagtgtgtgaattaggagatgaaattcttcccactttgctttatatttggactcaacataggcttaatgattctttaaaagaagtcattattgaattatttcaactgcaaatttatatccatcatccgaaaggagccaaaacccaagaaaaaggtgcttatgaatcaacaaaatggagaagtattttatacaacttatatgatctgctagtgaatgagataagtcatataggaagtagaggaaagtattcttcaggatttcgtaatattgccgtcaaagaaaatttgattgaattgatggcagatatctgtcaccaggtttttaatgaagataccagatccttggagatttctcaatcttacactactacacaaagagaatctagtgattacagtgtcccttgcaaaaggaagaaaatagaactaggctgggaagtaataaaagatcaccttcagaagtcacagaatgattttgatcttgtgccttggctacagattgcaacccaattaatatcaaagtatcctgcaagtttacctaactgtgagctgtctccattactgatgatactatctcagcttctaccccaacagcgacatggggaacgtacaccatatgtgttacgatgccttacggaagttgcattgtgtcaagacaagaggtcaaacctagaaagctcacaaaagtcagatttattaaaactctggaataaaatttggtgtattacctttcgtggtataagttctgagcaaatacaagctgaaaactttggcttacttggagccataattcagggtagtttagttgaggttgacagagaattctggaagttatttactgggtcagcctgcagaccttcatgtcctgcagtatgctgtttgactttggcactgaccaccagtatagttccaggancggtaaaaatgggaatagagcaaaatatgtgtgaagtaaatagaagcttttctttaaaggaatcaataatgaaatggctcttattctatcagttagagggtgacttagaaaatagcacagaagtgcctccaattcttcacagtaattttcctcatcttgtactggagaaaattcttgtgagtctcactatgaaaaactgtaaagctgcaatgaattttttccaaagcgtgccagaatgtgaacaccaccaaaaagataaagaagaactttcattctcagaagtagaagaactatttcttcagacaacttttgacaagatggactttttaaccattgtgagagaatgtggtatagaaaagcaccagtccagtattggcttctctgtccaccagaatctcaaggaatcactggatcgctgtcttctgggattatcagaacagcttctgaataattactcatctgagattacaaattcagaaactcttgtccggtgttcacgtcttttggtgggtgtccttggctgctactgttacatgggtgtaatagctgaagaggaagcatataagtcagaattattccagaaagccaantctctaatgcaatgtgcaggagaaagtatcactctgtttaaaaataagacaaatgaggaattcagaattggttccttgagaaatatgatgcagctatgtacacgttgcttgagcaactgtaccaagaagagtccaaataagattgcatctggctttttcctgcgattgttaacatcaaagctaatgaatgacattgcagatatttgtaaaagtttagcatccttcatcaaaaagccatttgaccgtggagaagtagaatcaatggaagatgatactaatggaaatctaatggaggtggaggatcagtcatccatgaatctatttaacgattaccctgatagtagtgttagtgatgcaaacgaacctggagagagccaaagtaccataggtgccattaatcctttagctgaagaatatctgtcaaagcaagatctacttttcttagacatgctcaagttcttgtgtttgtgtgtaactactgctcagaccaatactgtgtcctttagggcagctgatattcggaggaaattgttaatgttaattgattctagcacgctagaacctaccaaatccctccacctgcatatgtatctaatgcttttaaaggagcttcctggagaagagtaccccttgccaatggaagatgttcttgaacttctgaaaccactatccaatgtgtgttctttgtatcgtcgtgaccaagatgtttgtaaaactattttaaaccatgtccttcatgtagtgaaaaacctaggtcaaagcaatatggactctgagaacacaagggatgctcaaggacagtttcttacagtaattggagcattttggcatctaacaaaggagaggaaatatatattctctgtaagaatggccctagtaaattgccttaaaactttgcttgaggctgatccttattcaaaatgggccattcttaatgtaatgggaaaagactttcctgtaaatgaagtatttacacaatttcttgctgacaatcatcaccaagttcgcatgttggctgcagagtcaatcaatagattgttccaggacacgaagggagattcttccaggttactgaaagcacttcctttgaagcttcagcaaacagcttttgaaaatgcatacttgaaagctcaggaaggaatgagagaaatgtcccatagtgctgagaaccctgaaactttggatgaaatttataatagaaaatctgttttactgacgttgatagctgtggttttatcctgtagccctatctgcgaaaaacaggctttgtttgccctgtgtaaatctgtgaaagagaatggattagaacctcaccttgtgaaaaaggttttagagaaagtttctgaaacttttggatatagacgtttagaagactttatggcatctcatttagattatctggttttggaatggctaaatcttcaagatactgaatacaacttatcttcttttccttttattttattaaactacacaaatattgaggatttctatagatcttgttataaggttttgattccacatctggtgattagaagtcattttgatgaggtgaagtccattgctaatcagattcaagaggactggaaaagtcttctaacagactgctttccaaagattcttgtaaatattcttccttattttgcctatgagggtaccagagacagtgggatggcacagcaaagagagactgctaccaaggtctatgatatgcttaaaagtgaaaacttattgggaaaacagattgatcacttattcattagtaatttaccagagattgtggtggagttattgatgacgttacatgagccagcaaattctagtgccagtcagagcactgacctctgtgacttttcaggggatttggatcctgctcctaatccacctcattttccatcgcatgtgattaaagcaacatttgcctatatcagcaattgtcataaaaccaagttaaaaagcattttagaaattctttccaaaagccctgattcctatcagaaaattcttcttgccatatgtgagcaagcagctgaaacaaataatgtttataagaagcacagaattcttaaaatatatcacctgtttgttagtttattactgaaagatataaaaagtggcttaggaggagcttgggcctttgttcttcgagacgttatttatactttgattcactatatcaaccaaaggccttcttgtatcatggatgtgtcattacgtagcttctccctttgttgtgacttattaagtcaggtttgccagacagccgtgacttactgtaaggatgctctagaaaaccatcttcatgttattgttggtacacttataccccttgtgtatgagcaggtggaggttcagaaacaggtattggacttgttgaaatacttagtgatagataacaaggataatgaaaacctctatatcacgattaagcttttagatccttttcctgaccatgttgtttttaaggatttgcgtattactcagcaaaaaatcaaatacagtagaggacccttttcactcttggaggaaattaaccattttctctcagtaagtgtttatgatgcacttccattgacaagacttgaaggactaaaggatcttcgaagacaactggaactacataaagatcagatggtggacattatgagagcttctcaggataatccgcaagatgggattatggtgaaactagttgtcaatttgttgcagttatccaagatggcaataaaccacactggtgaaaaagaagttctagaggctgttggaagctgcttgggagaagtgggtcctatagatttctctaccatagctatacaacatagtaaagatgcatcttataccaaggcccttaagttatttgaagataaagaacttcagtggaccttcataatgctgacctacctgaataacacactggtagaagattgtgtcaaagttcgatcagcagctgttacctgtttgaaaaacattttagccacaaagactggacatagtttctgggagatttataagatgacaacagatccaatgctggcctatctacagccttttagaacatcaagaaaaaagtttttagaagtacccagatttgacaaagaaaacccttttgaaggcctggatgatataaatctgtggattcctctaagtgaaaatcatgacatttggataaagacactgacttgtgcttttttggacagtggaggcacaaaatgtgaaattcttcaattattaaagccaatgtgtgaagtgaaaactgacttttgtcagactgtacttccatacttgattcatgatattttactccaagatacaaatgaatcatggagaaatctgctttctacacatgttcagggatttttcaccagctgtcttcgacacttctcgcaaacgagccgatccacaacccctgcaaacttggattcagaccttcttcaggaacaatttttaatgatgctttctggctggatttaaattatctagaagttgccaaggtagctcagtcttgtgctgctcactttacagctttactctatgcagaaatctatgcagataagaaaagtatggatgatcaagagaaaagaagtcttgcatttgaagaaggaagccagagtacaactatttctagcttgagtgaaaaaagtaaagaagaaactggaataagtttacaggatcttctcttagaaatctacagaagtataggggagccagatagtttgtatggctgtggtggagggaagatgttacaacccattactagactacgaacatatgaacacgaagcaatgtggggcaaagccctagtaacatatgacctcgaaacagcaatcccctcatcaacacgccaggcaggaatcattcaggccttgcagaatttgggactctgccatattctttccgtctatttaaaaggattggattatgaaaataaagactggtgtcctgaactagaagaacttcattaccaagcagcatggaggaatatgcagtgggaccattgcacttccgtcagcaaagaagtagaaggaaccagttaccatgaatcattgtacaatgctctacaatctctaagagacagagaattctctacattttatgaaagtctcaaatatgccagagtaaaagaagtggaagagatgtgtaagcgcagccttgagtctgtgtattcgctctatcccacacttagcaggttgcaggccattggagagctggaaagcattggggagcttttctcaagatcagtcacacatagacaactctctgaagtatatattaagtggcagaaacactcccagcttctcaaggacagtgattttagttttcaggagcctatcatggctctacgcacagtcattttggagatcctgatggaaaaggaaatggacaactcacaaagagaatgtattaaggacattctcaccaaacaccttgtagaactctctatactggccagaactttcaagaacactcagctccctgaaagggcaatatttcaaattaaacagtacaattcagttagctgtggagtctctgagtggcagctggaagaagcacaagtattctgggcaaaaaaggagcagagtcttgccctgagtattctcaagcaaatgatcaagaagttggatgccagctgtgcagcgaacaatcccagcctaaaacttacatacacagaatgtctgagggtttgtggcaactggttagcagaaacgtgcttagaaaatcctgcggtcatcatgcagacctatctagaaaaggcagtagaagttgctggaaattatgatggagaaagtagtgatgagctaagaaatggaaaaatgaaggcatttctctcattagcccggttttcagatactcaataccaaagaattgaaaactacatgaaatcatcggaatttgaaaacaagcaagctctcctgaaaagagccaaagaggaagtaggtctccttagggaacataaaattcagacaaacagatacacagtaaaggttcagcgagagctggagttggatgaattagccctgcgtgcactgaaagaggatcgtaaacgcttcttatgtaaagcagttgaaaattatatcaactgcttattaagtggagaagaacatgatatgtgggtattccgactttgttccctctggcttgaaaattctggagtttctgaagtcaatggcatgatgaagagagacggaatgaagattccaacatataaatttttgcctcttatgtaccaattggctgctagaatggggaccaagatgatgggaggcctaggatttcatgaagtcctcaataatctaatctctagaatttcaatggatcacccccatcacactttgtttattatactggccttagcaaatgcaaacagagatgaatttctgactaaaccagaggtagccagaagaagcagaataactaaaaatgtgcctaaacaaagctctcagcttgatgaggatcgaacagaggctgcaaatagaataatatgtactatcagaagtaggagacctcagatggtcagaagtgttgaggcactttgtgatgcttatattatattagcaaacttagatgccactcagtggaagactcagagaaaaggcataaatattccagcagaccagccaattactaaacttaagaatttagaagatgttgttgtccctactatggaaattaaggtggaccacacaggagaatatggaaatctggtgactatacagtcatttaaagcagaatttcgcttagcaggaggtgtaaatttaccaaaaataatagattgtgtaggttccgatggcaaggagaggagacagcttgttaagggccgtgatgacctgagacaagatgctgtcatgcaacaggtcttccagatgtgtaatacattactgcagagaaacacggaaactaggaagaggaaattaactatctgtacttataaggtaactatttgtacttctgttagttcaccaaaaacatataaaagatgccatttggttgggtgaagtggctcatgcccatattcataatgctttgggaggccaaggtgggaggattgcttgaggccaggagttcgagaccagcctcagcaacatagtgagaccccatcttgacaaaaagttaaaaaaaaaaaaaaagccagagatgatggcatgtgcttgtagtcccttagctacatgggaggctgaggtgggaggatcacttgagtccaggagtttgaggctgcagtgagctcaaactctgcagtgagccccagtccagcctgagcaacacagcaagatcccgtttaaaaaagaagaagaagaagaagatgccattatttggaccaggagtctacaaatgttttctgtgaaggaccaaataataaagatttattttctttgtaaaaagtat

SEQ ID NO: 279253 - DNA, 8021 bp, Homo sapiens
  misc_feature (340)..(340): n is a, c, g, or t
  misc_feature (2393)..(2393): n is a, c, g, or t
  misc_feature (2983)..(2983): n is a, c, g, or t
ccgcgtccgcgcttacccaatacaagccgggctacgtccgagggtaacaacatgatcaaaaccacagcaggaaccacaataaggaacaagactcaggttaaagcaaacacagcgacagctcctgcgccgcatctcctggttccagtggcggcactgaactcgcggcaatttgtcccgcctctttcgcttcacggcagccaatcgcttccgccagagaaagaaaggcgccgaaatgaaacccgcctccgttcgccttcggaactgtcgtcacttccgtcctcagacttggaggggcggggatgaggagggcggggaggacgacgagggcgaagagggtggntgagagccccggagcccgagccgaagggcgagccgcaaacgctaagtcgctggccattggtggacatggcgcaggcgcgtttgctccgacgggccgaatgttttggggcagtgttttgagcgcggagaccgcgtgatactggatgcgcatgggcataccgtgctctgcggctgcttggcgttgcttcttcctccagaagtgggcgctgggcagtcacgcagggtttgaaccggaagcgggagtaggtagctgcgtggctaacggagaaaagaagccgtggccacgggaggaggcgagaggagtcgggatctgcgctgcagccaccgccgcggttgatactactttgaccttccgagtgcagtgacagtgatgtgtgttctgaaattgtgaaccatgagtctagtacttaatgatctgcttatctgctgccgtcaactagaacatgatagagctacagaacgaaagaaagaagttgagaaatttaagcgcctgattcgagatcctgaaacaattaaacatctagatcggcattcagattccaaacaaggaaaatatttgaattgggatgctgtttttagatttttacagaaatatattcagaaagaaacagaatgtctgagaatagcaaaaccaaatgtatcagcctcaacacaagcctccaggcagaaaaagatgcaggaaatcagtagtttggtcaaatacttcatcaaatgtgcaaacagaagagcacctaggctaaaatgtcaagaactcttaaattatatcatggatacagtgaaagattcatctaatggtgctatttacggagctgattgtagcaacatactactcaaagacattctttctgtgagaaaatactggtgtgaaatatctcagcaacagtggttagaattgttctctgtgtacttcaggctctatctgaaaccttcacaagatgttcatagagttttagtggctagaataattcatgctgttaccaaaggatgctgttctcagactgacggattaaattccaaatttttggactttttttccaaggctattcagtgtgcgagacaagaaaagagctcttcaggtctaaatcatatcttagcagctcttactatcttcctcaagactttggctgtcaactttcgaattcgagtgtgtgaattaggagatgaaattcttcccactttgctttatatttggactcaacataggcttaatgattctttaaaagaagtcattattgaattatttcaactgcaaatttatatccatcatccgaaaggagccaaaacccaagaaaaaggtgcttatgaatcaacaaaatggagaagtattttatacaacttatatgatctgctagtgaatgagataagtcatataggaagtagaggaaagtattcttcaggatttcgtaatattgccgtcaaagaaaatttgattgaattgatggcagatatctgtcaccaggtttttaatgaagataccagatccttggagatttctcaatcttacactactacacaaagagaatctagtgattacagtgtcccttgcaaaaggaagaaaatagaactaggctgggaagtaataaaagatcaccttcagaagtcacagaatgattttgatcttgtgccttggctacagattgcaacccaattaatatcaaagtatcctgcaagtttacctaactgtgagctgtctccattactgatgatactatctcagcttctaccccaacagcgacatggggaacgtacaccatatgtgttacgatgccttacggaagttgcattgtgtcaagacaagaggtcaaacctagaaagctcacaaaagtcagatttattaaaactctggaataaaatttggtgtattacctttcgtggtataagttctgagcaaatacaagctgaaaactttggcttacttggagccataattcagggtagtttagttgaggttgacagagaattctggaagttatttactgggtcagcctgcagaccttcatgtcctgcagtatgctgtttgactttggcactgaccaccagtatagttccaggancggtaaaaatgggaatagagcaaaatatgtgtgaagtaaatagaagcttttctttaaaggaatcaataatgaaatggctcttattctatcagttagagggtgacttagaaaatagcacagaagtgcctccaattcttcacagtaattttcctcatcttgtactggagaaaattcttgtgagtctcactatgaaaaactgtaaagctgcaatgaattttttccaaagcgtgccagaatgtgaacaccaccaaaaagataaagaagaactttcattctcagaagtagaagaactatttcttcagacaacttttgacaagatggactttttaaccattgtgagagaatgtggtatagaaaagcaccagtccagtattggcttctctgtccaccagaatctcaaggaatcactggatcgctgtcttctgggattatcagaacagcttctgaataattactcatctgagattacaaattcagaaactcttgtccggtgttcacgtcttttggtgggtgtccttggctgctactgttacatgggtgtaatagctgaagaggaagcatataagtcagaattattccagaaagccaantctctaatgcaatgtgcaggagaaagtatcactctgtttaaaaataagacaaatgaggaattcagaattggttccttgagaaatatgatgcagctatgtacacgttgcttgagcaactgtaccaagaagagtccaaataagattgcatctggctttttcctgcgattgttaacatcaaagctaatgaatgacattgcagatatttgtaaaagtttagcatccttcatcaaaaagccatttgaccgtggagaagtagaatcaatggaagatgatactaatggaaatctaatggaggtggaggatcagtcatccatgaatctatttaacgattaccctgatagtagtgttagtgatgcaaacgaacctggagagagccaaagtaccataggtgccattaatcctttagctgaagaatatctgtcaaagcaagatctacttttcttagacatgctcaagttcttgtgtttgtgtgtaactactgctcagaccaatactgtgtcctttagggcagctgatattcggaggaaattgttaatgttaattgattctagcacgctagaacctaccaaatccctccacctgcatatgtatctaatgcttttaaaggagcttcctggagaagagtaccccttgccaatggaagatgttcttgaacttctgaaaccactatccaatgtgtgttctttgtatcgtcgtgaccaagatgtttgtaaaactattttaaaccatgtccttcatgtagtgaaaaacctaggtcaaagcaatatggactctgagaacacaagggatgctcaaggacagtttcttacagtaattggagcattttggcatctaacaaaggagaggaaatatatattctctgtaagaatggccctagtaaattgccttaaaactttgcttgaggctgatccttattcaaaatgggccattcttaatgtaatgggaaaagactttcctgtaaatgaagtatttacacaatttcttgctgacaatcatcaccaagttcgcatgttggctgcagagtcaatcaatagattgttccaggacacgaagggagattcttccaggttactgaaagcacttcctttgaagcttcagcaaacagcttttgaaaatgcatacttgaaagctcaggaaggaatgagagaaatgtcccatagtgctgagaaccctgaaactttggatgaaatttataatagaaaatctgttttactgacgttgatagctgtggttttatcctgtagccctatctgcgaaaaacaggctttgtttgccctgtgtaaatctgtgaaagagaatggattagaacctcaccttgtgaaaaaggttttagagaaagtttctgaaacttttggatatagacgtttagaagactttatggcatctcatttagattatctggttttggaatggctaaatcttcaagatactgaatacaacttatcttcttttccttttattttattaaactacacaaatattgaggatttctatagatcttgttataaggttttgattccacatctggtgattagaagtcattttgatgaggtgaagtccattgctaatcagattcaagaggactggaaaagtcttctaacagactgctttccaaagattcttgtaaatattcttccttattttgcctatgagggtaccagagacagtgggatggcacagcaaagagagactgctaccaaggtctatgatatgcttaaaagtgaaaacttattgggaaaacagattgatcacttattcattagtaatttaccagagattgtggtggagttattgatgacgttacatgagccagcaaattctagtgccagtcagagcactgacctctgtgacttttcaggggatttggatcctgctcctaatccacctcattttccatcgcatgtgattaaagcaacatttgcctatatcagcaattgtcataaaaccaagttaaaaagcattttagaaattctttccaaaagccctgattcctatcagaaaattcttcttgccatatgtgagcaagcagctgaaacaaataatgtttataagaagcacagaattcttaaaatatatcacctgtttgttagtttattactgaaagatataaaaagtggcttaggaggagcttgggcctttgttcttcgagacgttatttatactttgattcactatatcaaccaaaggccttcttgtatcatggatgtgtcattacgtagcttctccctttgttgtgacttattaagtcaggtttgccagacagccgtgacttactgtaaggatgctctagaaaaccatcttcatgttattgttggtacacttataccccttgtgtatgagcaggtggaggttcagaaacaggtattggacttgttgaaatacttagtgatagataacaaggataatgaaaacctctatatcacgattaagcttttagatccttttcctgaccatgttgtttttaaggatttgcgtattactcagcaaaaaatcaaatacagtagaggacccttttcactcttggaggaaattaaccattttctctcagtaagtgtttatgatgcacttccattgacaagacttgaaggactaaaggatcttcgaagacaactggaactacataaagatcagatggtggacattatgagagcttctcaggataatccgcaagatgggattatggtgaaactagttgtcaatttgttgcagttatccaagatggcaataaaccacactggtgaaaaagaagttctagaggctgttggaagctgcttgggagaagtgggtcctatagatttctctaccatagctatacaacatagtaaagatgcatcttataccaaggcccttaagttatttgaagataaagaacttcagtggaccttcataatgctgacctacctgaataacacactggtagaagattgtgtcaaagttcgatcagcagctgttacctgtttgaaaaacattttagccacaaagactggacatagtttctgggagatttataagatgacaacagatccaatgctggcctatctacagccttttagaacatcaagaaaaaagtttttagaagtacccagatttgacaaagaaaacccttttgaaggcctggatgatataaatctgtggattcctctaagtgaaaatcatgacatttggataaagacactgacttgtgcttttttggacagtggaggcacaaaatgtgaaattcttcaattattaaagccaatgtgtgaagtgaaaactgacttttgtcagactgtacttccatacttgattcatgatattttactccaagatacaaatgaatcatggagaaatctgctttctacacatgttcagggatttttcaccagctgtcttcgacacttctcgcaaacgagccgatccacaacccctgcaaacttggattcagaccttcttcaggaacaatttttaatgatgctttctggctggatttaaattatctagaagttgccaaggtagctcagtcttgtgctgctcactttacagctttactctatgcagaaatctatgcagataagaaaagtatggatgatcaagagaaaagaagtcttgcatttgaagaaggaagccagagtacaactatttctagcttgagtgaaaaaagtaaagaagaaactggaataagtttacaggatcttctcttagaaatctacagaagtataggggagccagatagtttgtatggctgtggtggagggaagatgttacaacccattactagactacgaacatatgaacacgaagcaatgtggggcaaagccctagtaacatatgacctcgaaacagcaatcccctcatcaacacgccaggcaggaatcattcaggccttgcagaatttgggactctgccatattctttccgtctatttaaaaggattggattatgaaaataaagactggtgtcctgaactagaagaacttcattaccaagcagcatggaggaatatgcagtgggaccattgcacttccgtcagcaaagaagtagaaggaaccagttaccatgaatcattgtacaatgctctacaatctctaagagacagagaattctctacattttatgaaagtctcaaatatgccagagtaaaagaagtggaagagatgtgtaagcgcagccttgagtctgtgtattcgctctatcccacacttagcaggttgcaggccattggagagctggaaagcattggggagcttttctcaagatcagtcacacatagacaactctctgaagtatatattaagtggcagaaacactcccagcttctcaaggacagtgattttagttttcaggagcctatcatggctctacgcacagtcattttggagatcctgatggaaaaggaaatggacaactcacaaagagaatgtattaaggacattctcaccaaacaccttgtagaactctctatactggccagaactttcaagaacactcagctccctgaaagggcaatatttcaaattaaacagtacaattcagttagctgtggagtctctgagtggcagctggaagaagcacaagtattctgggcaaaaaaggagcagagtcttgccctgagtattctcaagcaaatgatcaagaagttggatgccagctgtgcagcgaacaatcccagcctaaaacttacatacacagaatgtctgagggtttgtggcaactggttagcagaaacgtgcttagaaaatcctgcggtcatcatgcagacctatctagaaaaggcagtagaagttgctggaaattatgatggagaaagtagtgatgagctaagaaatggaaaaatgaaggcatttctctcattagcccggttttcagatactcaataccaaagaattgaaaactacatgaaatcatcggaatttgaaaacaagcaagctctcctgaaaagagccaaagaggaagtaggtctccttagggaacataaaattcagacaaacaggtaactaggtttctacaagtgacaattttatgttcaccagttaactgagtgagtgtttttgcatagaaa

SEQ ID NO: 279254 - DNA, 5161 bp, Homo sapiens
  misc_feature (340)..(340): n is a, c, g, or t
  misc_feature (2393)..(2393): n is a, c, g, or t
  misc_feature (2983)..(2983): n is a, c, g, or t
ccgcgtccgcgcttacccaatacaagccgggctacgtccgagggtaacaacatgatcaaaaccacagcaggaaccacaataaggaacaagactcaggttaaagcaaacacagcgacagctcctgcgccgcatctcctggttccagtggcggcactgaactcgcggcaatttgtcccgcctctttcgcttcacggcagccaatcgcttccgccagagaaagaaaggcgccgaaatgaaacccgcctccgttcgccttcggaactgtcgtcacttccgtcctcagacttggaggggcggggatgaggagggcggggaggacgacgagggcgaagagggtggntgagagccccggagcccgagccgaagggcgagccgcaaacgctaagtcgctggccattggtggacatggcgcaggcgcgtttgctccgacgggccgaatgttttggggcagtgttttgagcgcggagaccgcgtgatactggatgcgcatgggcataccgtgctctgcggctgcttggcgttgcttcttcctccagaagtgggcgctgggcagtcacgcagggtttgaaccggaagcgggagtaggtagctgcgtggctaacggagaaaagaagccgtggccacgggaggaggcgagaggagtcgggatctgcgctgcagccaccgccgcggttgatactactttgaccttccgagtgcagtgacagtgatgtgtgttctgaaattgtgaaccatgagtctagtacttaatgatctgcttatctgctgccgtcaactagaacatgatagagctacagaacgaaagaaagaagttgagaaatttaagcgcctgattcgagatcctgaaacaattaaacatctagatcggcattcagattccaaacaaggaaaatatttgaattgggatgctgtttttagatttttacagaaatatattcagaaagaaacagaatgtctgagaatagcaaaaccaaatgtatcagcctcaacacaagcctccaggcagaaaaagatgcaggaaatcagtagtttggtcaaatacttcatcaaatgtgcaaacagaagagcacctaggctaaaatgtcaagaactcttaaattatatcatggatacagtgaaagattcatctaatggtgctatttacggagctgattgtagcaacatactactcaaagacattctttctgtgagaaaatactggtgtgaaatatctcagcaacagtggttagaattgttctctgtgtacttcaggctctatctgaaaccttcacaagatgttcatagagttttagtggctagaataattcatgctgttaccaaaggatgctgttctcagactgacggattaaattccaaatttttggactttttttccaaggctattcagtgtgcgagacaagaaaagagctcttcaggtctaaatcatatcttagcagctcttactatcttcctcaagactttggctgtcaactttcgaattcgagtgtgtgaattaggagatgaaattcttcccactttgctttatatttggactcaacataggcttaatgattctttaaaagaagtcattattgaattatttcaactgcaaatttatatccatcatccgaaaggagccaaaacccaagaaaaaggtgcttatgaatcaacaaaatggagaagtattttatacaacttatatgatctgctagtgaatgagataagtcatataggaagtagaggaaagtattcttcaggatttcgtaatattgccgtcaaagaaaatttgattgaattgatggcagatatctgtcaccaggtttttaatgaagataccagatccttggagatttctcaatcttacactactacacaaagagaatctagtgattacagtgtcccttgcaaaaggaagaaaatagaactaggctgggaagtaataaaagatcaccttcagaagtcacagaatgattttgatcttgtgccttggctacagattgcaacccaattaatatcaaagtatcctgcaagtttacctaactgtgagctgtctccattactgatgatactatctcagcttctaccccaacagcgacatggggaacgtacaccatatgtgttacgatgccttacggaagttgcattgtgtcaagacaagaggtcaaacctagaaagctcacaaaagtcagatttattaaaactctggaataaaatttggtgtattacctttcgtggtataagttctgagcaaatacaagctgaaaactttggcttacttggagccataattcagggtagtttagttgaggttgacagagaattctggaagttatttactgggtcagcctgcagaccttcatgtcctgcagtatgctgtttgactttggcactgaccaccagtatagttccaggancggtaaaaatgggaatagagcaaaatatgtgtgaagtaaatagaagcttttctttaaaggaatcaataatgaaatggctcttattctatcagttagagggtgacttagaaaatagcacagaagtgcctccaattcttcacagtaattttcctcatcttgtactggagaaaattcttgtgagtctcactatgaaaaactgtaaagctgcaatgaattttttccaaagcgtgccagaatgtgaacaccaccaaaaagataaagaagaactttcattctcagaagtagaagaactatttcttcagacaacttttgacaagatggactttttaaccattgtgagagaatgtggtatagaaaagcaccagtccagtattggcttctctgtccaccagaatctcaaggaatcactggatcgctgtcttctgggattatcagaacagcttctgaataattactcatctgagattacaaattcagaaactcttgtccggtgttcacgtcttttggtgggtgtccttggctgctactgttacatgggtgtaatagctgaagaggaagcatataagtcagaattattccagaaagccaantctctaatgcaatgtgcaggagaaagtatcactctgtttaaaaataagacaaatgaggaattcagaattggttccttgagaaatatgatgcagctatgtacacgttgcttgagcaactgtaccaagaagagtccaaataagattgcatctggctttttcctgcgattgttaacatcaaagctaatgaatgacattgcagatatttgtaaaagtttagcatccttcatcaaaaagccatttgaccgtggagaagtagaatcaatggaagatgatactaatggaaatctaatggaggtggaggatcagtcatccatgaatctatttaacgattaccctgatagtagtgttagtgatgcaaacgaacctggagagagccaaagtaccataggtgccattaatcctttagctgaagaatatctgtcaaagcaagatctacttttcttagacatgctcaagttcttgtgtttgtgtgtaactactgctcagaccaatactgtgtcctttagggcagctgatattcggaggaaattgttaatgttaattgattctagcacgctagaacctaccaaatccctccacctgcatatgtatctaatgcttttaaaggagcttcctggagaagagtaccccttgccaatggaagatgttcttgaacttctgaaaccactatccaatgtgtgttctttgtatcgtcgtgaccaagatgtttgtaaaactattttaaaccatgtccttcatgtagtgaaaaacctaggtcaaagcaatatggactctgagaacacaagggatgctcaaggacagtttcttacagtaattggagcattttggcatctaacaaaggagaggaaatatatattctctgtaagaatggccctagtaaattgccttaaaactttgcttgaggctgatccttattcaaaatgggccattcttaatgtaatgggaaaagactttcctgtaaatgaagtatttacacaatttcttgctgacaatcatcaccaagttcgcatgttggctgcagagtcaatcaatagattgttccaggacacgaagggagattcttccaggttactgaaagcacttcctttgaagcttcagcaaacagcttttgaaaatgcatacttgaaagctcaggaaggaatgagagaaatgtcccatagtgctgagaaccctgaaactttggatgaaatttataatagaaaatctgttttactgacgttgatagctgtggttttatcctgtagccctatctgcgaaaaacaggctttgtttgccctgtgtaaatctgtgaaagagaatggattagaacctcaccttgtgaaaaaggttttagagaaagtttctgaaacttttggatatagacgtttagaagactttatggcatctcatttagattatctggttttggaatggctaaatcttcaagatactgaatacaacttatcttcttttccttttattttattaaactacacaaatattgaggatttctatagatcttgttataaggttttgattccacatctggtgattagaagtcattttgatgaggtgaagtccattgctaatcagattcaagaggactggaaaagtcttctaacagactgctttccaaagattcttgtaaatattcttccttattttgcctatgagggtaccagagacagtgggatggcacagcaaagagagactgctaccaaggtctatgatatgcttaaaagtgaaaacttattgggaaaacaggtatggcttcaatttttatgtacttttcattccctgaatgatatgagatataacctttaagttttaaggctatttattcgatttattcgtatttatatattgaaacttagcttgtggtaatcattatctagcatagccaacccatgaatttttttggttatgtcgtgttgtctccctctgattggcttttaactaagtagaaatgttttaaattagaaataatccaaaaaaccatttgaataattttcttctgccatttaaaaatttattttaactgttgtaatacacgaatgcaaactggttgttaaagtcaaggaatactaaacagtgtacagaaaaccttcactccctcttcaatctcaccaagctttccacttttcaagaaaaacaaccgtccctcattcctatagttctcataccctgctgtttgttttt

SEQ ID NO: 279255 - DNA, 1646 bp, Homo sapiens
acaaagcggttggttgcggcagggactacaccggtgtatcatgggagcggcccgggctacacgttaaaaacactaaggggagcgcgcgaagctgaacttggcgctcgatgggggccgttagccgccctagagcgcgcggagccgcagaggcgtagctggactacaacgcagtgcatctcgggaggccaactcgactggactgggtgagaggacagaggtggctcgatgggcggcccgaaggccggggatcatggcgggaaggcgggcccagccaggttcagccccgccccgacccgccgctccccacccccggccggcctcgcgtgccttcccgcagcactgccgtccccgggatgctgagcgcccaccgtctccccgcagccccctcatgcccggctgcgagctgcccgtgggcacctgcccggacatgtgcccggccgccgagcgcgcccagcgcgaaagggagcaccgcctgcaccgcttggaggtggtgccgggttgccgccaggacccgccccgcgcggatccgcagcgcgcggtgaaggagtacagccgacccgccgccggcaagccccggcccccgcccagccagttgcgtccgccctccgtgctgctggccaccgtgcgctacctggccggtgaggtggcggagagcgccgacatcgcccgcgccgaggtggccagcttcgtggcagaccgcttgcgagctgtgcgcctggacctggcgctgcagggagcgggcgacgccgaggcagcggtggtgctggaggcggcgctggccacgctgctggccgtagtggcgcggctcgggcccgacgcggcgcggggacccgcggacccggtgctgctgcaggcccaggtgcaggagggcttcggctcgctgcggcgctgctacgcgcggggcgccgggccgcacccccgccaacccgccttccagggcctctttctgctctataacctgggtgagtcgggatcctggcggctgggcagagcgtggggacaggagcccaccatgacagtggaggctcggtggaagccctgcatgaggttctacagctgcctgctgccctgcgcgcctgcccgcccctccgcaaggccttggcggtagatgctgccttccgagagggcaatgctgcccgcctgttccgtctgctccagaccctgccctacctgccaagttgcgctgtgcagtgccatgtgggccatgcccgccgggaagccctggcccgcttcgctcgtgcctttagcacccccaagggccagaccttgcctctgggcttcatggtcaacctcttggccctggatggactcagggaagcacgggacctgtgccaggcccacgggctgcccttggacggagaggagagagttgtgttcctgaggggtcgctacgtggaggaagggctaccgcctgccagtacgtgcaaggtgttagtggagagcaaacttcgaggacgtaccctggaggaggtggtcatggcagaggaggaagatgagggcacggacagacctgggtccccagcctgaggagggagcgtgagcctcccagagccccaggactgggccagagcacttaggtttctttttccatggtttccaggtaataaaaggaacttgttttgttggtaccaaaaacaagatgtgat

SEQ ID NO: 279256 - DNA, 1584 bp, Homo sapiens
acaaagcggttggttgcggcagggactacaccggtgtatcatgggagcggcccgggctacacgttaaaaacactaaggggagcgcgcgaagctgaacttggcgctcgatgggggccgttagccgccctagagcgcgcggagccgcagaggcgtagctggactacaacgcagtgcatctcgggaggccaactcgactggactgggtgagaggacagaggtggctcgatgggcggcccgaaggccggggatcatggcgggaaggcgggcccagccaggttcagccccgccccgacccgccgctccccacccccggccggcctcgcgtgccttcccgcagcactgccgtccccgggatgctgagcgcccaccgtctccccgcagccccctcatgcccggctgcgagctgcccgtgggcacctgcccggacatgtgcccggccgccgagcgcgcccagcgcgaaagggagcaccgcctgcaccgcttggaggtggtgccgggttgccgccaggacccgccccgcgcggatccgcagcgcgcggtgaaggagtacagccgacccgccgccggcaagccccggcccccgcccagccagttgcgtccgccctccgtgctgctggccaccgtgcgctacctggccggtgaggtggcggagagcgccgacatcgcccgcgccgaggtggccagcttcgtggcagaccgcttgcgagctgtgcgcctggacctggcgctgcagggagcgggcgacgccgaggcagcggtggtgctggaggcggcgctggccacgctgctggccgtagtggcgcggctcgggcccgacgcggcgcggggacccgcggacccggtgctgctgcaggcccaggtgcaggagggcttcggctcgctgcggcgctgctacgcgcggggcgccgggccgcacccccgccaacccgccttccagggcctctttctgctctataacctgggctcggtggaagccctgcatgaggttctacagctgcctgctgccctgcgcgcctgcccgcccctccgcaaggccttggcggtagatgctgccttccgagagggcaatgctgcccgcctgttccgtctgctccagaccctgccctacctgccaagttgcgctgtgcagtgccatgtgggccatgcccgccgggaagccctggcccgcttcgctcgtgcctttagcacccccaagggccagaccttgcctctgggcttcatggtcaacctcttggccctggatggactcagggaagcacgggacctgtgccaggcccacgggctgcccttggacggagaggagagagttgtgttcctgaggggtcgctacgtggaggaagggctaccgcctgccagtacgtgcaaggtgttagtggagagcaaacttcgaggacgtaccctggaggaggtggtcatggcagaggaggaagatgagggcacggacagacctgggtccccagcctgaggagggagcgtgagcctcccagagccccaggactgggccagagcacttaggtttctttttccatggtttccaggtaataaaaggaacttgttttgttggtaccaaaaacaagatgtgat

SEQ ID NO: 279257 - DNA, 1268 bp, Homo sapiens
taggctggtcgaggcctggttgtaatcggccgaggggatgctgagcgcccaccgtctccccgcagccccctcatgcccggctgcgagctgcccgtgggcacctgcccggacatgtgcccggccgccgagcgcgcccagcgcgaaagggagcaccgcctgcaccgcttggaggtggtgccgggttgccgccaggacccgccccgcgcggatccgcagcgcgcggtgaaggagtacagccgacccgccgccggcaagccccggcccccgcccagccagttgcgtccgccctccgtgctgctggccaccgtgcgctacctggccggtgaggtggcggagagcgccgacatcgcccgcgccgaggtggccagcttcgtggcagaccgcttgcgagctgtgcgcctggacctggcgctgcagggagcgggcgacgccgaggcagcggtggtgctggaggcggcgctggccacgctgctggccgtagtggcgcggctcgggcccgacgcggcgcggggacccgcggacccggtgctgctgcaggcccaggtgcaggagggcttcggctcgctgcggcgctgctacgcgcggggcgccgggccgcacccccgccaacccgccttccagggcctctttctgctctataacctgggctcggtggaagccctgcatgaggttctacagctgcctgctgccctgcgcgcctgcccgcccctccgcaaggccttggcggtagatgctgccttccgagagggcaatgctgcccgcctgttccgtctgctccagaccctgccctacctgccaagttgcgctgtgcagtgccatgtgggccatgcccgccgggaagccctggcccgcttcgctcgtgcctttagcacccccaagggccagaccttgcctctgggcttcatggtcaacctcttggccctggatggactcagggaagcacgggacctgtgccaggcccacgggctgcccttggacggagaggagagagttgtgttcctgaggggtcgctacgtggaggaagggctaccgcctgccagtacgtgcaaggtgttagtggagagcaaacttcgaggacgtaccctggaggaggtggtcatggcagaggaggaagatgagggcacggacagacctgggtccccagcctgaggagggagcgtgagcctcccagagccccaggactgggccagagcacttaggtttctttttccatggtttccaggtaataaaaggaacttgttttgttggtaccaaaaacaagatgtgat

SEQ ID NO: 279258 - DNA, 1409 bp, Homo sapiens
acaaagcggttggttgcggcagggactacaccggtgtatcatgggagcggcccgggctacacgttaaaaacactaaggggagcgcgcgaagctgaacttggcgctcgatgggggccgttagccgccctagagcgcgcggagccgcagaggcgtagctggactacaacgcagtgcatctcgggaggccaactcgactggactgggtgagaggacagaggtggctcgatgggcggcccgaaggccggggatcatggcgggaaggcgggcccagccaggttcagccccgccccgacccgccgctccccacccccggccggcctcgcgtgccttcccgcagcactgccgtccccgggatgctgagcgcccaccgtctccccgcagccccctcatgcccggctgcgagctgcccgtgggcacctgcccggacatgtgcccggccgccgagcgcgcccagcgcgaaagggagcaccgcctgcaccgcttggaggtggtgccgggttgccgccaggacccgccccgcgcggatccgcagcgcgcggtgaaggagtacagccgacccgccgccggcaagccccggcccccgcccagccagttgcgtccgccctccgtgctgctggccaccgtgcgctacctggccggtgaggtggcggagagcgccgacatcgcccgcgccgaggtggccagcttcgtggcagaccgcttgcgagctgtgcgcctggacctggcgctgcagggagcgggccccgccaacccgccttccagggcctctttctgctctataacctgggctcggtggaagccctgcatgaggttctacagctgcctgctgccctgcgcgcctgcccgcccctccgcaaggccttggcggtagatgctgccttccgagagggcaatgctgcccgcctgttccgtctgctccagaccctgccctacctgccaagttgcgctgtgcagtgccatgtgggccatgcccgccgggaagccctggcccgcttcgctcgtgcctttagcacccccaagggccagaccttgcctctgggcttcatggtcaacctcttggccctggatggactcagggaagcacgggacctgtgccaggcccacgggctgcccttggacggagaggagagagttgtgttcctgaggggtcgctacgtggaggaagggctaccgcctgccagtacgtgcaaggtgttagtggagagcaaacttcgaggacgtaccctggaggaggtggtcatggcagaggaggaagatgagggcacggacagacctgggtccccagcctgaggagggagcgtgagcctcccagagccccaggactgggccagagcacttaggtttctttttccatggtttccaggtaataaaaggaacttgttttgttggtaccaaaaacaagatgtgat

SEQ ID NO: 279259 - DNA, 1527 bp, Homo sapiens
acaaagcggttggttgcggcagggactacaccggtgtatcatgggagcggcccgggctacacgttaaaaacactaaggggagcgcgcgaagctgaacttggcgctcgatgggggccgttagccgccctagagcgcgcggagccgcagaggcgtagctggactacaacgcagtgcatctcgggaggccaactcgactggactgggtgagaggacagaggtggctcgatgggcggcccgaaggccggggatcatggcgggaaggcgggcccagccaggttcagccccgccccgacccgccgctccccacccccggccggcctcgcgtgccttcccgcagcactgccgtccccgggatgctgagcgcccaccgtctccccgcagccccctcatgcccggctgcgagctgcccgtgggcacctgcccggacatgtgcccggccgccgagcgcgcccagcgcgaaagggagcaccgcctgcaccgcttggaggtggtgccgggttgccgccaggacccgccccgcgcggatccgcagcgcgcggtgaaggagtacagccgacccgccgccggcaagccccggcccccgcccagccagttgcgtccgccctccgtgctgctggccaccgtgcgctacctggccggtgaggtggcggagagcgccgacatcgcccgcgccgaggtggccagcttcgtggcagaccgcttgcgagctgtgcgcctggacctggcgctgcagggagcgggcgacgccgaggcagcggtggtgctggaggcggcgctggccacgctgctggccgtagtggcgcggctcgggcccgacgcggcgcggggacccgcggacccggtgctgctgcaggcccaggtgcaggagggcttcggctcgctgcggcgctgctacgcgcggggcgccgggccgcacccccgccaacccgccttccagggcctctttctgctctataacctgggctcggtggaagccctgcatgaggttctacagctgcctgctgccctgcgcgctgcccgcctgttccgtctgctccagaccctgccctacctgccaagttgcgctgtgcagtgccatgtgggccatgcccgccgggaagccctggcccgcttcgctcgtgcctttagcacccccaagggccagaccttgcctctgggcttcatggtcaacctcttggccctggatggactcagggaagcacgggacctgtgccaggcccacgggctgcccttggacggagaggagagagttgtgttcctgaggggtcgctacgtggaggaagggctaccgcctgccagtacgtgcaaggtgttagtggagagcaaacttcgaggacgtaccctggaggaggtggtcatggcagaggaggaagatgagggcacggacagacctgggtccccagcctgaggagggagcgtgagcctcccagagccccaggactgggccagagcacttaggtttctttttccatggtttccaggtaataaaaggaacttgttttgttggtaccaaaaacaagatgtgat

SEQ ID NO: 279260 - DNA, 965 bp, Homo sapiens
acaaagcggttggttgcggcagggactacaccggtgtatcatgggagcggcccgggctacacgttaaaaacactaaggggagcgcgcgaagctgaacttggcgctcgatgggggccgttagccgccctagagcgcgcggagccgcagaggcgtagctggactacaacgcagtgcatctcgggaggccaactcgactggactggagatgggatctcgcatgttgccactcgaattcctgggctcaagtgatcctcctgccccaccctcccaagtagccgggtgtggccatcatgcccagtgaatggtttatttttgtccacactgttcctctgaagaaggcatggctcggtggaagccctgcatgaggttctacagctgcctgctgccctgcgcgcctgcccgcccctccgcaaggccttggcggtagatgctgccttccgagagggcaatgctgcccgcctgttccgtctgctccagaccctgccctacctgccaagttgcgctgtgcagtgccatgtgggccatgcccgccgggaagccctggcccgcttcgctcgtgcctttagcacccccaagggccagaccttgcctctgggcttcatggtcaacctcttggccctggatggactcagggaagcacgggacctgtgccaggcccacgggctgcccttggacggagaggagagagttgtgttcctgaggggtcgctacgtggaggaagggctaccgcctgccagtacgtgcaaggtgttagtggagagcaaacttcgaggacgtaccctggaggaggtggtcatggcagaggaggaagatgagggcacggacagacctgggtccccagcctgaggagggagcgtgagcctcccagagccccaggactgggccagagcacttaggtttctttttccatggtttccaggtaataaaaggaacttgttttgttggtaccaaaaacaagatgtgat

SEQ ID NO: 279261 - DNA, 1724 bp, Homo sapiens
acaaagcggttggttgcggcagggactacaccggtgtatcatgggagcggcccgggctacacgttaaaaacactaaggggagcgcgcgaagctgaacttggcgctcgatgggggccgttagccgccctagagcgcgcggagccgcagaggcgtagctggactacaacgcagtgcatctcgggaggccaactcgactggactgggtgagaggacagaggtggctcgatgggcggcccgaaggccggggatcatggcgggaaggcgggcccagccaggttcagccccgccccgacccgccgctccccacccccggccggcctcgcgtgccttcccgcagcactgccgtccccgggatgctgagcgcccaccgtctccccgcagccccctcatgcccggctgcgagctgcccgtgggcacctgcccggacatgtgcccggccgccgagcgcgcccagcgcgaaagggagcaccgcctgcaccgcttggaggtggtgccgggttgccgccaggacccgccccgcgcggatccgcagcgcgcggtgaaggagtacagccgacccgccgccggcaagccccggcccccgcccagccagttgcgtccgccctccgtgctgctggccaccgtgcgctacctggccggtgaggtggcggagagcgccgacatcgcccgcgccgaggtggccagcttcgtggcagaccgcttgcgagctgtgcgcctggacctggcgctgcagggagcgggcgacgccgaggcagcggtggtgctggaggcggcgctggccacgctgctggccgtagtggcgcggctcgggcccgacgcggcgcggggacccgcggacccggtgctgctgcaggcccaggtgcaggagggcttcggctcgctgcggcgctgctacgcgcggggcgccgggccgcacccccgccaacccgccttccagggcctctttctgctctataacctggagatgggatctcgcatgttgccactcgaattcctgggctcaagtgatcctcctgccccaccctcccaagtagccgggtgtggccatcatgcccagtgaatggtttatttttgtccacactgttcctctgaagaaggcatggctcggtggaagccctgcatgaggttctacagctgcctgctgccctgcgcgcctgcccgcccctccgcaaggccttggcggtagatgctgccttccgagagggcaatgctgcccgcctgttccgtctgctccagaccctgccctacctgccaagttgcgctgtgcagtgccatgtgggccatgcccgccgggaagccctggcccgcttcgctcgtgcctttagcacccccaagggccagaccttgcctctgggcttcatggtcaacctcttggccctggatggactcagggaagcacgggacctgtgccaggcccacgggctgcccttggacggagaggagagagttgtgttcctgaggggtcgctacgtggaggaagggctaccgcctgccagtacgtgcaaggtgttagtggagagcaaacttcgaggacgtaccctggaggaggtggtcatggcagaggaggaagatgagggcacggacagacctgggtccccagcctgaggagggagcgtgagcctcccagagccccaggactgggccagagcacttaggtttctttttccatggtttccaggtaataaaaggaacttgttttgttggtaccaaaaacaagatgtgat

SEQ ID NO: 279262 - DNA, 1406 bp, Homo sapiens
acaaagcggttggttgcggcagggactacaccggtgtatcatgggagcggcccgggctacacgttaaaaacactaaggggagcgcgcgaagctgaacttggcgctcgatgggggccgttagccgccctagagcgcgcggagccgcagaggcgtagctggactacaacgcagtgcatctcgggaggccaactcgactggactggccccctcatgcccggctgcgagctgcccgtgggcacctgcccggacatgtgcccggccgccgagcgcgcccagcgcgaaagggagcaccgcctgcaccgcttggaggtggtgccgggttgccgccaggacccgccccgcgcggatccgcagcgcgcggtgaaggagtacagccgacccgccgccggcaagccccggcccccgcccagccagttgcgtccgccctccgtgctgctggccaccgtgcgctacctggccggtgaggtggcggagagcgccgacatcgcccgcgccgaggtggccagcttcgtggcagaccgcttgcgagctgtgcgcctggacctggcgctgcagggagcgggcgacgccgaggcagcggtggtgctggaggcggcgctggccacgctgctggccgtagtggcgcggctcgggcccgacgcggcgcggggacccgcggacccggtgctgctgcaggcccaggtgcaggagggcttcggctcgctgcggcgctgctacgcgcggggcgccgggccgcacccccgccaacccgccttccagggcctctttctgctctataacctgggctcggtggaagccctgcatgaggttctacagctgcctgctgccctgcgcgcctgcccgcccctccgcaaggccttggcggtagatgctgccttccgagagggcaatgctgcccgcctgttccgtctgctccagaccctgccctacctgccaagttgcgctgtgcagtgccatgtgggccatgcccgccgggaagccctggcccgcttcgctcgtgcctttagcacccccaagggccagaccttgcctctgggcttcatggtcaacctcttggccctggatggactcagggaagcacgggacctgtgccaggcccacgggctgcccttggacggagaggagagagttgtgttcctgaggggtcgctacgtggaggaagggctaccgcctgccagtacgtgcaaggtgttagtggagagcaaacttcgaggacgtaccctggaggaggtggtcatggcagaggaggaagatgagggcacggacagacctgggtccccagcctgaggagggagcgtgagcctcccagagccccaggactgggccagagcacttaggtttctttttccatggtttccaggtaataaaaggaacttgttttgttggtaccaaaaacaagatgtgat

SEQ ID NO: 279263 - DNA, 1211 bp, Homo sapiens
taggctggtcgaggcctggttgtaatcggccgaggggatgctgagcgcccaccgtctccccgcagccccctcatgcccggctgcgagctgcccgtgggcacctgcccggacatgtgcccggccgccgagcgcgcccagcgcgaaagggagcaccgcctgcaccgcttggaggtggtgccgggttgccgccaggacccgccccgcgcggatccgcagcgcgcggtgaaggagtacagccgacccgccgccggcaagccccggcccccgcccagccagttgcgtccgccctccgtgctgctggccaccgtgcgctacctggccggtgaggtggcggagagcgccgacatcgcccgcgccgaggtggccagcttcgtggcagaccgcttgcgagctgtgcgcctggacctggcgctgcagggagcgggcgacgccgaggcagcggtggtgctggaggcggcgctggccacgctgctggccgtagtggcgcggctcgggcccgacgcggcgcggggacccgcggacccggtgctgctgcaggcccaggtgcaggagggcttcggctcgctgcggcgctgctacgcgcggggcgccgggccgcacccccgccaacccgccttccagggcctctttctgctctataacctgggctcggtggaagccctgcatgaggttctacagctgcctgctgccctgcgcgctgcccgcctgttccgtctgctccagaccctgccctacctgccaagttgcgctgtgcagtgccatgtgggccatgcccgccgggaagccctggcccgcttcgctcgtgcctttagcacccccaagggccagaccttgcctctgggcttcatggtcaacctcttggccctggatggactcagggaagcacgggacctgtgccaggcccacgggctgcccttggacggagaggagagagttgtgttcctgaggggtcgctacgtggaggaagggctaccgcctgccagtacgtgcaaggtgttagtggagagcaaacttcgaggacgtaccctggaggaggtggtcatggcagaggaggaagatgagggcacggacagacctgggtccccagcctgaggagggagcgtgagcctcccagagccccaggactgggccagagcacttaggtttctttttccatggtttccaggtaataaaaggaacttgttttgttggtaccaaaaacaagatgtgat

SEQ ID NO: 279264 - DNA, 749 bp, Homo sapiens
gcctcctgagtagctgagactacaagcatgttgccaacacgcctgtctcattttggcattataatatttttagtggagatgaggtttcgccatgttggccaggctggtctcaaactcctggcctcaaaattgagttttatttattagattgccaaattttatgacaaatggtcacacccactgttggagagggtacaaagatatgagcactcatataatggaggaattgaagccatttaaatgacattagtgaagaatgttggtggcataaatttttaaatgagtgaccttttttgattttcttttttaaatttatatatacacagaaaagagtgaataaataaacaccagaaatgtagaaattattgctgggtgattaagtgtggttttgtttttggtttcaatataatggccatgtatttgaggattggggtaacaaggtaggaggagatacttctttttacgtaaaatttggcaagtttttaatctaatttactagttatataaactgtaattttcatttagaaagaaaaaaaaaaacaaaggaaacaagtgcatcatcatgctcagcctgagtcagaaagcagcagcacggattggcttcttgtagccttgagatgggaacacagagtggtcttcagtctactcggaataactttcttcattgaaatattttcattgacttacttttttcatttcctcataatattgtctctttataaattatcccaaaattaaattaacatctg

SEQ ID NO: 279265 - DNA, 313 bp, Homo sapiens
cggacgcgtgggaaacactgtagatgtacaggaggtctccttttttctggacaatttaaaaggaaacactgtagatgtacagaaaaaaggtgtgttcttcataagcttcagtgcaggatttttcaaagacgagctgttgtgcaatttgctgtatttaatgcatgttctgaaaggattcacttttgactttatatgacagttgatcaagaacaggtactacccctttttttcatttcaaacttgaaactgtgaataaggtaagaaaactattttgaataaataaactatttatttaaaatgtcaaaaaaaaatt

SEQ ID NO: 279266 - DNA, 2806 bp, Homo sapiens
gatgaaagttatagtgaagaggaggaagagatgcccgacagtgatgaaaatggatcctatagcaccagctctgatccatcagatgatagcaaagcagtagctataatcaagtctgttggagaactatcagtaccagaaaaatacaaatctattcatcaaatcagacccagttgtgcatttccagtttgccatgacacagaagagcgctgtagacttgtgcttagctatgttctagagggtttaaaatctgtcgatagcagcatcaaaaaagaaagcgaccttccagcagctgaccccagcactccaatcccgttaaaatatgaagatgaatcctcaagagggggtcccgaggggctagagaagcagatggccttgtttttggacaaaatgggctcccttcagaagggcaattattccagtcaatctggaatgatccctggctcttggcaacataaaatgaaacttcagctgattctcaagtcatcaaaggcctattatgttttgtccgatgctgccatgagtcttcagaaatacggaagagcattacgatacattaaattagctttgcaaagccatgatacttattgctgcctctgcaccaatatgctttccgaagtgctgttgtttctctctcaatatttgacactttgtggtgatatccaactaatgctggcccagaatgcaaataatagagcagcacaccttgaagagtttcattaccaaacaaaagaagaccaggagatcctgcatagccttcacagagagtccagttgccaaggatttgcatgggcaactgatttgtctacagacttagaaagtcaactctctgttagttgtaaatgttatgaggctgctaatgaaatcttgcagtttagtgacttgaaaagccaaaatccagaacactatgtacaagtattaaagagaatgggtaacattagaaatgaaattggtgtgttttacatgaatcaggctgctgcattacagagtgagagactagtgagcaaatctgtgtctgctgccgagcaacagttgtggaaaaaaagcttttcttgttttgaaaagggaattcacaactttgaatcaattgaggatgccaccaatgccgcccttttattatgtaacacgggaaggctcatgcggatttgtgcgcaggcccactgtggtgcaggggatgaactgaaacgtgaattttcaccagaagaaggcttgtattataataaggctattgattactatttgaaagcgctaaggtcattgggaacacgagacatacacccagctgtttgggattcagtgaactgggaattgtccactacttactttactatggcaactctacagcaagattatgctccgttatctagaaaagctcaggagcagattgagaaagaagtcagtgaggccatgatgaagtccctaaaatactgcgatgtggattcagtgtctgctcgacagcccctttgtcagtatcgagctgcaaccatccatcacaggctggcctccatgtaccacagctgtctgaggaatcaggttggtgatgaacaccttaggaaacaacaccgggtgctggcagatcttcattacagcaaggccgcaaagctgtttcagctgctgaaagatgctccctgcgaactgcttagagtacagctagagagagtagcatttgctgaatttcagatgaccagtcagaatagcaatgttggaaagttgaaaacactatctggggctcttgatataatggtgagaactgagcacgcattccagcttatccagaaggagcttatagaagaatttggccagcctaagagtggtgacgccgctgcagctgctgatgcttctcctagtctcaatcgagaagaagtgatgaaactcctcagtatatttgagtctcggttgtcatttcttctccttcagtccattaaactgctatcttcaactaaaaagaaaacaagcaataacatcgaagatgacacaattctcaaaaccaacaagcacatttactcccagcttttgagagcaactgcaaataaaaccgcgactcttctggaaagaatcaacgttatcgtccacctgctgggccagcttgccgccggcagtgcagcgagcagcaatgccgttcagtgactgcacagagccgtgtcccagacacgctgtcagtgccttcaacacggagccggtttgttcattcggtgctttgtttcattaaataatagggaaatatccatttaaaacaggtatatcagtggaaacacagagttattttaagtgacagacaaattacggttgagttctgtggcttcttcacttgaagtgctaacatcagaatcaaacttaaagcttccactatttatgtctttgagaagtatgtagtacctcggtattaacagacctgctgtgatgcagttacactttcacgtatttttgaagtatgtcaagctacacgggtctaagatatgattattttggataaaatgttactttggtcaagagaacttttatccagatgacattacaggttcaagtgggttaaggagacctcctgtacatctacagtgtttccttttaaattgtccagaaaaaaggtgtgttcttcataagcttcagtgcaggatttttcaaagacgagctgttgtgcaatttgctgtatttaatgcatgttctgaaaggattcacttttgactttatatgacagttgatcaagaacaggtactacccctttttttcatttcaaacttgaaactgtgaataaggtaagaaaactattttgaataaataaactatttatttaaaatgtcaaaaaaaaatt

SEQ ID NO: 279267 - DNA, 1406 bp, Homo sapiens
ctaaatataaaagctaaaactaataagacctagtaagacccacagtgggggaaaaataactaagaagcacttagtgaagcctgaagtagttaccgtgaaggatttgttgcttgttttggtttggttctaggttggtgatgaacaccttaggaaacaacaccgggtgctggcagatcttcattacagcaaggccgcaaagctgtttcagctgctgaaagatgctccctgcgaactgcttagagtacagctagagagagtagcatttgctgaatttcagatgaccagtcagaatagcaatgttggaaagttgaaaacactatctggggctcttgatataatggtgagaactgagcacgcattccagcttatccagaaggagcttatagaagaatttggccagcctaagagtggtgacgccgctgcagctgctgatgcttctcctagtctcaatcgagaagaagtgatgaaactcctcagtatatttgagtctcggttgtcatttcttctccttcagtccattaaactgctatcttcaactaaaaagaaaacaagcaataacatcgaagatgacacaattctcaaaaccaacaagcacatttactcccagcttttgagagcaactgcaaataaaaccgcgactcttctggaaagaatcaacgttatcgtccacctgctgggccagcttgccgccggcagtgcagcgagcagcaatgccgttcagtgactgcacagagccgtgtcccagacacgctgtcagtgccttcaacacggagccggtttgttcattcggtgctttgtttcattaaataatagggaaatatccatttaaaacaggtatatcagtggaaacacagagttattttaagtgacagacaaattacggttgagttctgtggcttcttcacttgaagtgctaacatcagaatcaaacttaaagcttccactatttatgtctttgagaagtatgtagtacctcggtattaacagacctgctgtgatgcagttacactttcacgtatttttgaagtatgtcaagctacacgggtctaagatatgattattttggataaaatgttactttggtcaagagaacttttatccagatgacattacaggttcaagtgggttaaggagacctcctgtacatctacagtgtttccttttaaattgtccagaaaaaaggtgtgttcttcataagcttcagtgcaggatttttcaaagacgagctgttgtgcaatttgctgtatttaatgcatgttctgaaaggattcacttttgactttatatgacagttgatcaagaacaggtactacccctttttttcatttcaaacttgaaactgtgaataaggtaagaaaactattttgaataaataaactatttatttaaaatgtcaaaaaaaaatt

SEQ ID NO: 279268 - DNA, 2290 bp, Homo sapiens
gatgaaagttatagtgaagaggaggaagagatgcccgacagtgatgaaaatggatcctatagcaccagctctgatccatcagatgatagcaaagcagtagctataatcaagtctgttggagaactatcagtaccagaaaaatacaaatctattcatcaaatcagacccagttgtgcatttccagtttgccatgacacagaagagcgctgtagacttgtgcttagctatgttctagagggtttaaaatctgtcgatagcagcatcaaaaaagaaagcgaccttccagcagctgaccccagcactccaatcccgttaaaatatgaagatgaatcctcaagagggggtcccgaggggctagagaagcagatggccttgtttttggacaaaatgggctcccttcagaagggcaattattccagtcaatctggaatgatccctggctcttggcaacataaaatgaaacttcagctgattctcaagtcatcaaaggcctattatgttttgtccgatgctgccatgagtcttcagaaatacggaagagcattacgatacattaaattagctttgcaaagccatgatacttattgctgcctctgcaccaatatgctttccgaagtgctgttgtttctctctcaatatttgacactttgtggtgatatccaactaatgctggcccagaatgcaaataatagagcagcacaccttgaagagtttcattaccaaacaaaagaagaccaggagatcctgcatagccttcacagagagtccagttgccaaggatttgcatgggcaactgatttgtctacagacttagaaagtcaactctctgttagttgtaaatgttatgaggctgctaatgaaatcttgcagtttagtgacttgaaaagccaaaatccagaacactatgtacaagtattaaagagaatgggtaacattagaaatgaaattggtgtgttttacatgaatcaggctgctgcattacagagtgagagactagtgagcaaatctgtgtctgctgccgagcaacagttgtggaaaaaaagcttttcttgttttgaaaagggaattcacaactttgaatcaattgaggatgccaccaatgccgcccttttattatgtaacacgggaaggctcatgcggatttgtgcgcaggcccactgtggtgcaggggatgaactgaaacgtgaattttcaccagaagaaggcttgtattataataaggctattgattactatttgaaagcgctaaggtcattgggaacacgagacatacacccagctgtttgggattcagtgaactgggaattgtccactacttactttactatggcaactctacagcaagattatgctccgttatctagaaaagctcaggagcagattgagaaagaagtcagtgaggccatgatgaagtccctaaaatactgcgatgtggattcagtgtctgctcgacagcccctttgtcagtatcgagctgcaaccatccatcacaggctggcctccatgtaccacagctgtctgaggaatcaggttggtgatgaacaccttaggaaacaacaccgggtgctggcagatcttcattacagcaaggccgcaaagctgtttcagctgctgaaagatgctccctgcgaactgcttagagtacagctagagagagtagcatttgctgaatttcagatgaccagtcagaatagcaatgttggaaagttgaaaacactatctggggctcttgatataatggtgagaactgagcacgcattccagcttatccagaaggagcttatagaagaatttggccagcctaagagtggtgacgccgctgcagctgctgatgcttctcctagtctcaatcgagaagaagtgatgaaactcctcagtatatttgagtctcggttgtcatttcttctccttcagtccattaaactgctatcttcaactaaaaagaaaacaagcaataacatcgaagatgacacaattctcaaaaccaacaagcacatttactcccagcttttgagagcaactgcaaataaaaccgcgactcttctggaaagaatcaacgttatcgtccacctgctgggccagcttgccgccggcagtgcagcgagcagcaatgccgttcagtgactgcacagagccgtgtcccagacacgctgtcagtgccttcaacacggagccgttgatcaagaacaggtactacccctttttttcatttcaaacttgaaactgtgaataaggtaagaaaactattttgaataaataaactatttatttaaaatgtcaaaaaaaaatt

SEQ ID NO: 279269 - DNA, 1445 bp, Homo sapiens
gatgaaagttatagtgaagaggaggaagagatgcccgacagtgatgaaaatggatcctatagcaccagctctgatccatcagatgatagcaaagcagtagctataatcaagtctgttggagaactatcagtaccagaaaaatacaaatctattcatcaaatcagacccagttgtgcatttccagtttgccatgacacagaagagcgctgtagacttgtgcttagctatgttctagagggtttaaaatctgtcgatagcagcatcaaaaaagaaagcgaccttccagcagctgaccccagcactccaatcccgttaaaatatgaagatgaatcctcaagagggggtcccgaggggctagagaagcagatggccttgtttttggacaaaatgggctcccttcagaagggcaattattccagtcaatctggaatgatccctggctcttggcaacataaaatgaaacttcagctgattctcaagtcatcaaaggcctattatgttttgtccgatgctgccatgagtcttcagaaatacggaagagcattacgatacattaaattagctttgcaaagccatgatacttattgctgcctctgcaccaatatgctttccgaagtgctgttgtttctctctcaatatttgacactttgtggtgatatccaactaatgctggcccagaatgcaaataatagagcagcacaccttgaagagtttcattaccaaacaaaagaagaccaggagatcctgcatagccttcacagagagtccagttgccaaggatttgcatgggcaactgatttgtctacagacttagaaagtcaactctctgttagttgtaaatgttatgaggctgctaatgaaatcttgcagtttagtgacttgaaaagccaaaatccagaacactatgtacaagtattaaagagaatgggtaacattagaaatgaaattggtgtgttttacatgaatcaggctgctgcattacagagtgagagactagtgagcaaatctgtgtctgctgccgagcaacagttgtggaaaaaaagcttttcttgttttgaaaagggaattcacaactttgaatcaattgaggatgccaccaatgccgcccttttattatgtaacacgggaaggctcatgcggatttgtgcgcaggcccactgtggtgcaggggatgaactgaaacgtgaattttcaccagaagaaggcttgtattataataagaaagaaaaaaaaaaacaaaggaaacaagtgcatcatcatgctcagcctgagtcagaaagcagcagcacggattggcttcttgtagccttgagatgggaacacagagtggtcttcagtctactcggaataactttcttcattgaaatattttcattgacttacttttttcatttcctcataatattgtctctttataaattatcccaaaattaaattaacatctg

SEQ ID NO: 279270 - DNA, 497 bp, Homo sapiens
cccggctccactgcattttcttcatggccgtccgtctgtcactctcttgtttactatggtttcccccagtgcctcccctcccctcccccaaactcctacctcaataggatgcaaattccataaggcaggggcttctttttgcctgttttgttctctgtcaagagcaattcctagtacataataggcattcaaatatttataaaaggaatgagtactggatttcattgatgtattgaaataaatgtgtagaaacaggcccatgagcaatatgtaaaagaaggcaggtctgaacccggcaggagaggaatgcctgctgctctgtgaagagtgactgttgggctgtcactgtccggttttctggacctctgaattgtcggtaggcattgctggtcccttacctgtctctttttcttttttaaccctagcaataacatcgaagatgacacaattctcaaaaccaacaagcacatttactcccagcttttgagagcaactgc

SEQ ID NO: 279271 - DNA, 1253 bp, Homo sapiens
gatgaaagttatagtgaagaggaggaagagatgcccgacagtgatgaaaatggatcctatagcaccagctctgatccatcagatgatagcaaagcagtagctataatcaagtctgttggagaactatcagtaccagaaaaatacaaatctattcatcaaatcagacccagttgtgcatttccagtttgccatgacacagaagagcgctgtagacttgtgcttagctatgttctagagggtttaaaatctgtcgatagcagcatcaaaaaagaaagcgaccttccagcagctgaccccagcactccaatcccgttaaaatatgaagatgaatcctcaagagggggtcccgaggggctagagaagcagatggccttgtttttggacaaaatgggctcccttcagaagggcaattattccagtcaatctggaatgatccctggctcttggcaacataaaatgaaacttcagctgattctcaagtcatcaaaggcctattatgttttgtccgatgctgccatgagtcttcagaaatacggaagagcattacgatacattaaattagctttgcaaagccatgatacttattgctgcctctgcaccaatatgctttccgaagtgctgttgtttctctctcaatatttgacactttgtggtgatatccaactaatgctggcccagaatgcaaataatagagcagcacaccttgaagagtttcattaccaaacaaaagaagaccaggagatcctgcatagccttcacagagagtccagttgccaaggtgtgccacaggcttggaccacgtggttcacagtgggactgtgcagtctagctcatgcttatttgagtattcagaaaaggggtagaaatattagagttttgatatttgctctgtatttatttatttattttttgagacggagtttcgctcttgttgcccaagctggagtgcaatggtgcaatcttggctcactgaaacctccgcctcccgggttcaagcaattctcctgcctcagcctcccaagtagctggaattacaggcatgcgccaccatgcccggctagcccaccttggcctcccaaggtgctgggattacaggtgtgagccaccacgcctggcctgctgttttattcatttcctaattttaagattaagcatgatcttgtgtatttgtataaaatggtttttaagtattttataattactgtttatataactagaactaaatataaagtaagatatgaagacagttgtgt

SEQ ID NO: 279272 - DNA, 2733 bp, Homo sapiens
taatgcttacagtaatttaatcttcaacaaaaacaatatgttgaccttaatacattggtagtgtattaataattttatgtttgttcctcaagcccagttgtgcatttccagtttgccatgacacagaagagcgctgtagacttgtgcttagctatgttctagagggtttaaaatctgtcgatagcagcatcaaaaaagaaagcgaccttccagcagctgaccccagcactccaatcccgttaaaatatgaagatgaatcctcaagagggggtcccgaggggctagagaagcagatggccttgtttttggacaaaatgggctcccttcagaagggcaattattccagtcaatctggaatgatccctggctcttggcaacataaaatgaaacttcagctgattctcaagtcatcaaaggcctattatgttttgtccgatgctgccatgagtcttcagaaatacggaagagcattacgatacattaaattagctttgcaaagccatgatacttattgctgcctctgcaccaatatgctttccgaagtgctgttgtttctctctcaatatttgacactttgtggtgatatccaactaatgctggcccagaatgcaaataatagagcagcacaccttgaagagtttcattaccaaacaaaagaagaccaggagatcctgcatagccttcacagagagtccagttgccaaggatttgcatgggcaactgatttgtctacagacttagaaagtcaactctctgttagttgtaaatgttatgaggctgctaatgaaatcttgcagtttagtgacttgaaaagccaaaatccagaacactatgtacaagtattaaagagaatgggtaacattagaaatgaaattggtgtgttttacatgaatcaggctgctgcattacagagtgagagactagtgagcaaatctgtgtctgctgccgagcaacagttgtggaaaaaaagcttttcttgttttgaaaagggaattcacaactttgaatcaattgaggatgccaccaatgccgcccttttattatgtaacacgggaaggctcatgcggatttgtgcgcaggcccactgtggtgcaggggatgaactgaaacgtgaattttcaccagaagaaggcttgtattataataaggctattgattactatttgaaagcgctaaggtcattgggaacacgagacatacacccagctgtttgggattcagtgaactgggaattgtccactacttactttactatggcaactctacagcaagattatgctccgttatctagaaaagctcaggagcagattgagaaagaagtcagtgaggccatgatgaagtccctaaaatactgcgatgtggattcagtgtctgctcgacagcccctttgtcagtatcgagctgcaaccatccatcacaggctggcctccatgtaccacagctgtctgaggaatcaggttggtgatgaacaccttaggaaacaacaccgggtgctggcagatcttcattacagcaaggccgcaaagctgtttcagctgctgaaagatgctccctgcgaactgcttagagtacagctagagagagtagcatttgctgaatttcagatgaccagtcagaatagcaatgttggaaagttgaaaacactatctggggctcttgatataatggtgagaactgagcacgcattccagcttatccagaaggagcttatagaagaatttggccagcctaagagtggtgacgccgctgcagctgctgatgcttctcctagtctcaatcgagaagaagtgatgaaactcctcagtatatttgagtctcggttgtcatttcttctccttcagtccattaaactgctatcttcaactaaaaagaaaacaagcaataacatcgaagatgacacaattctcaaaaccaacaagcacatttactcccagcttttgagagcaactgcaaataaaaccgcgactcttctggaaagaatcaacgttatcgtccacctgctgggccagcttgccgccggcagtgcagcgagcagcaatgccgttcagtgactgcacagagccgtgtcccagacacgctgtcagtgccttcaacacggagccggtttgttcattcggtgctttgtttcattaaataatagggaaatatccatttaaaacaggtatatcagtggaaacacagagttattttaagtgacagacaaattacggttgagttctgtggcttcttcacttgaagtgctaacatcagaatcaaacttaaagcttccactatttatgtctttgagaagtatgtagtacctcggtattaacagacctgctgtgatgcagttacactttcacgtatttttgaagtatgtcaagctacacgggtctaagatatgattattttggataaaatgttactttggtcaagagaacttttatccagatgacattacaggttcaagtgggttaaggagacctcctgtacatctacagtgtttccttttaaattgtccagaaaaaaggtgtgttcttcataagcttcagtgcaggatttttcaaagacgagctgttgtgcaatttgctgtatttaatgcatgttctgaaaggattcacttttgactttatatgacagttgatcaagaacaggtactacccctttttttcatttcaaacttgaaactgtgaataaggtaagaaaactattttgaataaataaactatttatttaaaatgtcaaaaaaaaatt

SEQ ID NO: 279273 - DNA, 1932 bp, Homo sapiens
gatgaaagttatagtgaagaggaggaagagatgcccgacagtgatgaaaatggatcctatagcaccagctctgatccatcagatgatagcaaagcagtagctataatcaagtctgttggagaactatcagtaccagaaaaatacaaatctattcatcaaatcagacccagttgtgcatttccagtttgccatgacacagaagagcgctgtagacttgtgcttagctatgttctagagggtttaaaatctgtcgatagcagcatcaaaaaagaaagcgaccttccagcagctgaccccagcactccaatcccgttaaaatatgaagatgaatcctcaagagggggtcccgaggggctagagaagcagatggccttgtttttggacaaaatgggctcccttcagaagggcaattattccagtcaatctggaatgatccctggctcttggcaacataaaatgaaacttcagctgattctcaagtcatcaaaggcctattatgttttgtccgatgctgccatgagtcttcagaaatacggaagagcattacgatacattaaattagctttgcaaagccatgatacttattgctgcctctgcaccaatatgctttccgaagtgctgttgtttctctctcaatatttgacactttgtggtgatatccaactaatgctggcccagaatgcaaataatagagcagcacaccttgaagagtttcattaccaaacaaaagaagaccaggagatcctgcatagccttcacagagagtccagttgccaaggatttgcatgggcaactgatttgtctacagacttagaaagtcaactctctgttagttgtaaatgttatgaggctgctaatgaaatcttgcagtttagtgacttgaaaagccaaaatccagaacactatgtacaagtattaaagagaatgggtaacattagaaatgaaattggtgtgttttacatgaatcaggctgctgcattacagagtgagagactagtgagcaaatctgtgtctgctgccgagcaacagttgtggaaaaaaagcttttcttgttttgaaaagggaattcacaactttgaatcaattgaggatgccaccaatgccgcccttttattatgtaacacgggaaggctcatgcggatttgtgcgcaggcccactgtggtgcaggggatgaactgaaacgtgaattttcaccagaagaaggcttgtattataataaggctattgattactatttgaaagcgctaaggtcattgggaacacgagacatacacccagctgtttgggattcagtgaactgggaattgtccactacttactttactatggcaactctacagcaagattatgctccgttatctagaaaagctcaggagcagattgagaaagaagtcagtgaggccatgatgaagtccctaaaatactgcgatgtggattcagtgtctgctcgacagcccctttgtcagtatcgagctgcaaccatccatcacaggctggcctccatgtaccacagctgtctgaggaatcaggttggtgatgaacaccttaggaaacaacaccgggtgctggcagatcttcattacagcaaggccgcaaagctgtttcagctgctgaaagatgctccctgcgaactgcttagagtacagctagagagagtagcatttgctgaatttcagatgaccagtaagtcttaattttcatttctcagatatgtatgcattggcttagtgctggattgtcttagagtaaggcaggcctgtgaatctaaataatactattttctttttaatttgccccatagttaatgacttcgggtagagagggtgagaaatcactacatgttttgaagtgctttttaaaacttagaggaatgtattagattatgttcagtgactagaaatactgagatatggcccatgacccctagtttg

SEQ ID NO: 279274 - DNA, 725 bp, Homo sapiens
ggctgatggtttcagctagataagactggaagacagcaaggacttggaaatgtactcacagaccctcctacccgtgataactgacttcagagcacaccttcattcccacctttctatattttaacatgggattgagactgggacagaggttaacaaggcatctcaagccaatcaagaactagatgcacataactgcatttgatggggaagtaaaaattactacaaatttaaaaaaaagtgtatatacgttcaccaagtagctataattctagggtcttatttttaaggaaaaaaaaatgcattaaaggtagaaaaggagaaacataggtggagggagaggaagaaagctggagaggaaggcattttgaacatctatcactattatattaggaacttcacatgaaccatctcatttacctctcacaaaatctatgagattgagacaatgctgcttattatggcatcgttaatcatagtgaaaaattgaaaacagccttcttgtatactgctaagaaaactggggccttaagtgggtgcaaatgtttgtctaaaccaatacattgactgctctacaagaaaatgctggtgtggtccttcagatattctgccagggttctccactgagtgaactcaaccagaagccaaaggacatggaaacccattgatgtccctcccaggacaaggtggatgaacagaaattgatctgaaaggacaaatggaagaaa

SEQ ID NO: 279275 - DNA, 661 bp, Homo sapiens
tggttttgaaaaactaagagtcctcggagcaggggtctgcagtctggtgaaagcaggttgcatcctggcgccttgggctgtccagaccgtgtctctcggtactctctcataaataacaatagaataattacgaaggcgagagagctttcggaactggaatggcctgagcatggcgcttgttctggaaccagacgcggatgacccgcgggctcaggccggtcatctccaccagctgctccttcatgagagcgtcgggccgcgggttggcggcgtagcaggtccgcagagtgtgcagctgcttctcgttcagcacagtccgcacgcgggtcgtcttctccgtctgcttgtgcacgtgcgggcgcaacgcgggctgccggcccgacccagcgtctgccaggacaggtcgcaggaccctcggaacgagcgaagccctccggaagaagtcggagtttcagaggaagaggaaagaggcttgcccaggactctggagagggaaagggaccgacgtggacccagggcgaggcgctgcccagggactgggtgggaggtgcgaatatgccgggggcctacgagggcccttcccctccttcagagcccatttggacagggccaggccacatgtgtagaagactcatccacggttatggacgggcctccaggg

SEQ ID NO: 279276 - DNA, 427 bp, Homo sapiens
ttcagaagctgttcgatggcaacgtggcggacatggagctgtgaggccaaagaatctttttcttgcacttggttgtcccagcatcagctattgaggctgataagcaaaagggagctgctatgcaatttcaggattggtgccgacatcttcacctgtgctcacactgtctgcttccactcactcataatcctgttctctctcttgaaagaaaggctaattaggataaatatgctagtctgccttacttggatggtggaagaacagagagcagtgttagaatcactgtttcattaccagctgacatctgcatggttcttctgggtaaggaccagcaacaagactgtcttgtgtgtgtcctttttcttcctagctcctcccatctctctgattaacaccaatccaataaaaatttctcaaaactatatta

SEQ ID NO: 279277 - DNA, 388 bp, Homo sapiens
agtgacttctcacaagatatggttgtttaaaagttgtcccagcatcagctattgaggctgataagcaaaagggagctgctatgcaatttcaggattggtgccgacatcttcacctgtgctcacactgtctgcttccactcactcataatcctgttctctctcttgaaagaaaggctaattaggataaatatgctagtctgccttacttggatggtggaagaacagagagcagtgttagaatcactgtttcattaccagctgacatctgcatggttcttctgggtaaggaccagcaacaagactgtcttgtgtgtgtcctttttcttcctagctcctcccatctctctgattaacaccaatccaataaaaatttctcaaaactatatta

SEQ ID NO: 279278 - DNA, 2201 bp, Homo sapiens
ccccaaaccttacccgggaagcaggagaaccagatgaggcgttacgcaaggcctggtgtttacctcccgtgggagcctcctccctccctataaagcctgatgtggtggagagatttgacgagactgagactctggttgaagagagaggcaatcccaggagaggggcggaaagcggcaaaagttaatgcgggagtcggagagaagggcatctacacagcaagcagcaggggcggcccgccatctgcgcgctcgaaggcggtcacggtggtcgcggaaggggcggcgtccagatcctggctttccatggatgcgcccgagctgggcccggggctggtggagcgtctggagcagctggcgacgtgtcctctgtgcgggggctccttcgaggacccggtgcttctggcgtgcgagcacagcttctgccgcgcgtgtctggcccgccgctgggggactccgccggcgaccggcaccgaggcttcccccaccgcctgtccctgctgcggcctgccgtgtccccgccgcagcctgaggtctaatgtgcggctggcggtggaggtgcgaatcagccgcgagctgcgagagaagctggctgagcctggggcccgtgcggggagacgccgaggggggcgcatccccaccatgggctgcctggacctgcccggagaggatatgaggaagacatggagacgatttgaagtcccaacatccaagtcatctaattcagaggatgatctccctgaagattatccagtggtcaaaaaaatgcttcatagactgacagccgacctgaccctggaccctgggaccgcacaccgccgcctgctcatctccgccgaccgccgcagcgtacaactggccccaccagggacgcccgcgccccctgacggccccaagcgcttcaatcagctcccagctgtgctgggtgcgcagggcttcggggccggccgccactgctgggaggtggagactgcggacgccgcctcctgcagagactcttctggggaggatgcggacgacgaggagagccactatgcagtgggcgcggccggggaatcagtgcaacgcaagggctgcgtaaggctgtgccctgcgggggccgtgtgggccgtggagggccgcggcggccgcctgtgggccctcacggcacccgaacccaccctgctgggcggtgttgagcccccgccgcggcgcattcgcgtggacctggactgggagcggggccgcgtggccttctacgacggccgctcactcgacctgctttacgccttccaggcgcctggccccctgggggagcgcatcttcccgctgttctgcacctgcgaccctcgtgctccgctccgcattgtaccagcggaaagctgagtctcgtctccaactagaagtttggcccggccactggccctgcagctgctttttgggggtggaattccccactcatttctgggaacacattcacacgcccattgcaggagtattaatagcaacccacattttcgccccaaaataatgagacctcacctggtctccacgtttccacgtccctgctcaaaaccaaatccattcctgccttctggctctcagaatcttctctcccctacagctactacagtacttcctgacttctcccattcaaaccattctagctgcaatggggaacaggccctccccatcagtattggtaaagtgaccatgattcctacatagaggctctgctggtcaaatacttgactcccactcttgccactcctagctccagaagggctcagggccttccccacagatctaaggactgggctaccctgcctgtccactgaggtttctcctaaaacaagaggcttgactctggtctgggccctgtggccctctgggaagctttgtacctcttttgcaggatctgggggtggggagggacaagctagttccccaacctcctatgactgctttctatgctcacagccttttttccataagaaccttcttgaaacttctccccgcacatactcacggaaaggaaccaatggtgctatttcccctctctcctcctcaacctgggaatacttcagacatctccaaactcatccttgtgtatagtctcacacccttccccataagtataaatgggcccatatttaacacattttgtgattttgggttatttattttgtgcatctgtggcaataaatgagatctcagtggtggta

SEQ ID NO: 279279 - DNA, 2064 bp, Homo sapiens
tattgcaagaggggaagcagctttattgtaaggcttttatataccaactcttagcccgagggctctgggtgtgtgtttggtctgtgtgatggagggaggaagggacagatgtttttctgggatgcactggggaaggtagataaggatggggccgctgaaagagacagagaatgggactgaggaggcagcaaggaaggcaagggctctgaggacaagaaacagtcatggacgagcctgggaaaagagaattgagaacccttggggagtggaaagggagaggacagtggggatggagttaggaggatgagggaaaagtgatggggtgagaggaaggagggatcatgaaaggtgaaggaggagaatgagagggaaaggagcacagtgtgtaaagaggtgagatcactctgaaaggtgaggagggacactgctaactcagacagaactcacctgaggaggggagagatagggaaggatgccccagggaatgaagcccagagctcacatccatgtttgtttctgcccatcctaggatatgaggaagacatggagacgatttgaagtcccaacatccaagtcatctaattcagaggatgatctccctgaagattatccagtggtcaaaaaaatgcttcatagactgacagccgacctgaccctggaccctgggaccgcacaccgccgcctgctcatctccgccgaccgccgcagcgtacaactggccccaccagggacgcccgcgccccctgacggccccaagcgcttcaatcagctcccagctgtgctgggtgcgcagggcttcggggccggccgccactgctgggaggtggagactgcggacgccgcctcctgcagagactcttctggggaggatgcggacgacgaggagagccactatgcagtgggcgcggccggggaatcagtgcaacgcaagggctgcgtaaggctgtgccctgcgggggccgtgtgggccgtggagggccgcggcggccgcctgtgggccctcacggcacccgaacccaccctgctgggcggtgttgagcccccgccgcggcgcattcgcgtggacctggactgggagcggggccgcgtggccttctacgacggccgctcactcgacctgctttacgccttccaggcgcctggccccctgggggagcgcatcttcccgctgttctgcacctgcgaccctcgtgctccgctccgcattgtaccagcggaaagctgagtctcgtctccaactagaagtttggcccggccactggccctgcagctgctttttgggggtggaattccccactcatttctgggaacacattcacacgcccattgcaggagtattaatagcaacccacattttcgccccaaaataatgagacctcacctggtctccacgtttccacgtccctgctcaaaaccaaatccattcctgccttctggctctcagaatcttctctcccctacagctactacagtacttcctgacttctcccattcaaaccattctagctgcaatggggaacaggccctccccatcagtattggtaaagtgaccatgattcctacatagaggctctgctggtcaaatacttgactcccactcttgccactcctagctccagaagggctcagggccttccccacagatctaaggactgggctaccctgcctgtccactgaggtttctcctaaaacaagaggcttgactctggtctgggccctgtggccctctgggaagctttgtacctcttttgcaggatctgggggtggggagggacaagctagttccccaacctcctatgactgctttctatgctcacagccttttttccataagaaccttcttgaaacttctccccgcacatactcacggaaaggaaccaatggtgctatttcccctctctcctcctcaacctgggaatacttcagacatctccaaactcatccttgtgtatagtctcacacccttccccataagtataaatgggcccatatttaacacattttgtgattttgggttatttattttgtgcatctgtggcaataaatgagatctcagtggtggta

SEQ ID NO: 279280 - DNA, 949 bp, Homo sapiens
tattgcaagaggggaagcagctttattgtaaggcttttatataccaactcttagcccgagggctctgggtgtgtgtttggtctgtgtgatggagggaggaagggacagatgtttttctgggatgcactggggaaggtagataaggatggggccgctgaaagagacagagaatgggactgaggaggcagcaaggaaggcaagggctctgaggacaagaaacagtcatggacgagcctgggaaaagagaattgagaacccttggggagtggaaagggagaggacagtggggatggagttaggaggatgagggaaaagtgatggggtgagaggaaggagggatcatgaaaggtgaaggaggagaatgagagggaaaggagcacagtgtgtaaagaggtgagatcactctgaaaggtgaggagggacactgctaactcagacagaactcacctgaggaggggagagatagggaaggatgccccagggaatgaagcccagagctcacatccatgtttgtttctgcccatcctaggatatgaggaagacatggagacggtgagttccacttttctgttccctccttttctcaccagctgccatagccatcacgttctcactgggcccacacctttgttcccattaataggcaggttttctggggtatagtctcatcccttcttcctccagagatgtgagtggggtatgcgtgggggcattaggatcagagggctgatttcctgacccttcccctcatctgtgtagatttgaagtcccaacatccaagtcatctaattcagaggatgatctccctgaagattatccagtggtcaaaaaaatgcttcatagactgacaggtaaggaaagaagaagggagggaagggaattgaatgaaagtctgtgttagattttcttccttttagccctaaaaagtgatcaggtcctttttgatgtc

SEQ ID NO: 279281 - DNA, 1549 bp, Homo sapiens
ttttgagctgttgtgtggtcactagctctcagtcttttacgtgatcttcgttgactattctccaccctaccccgcctgtgatttagaaaactctctcatgaggtcctctccctgcctccccgtctccagccgacctgaccctggaccctgggaccgcacaccgccgcctgctcatctccgccgaccgccgcagcgtacaactggccccaccagggacgcccgcgccccctgacggccccaagcgcttcaatcagctcccagctgtgctgggtgcgcagggcttcggggccggccgccactgctgggaggtggagactgcggacgccgcctcctgcagagactcttctggggaggatgcggacgacgaggagagccactatgcagtgggcgcggccggggaatcagtgcaacgcaagggctgcgtaaggctgtgccctgcgggggccgtgtgggccgtggagggccgcggcggccgcctgtgggccctcacggcacccgaacccaccctgctgggcggtgttgagcccccgccgcggcgcattcgcgtggacctggactgggagcggggccgcgtggccttctacgacggccgctcactcgacctgctttacgccttccaggcgcctggccccctgggggagcgcatcttcccgctgttctgcacctgcgaccctcgtgctccgctccgcattgtaccagcggaaagctgagtctcgtctccaactagaagtttggcccggccactggccctgcagctgctttttgggggtggaattccccactcatttctgggaacacattcacacgcccattgcaggagtattaatagcaacccacattttcgccccaaaataatgagacctcacctggtctccacgtttccacgtccctgctcaaaaccaaatccattcctgccttctggctctcagaatcttctctcccctacagctactacagtacttcctgacttctcccattcaaaccattctagctgcaatggggaacaggccctccccatcagtattggtaaagtgaccatgattcctacatagaggctctgctggtcaaatacttgactcccactcttgccactcctagctccagaagggctcagggccttccccacagatctaaggactgggctaccctgcctgtccactgaggtttctcctaaaacaagaggcttgactctggtctgggccctgtggccctctgggaagctttgtacctcttttgcaggatctgggggtggggagggacaagctagttccccaacctcctatgactgctttctatgctcacagccttttttccataagaaccttcttgaaacttctccccgcacatactcacggaaaggaaccaatggtgctatttcccctctctcctcctcaacctgggaatacttcagacatctccaaactcatccttgtgtatagtctcacacccttccccataagtataaatgggcccatatttaacacattttgtgattttgggttatttattttgtgcatctgtggcaataaatgagatctcagtggtggta

SEQ ID NO: 279282 - DNA, 2003 bp, Homo sapiens
ccccaaaccttacccgggaagcaggagaaccagatgaggcgttacgcaaggcctggtgtttacctcccgtgggagcctcctccctccctataaagcctgatgtggtggagagatttgacgagactgagactctggttgaagagagaggcaatcccaggagaggggcggaaagcggcaaaagttaatgcgggagtcggagagaagggcatctacacagcaagcagcaggggcggcccgccatctgcgcgctcgaaggcggtcacggtggtcgcggaaggggcggcgtccagatcctggctttccatggatgcgcccgagctgggcccggggctggtggagcgtctggagcagctggcgacgtgtcctctgtgcgggggctccttcgaggacccggtgcttctggcgtgcgagcacagcttctgccgcgcgtgtctggcccgccgctgggggactccgccggcgaccggcaccgaggcttcccccaccgcctgtccctgctgcggcctgccgtgtccccgccgcagcctgaggtctaatgtgcggctggcggtggaggtgcgaatcagccgcgagctgcgagagaagctggctgagcctggggcccgtgcggggagacgccgaggggggcgcatccccaccatgggctgcctggacctgcccggagaggatatgaggaagacatggagacgatttgaagtcccaacatccaagtcatctaattcagaggatgatctccctgaagattatccagtggtcaaaaaaatgcttcatagactgacagccgacctgaccctggaccctgggaccgcacaccgccgcctgctcatctccgccgaccgccgcagcgtacaactggccccaccagggacgcccgcgccccctgacggccccaagcgcttcaatcagctcccagctgtgctgggtgcgcagggcttcggggccggccgccactgctgggaggtggagactgcggacgccgcctcctgcagagactcttctggggaggatgcggacgacgaggagagccactatgcagtgggcgcggccggggaatcagtgcaacgcaagggctgcgcgcctggccccctgggggagcgcatcttcccgctgttctgcacctgcgaccctcgtgctccgctccgcattgtaccagcggaaagctgagtctcgtctccaactagaagtttggcccggccactggccctgcagctgctttttgggggtggaattccccactcatttctgggaacacattcacacgcccattgcaggagtattaatagcaacccacattttcgccccaaaataatgagacctcacctggtctccacgtttccacgtccctgctcaaaaccaaatccattcctgccttctggctctcagaatcttctctcccctacagctactacagtacttcctgacttctcccattcaaaccattctagctgcaatggggaacaggccctccccatcagtattggtaaagtgaccatgattcctacatagaggctctgctggtcaaatacttgactcccactcttgccactcctagctccagaagggctcagggccttccccacagatctaaggactgggctaccctgcctgtccactgaggtttctcctaaaacaagaggcttgactctggtctgggccctgtggccctctgggaagctttgtacctcttttgcaggatctgggggtggggagggacaagctagttccccaacctcctatgactgctttctatgctcacagccttttttccataagaaccttcttgaaacttctccccgcacatactcacggaaaggaaccaatggtgctatttcccctctctcctcctcaacctgggaatacttcagacatctccaaactcatccttgtgtatagtctcacacccttccccataagtataaatgggcccatatttaacacattttgtgattttgggttatttattttgtgcatctgtggcaataaatgagatctcagtggtggta

SEQ ID NO: 279283 - DNA, 2063 bp, Homo sapiens
tattgcaagaggggaagcagctttattgtaaggcttttatataccaactcttagcccgagggctctgggtgtgtgtttggtctgtgtgatggaggatgagggaaaagtgatggggtgagaggaaggagggatcatgaaaggtgaaggaggagaatgagagggaaaggagcacagtgtgtaaagaggtgagatcactctgaaaggtgaggagggacactgctaactcagacagaactcacctgaggaggggagagatagggaaggatgccccagggaatgaagcccagagctcacatccatgtttgtttctgcccatcctaggatatgaggaagacatggagacggtgagttccacttttctgttccctccttttctcaccagctgccatagccatcacgttctcactgggcccacacctttgttcccattaataggcaggttttctggggtatagtctcatcccttcttcctccagagatgtgagtggggtatgcgtgggggcattaggatcagagggctgatttcctgacccttcccctcatctgtgtagatttgaagtcccaacatccaagtcatctaattcagaggatgatctccctgaagattatccagtggtcaaaaaaatgcttcatagactgacagccgacctgaccctggaccctgggaccgcacaccgccgcctgctcatctccgccgaccgccgcagcgtacaactggccccaccagggacgcccgcgccccctgacggccccaagcgcttcaatcagctcccagctgtgctgggtgcgcagggcttcggggccggccgccactgctgggaggtggagactgcggacgccgcctcctgcagagactcttctggggaggatgcggacgacgaggagagccactatgcagtgggcgcggccggggaatcagtgcaacgcaagggctgcgtaaggctgtgccctgcgggggccgtgtgggccgtggagggccgcggcggccgcctgtgggccctcacggcacccgaacccaccctgctgggcggtgttgagcccccgccgcggcgcattcgcgtggacctggactgggagcggggccgcgtggccttctacgacggccgctcactcgacctgctttacgccttccaggcgcctggccccctgggggagcgcatcttcccgctgttctgcacctgcgaccctcgtgctccgctccgcattgtaccagcggaaagctgagtctcgtctccaactagaagtttggcccggccactggccctgcagctgctttttgggggtggaattccccactcatttctgggaacacattcacacgcccattgcaggagtattaatagcaacccacattttcgccccaaaataatgagacctcacctggtctccacgtttccacgtccctgctcaaaaccaaatccattcctgccttctggctctcagaatcttctctcccctacagctactacagtacttcctgacttctcccattcaaaccattctagctgcaatggggaacaggccctccccatcagtattggtaaagtgaccatgattcctacatagaggctctgctggtcaaatacttgactcccactcttgccactcctagctccagaagggctcagggccttccccacagatctaaggactgggctaccctgcctgtccactgaggtttctcctaaaacaagaggcttgactctggtctgggccctgtggccctctgggaagctttgtacctcttttgcaggatctgggggtggggagggacaagctagttccccaacctcctatgactgctttctatgctcacagccttttttccataagaaccttcttgaaacttctccccgcacatactcacggaaaggaaccaatggtgctatttcccctctctcctcctcaacctgggaatacttcagacatctccaaactcatccttgtgtatagtctcacacccttccccataagtataaatgggcccatatttaacacattttgtgattttgggttatttattttgtgcatctgtggcaataaatgagatctcagtggtggta

SEQ ID NO: 279284 - DNA, 1484 bp, Homo sapiens
gcgacttccggcagctggacttggaaaagcaaggagtgtcgggaatggcgaccaagcggctcgcgcggcagcttggattaattaggagaaagtcaattgcgccagcaaatggaaatctcggaagaagcaaatccaagcagttgtttgactacttaattgtcattgattttgaatcgacatgctggaatgatgggaagcaccaccatagccaggaaataattgagtttccagcagtgttgctgaacacatcaactggacagattgactctgagttccaggcttatgttcaacctcaggaacatccaattctttcagaattttgcatggaattgacaggcataaagcaggctcaagttgatgaaggagtccctctgaagatttgcttatctcagttctgtaaatggattcataagattcagcaacagaagaacattatttttgctactgggatttcagagccttctgcttctgaagtaaaattatgtgcatttgttacttggtcagactgggacttgggggtttgcctggagtatgagtgtaaaagaaaacagctgttaaaacctgtgtttttaaattcttggattgatctcagagcaacttacaagcttttctataggagaaaaccaaaaggactaagtggtgccttgcaggaagtaggaatagaattctcaggacgagaacattctgggttggacgattctcggaatactgcccttcttgcttggaaaatgatcagagatggttgtgtaatgaaaattacaaggtcgttgaacaagggtcccttcctcttgccttcgtggacctggaacagtgatctggcctcaggggaccagcatgcttttcttcagcaagaatttggctgtggaacctacagaaccttacttcagaagcccaatatgagtaaacaggaaaaggggaatattctctggttgacaatggtgtggctgtcactggcatgtctgcaaaggaaaaactacaatgactgcatgttaaacacagcatcacagactgttaccactgaaaaattttgagaagctctccacttgaacctcttcatgtcatgaatcaggtgccagtggcttagcttgaattacagggtaaaagccatcactttctctatccttttaggtgctttctagaatcaaaactaaactttgtcatcaaaggcccatttataatagctgctttcctagctttttattctatgataaagaaggattgaagcatttttaaaacttgagatttttatcatacctccagcagagtaaggagtctgtgtgatcttgcaatcatggataaggaagaattttccccttccctcccctatggatgctttaaaatgtgattttttaaaaatgagtatgttaatacaatacatgttagtaaaagccatgggtactgatgggccaacacactacagcctactggcaaaatctgacttgcctcttgtttctgtaaataaaatgttattgcccattcattga

SEQ ID NO: 279285 - DNA, 2257 bp, Homo sapiens
gcgacttccggcagctggacttggaaaagcaaggagtgtcgggaatggcgaccaagcggctcgcgcggtactcgagggagttccgggtcgggggcgggtagctccgggtccagcgctggcgttggccgcagagcagggcacggcaggtggcatctgcggtgagggcctctattccccgcagccccggcgtctgcgacctgccctctctggcacggttggaaaggcgcctccctggacctcggtcttcagccttgggccaccttctacccgagggtgacaggagcccgaggcggacgaaccctggggccttgactgtgtggccttgagccagtgcctgcctattttaggccttgggaaacgactggacgtgacagtgccctgcagactggttggaggtctcaggcaggccacacactgaatctgtcaaggtgttcaacctgttcgaaatgctcgttcctcggtgctgtaaagaaatagaacttaaacttaaatttaatttatttagtaaggccatttttacttcctgcagaaagggtacactcgccagcagttttgccaggagagtacactgaacaaaggagacagggtcatttataacgtggcgcgtccaccctactgctgtgtccggtttcctttggctggaacgggacctcacattctgtatttgtcccgactgactagcaacatagaactttttaaaagaggcaaaggcagaggagaacaaaggaagaaggaagtaacttgtggaatgctgagaaaggcagcttggattaattaggagaaagtcaattgcgccagcaaatggaaatctcggaagaagcaaatccaagcagttgtttgactacttaattgtcattgattttgaatcgacatgctggaatgatgggaagcaccaccatagccaggaaataattgagtttccagcagtgttgctgaacacatcaactggacagattgactctgagttccaggcttatgttcaacctcaggaacatccaattctttcagaattttgcatggaattgacaggcataaagcaggctcaagttgatgaaggagtccctctgaagatttgcttatctcagttctgtaaatggattcataagattcagcaacagaagaacattatttttgctactgggatttcagagccttctgcttctgaagtaaaattatgtgcatttgttacttggtcagactgggacttgggggtttgcctggagtatgagtgtaaaagaaaacagctgttaaaacctgtgtttttaaattcttggattgatctcagagcaacttacaagcttttctataggagaaaaccaaaaggactaagtggtgccttgcaggaagtaggaatagaattctcaggacgagaacattctgggttggacgattctcggaatactgcccttcttgcttggaaaatgatcagagatggttgtgtaatgaaaattacaaggtcgttgaacaagggtcccttcctcttgccttcgtggacctggaacagtgatctggcctcaggggaccagcatgcttttcttcagcaagaatttgggtatttcttcaatttcttgtcttttggattactattcaggacaaccaatctctcaagaaagggtcaagtacctatcctagctgtggaacctacagaaccttacttcagaagcccaatatgagtaaacaggaaaaggggaatattctctggttgacaatggtgtggctgtcactggcatgtctgcaaaggaaaaactacaatgactgcatgttaaacacagcatcacagactgttaccactgaaaaattttgagaagctctccacttgaacctcttcatgtcatgaatcaggtgccagtggcttagcttgaattacagggtaaaagccatcactttctctatccttttaggtgctttctagaatcaaaactaaactttgtcatcaaaggcccatttataatagctgctttcctagctttttattctatgataaagaaggattgaagcatttttaaaacttgagatttttatcatacctccagcagagtaaggagtctgtgtgatcttgcaatcatggataaggaagaattttccccttccctcccctatggatgctttaaaatgtgattttttaaaaatgagtatgttaatacaatacatgttagtaaaagccatgggtactgatgggccaacacactacagcctactggcaaaatctgacttgcctcttgtttctgtaaataaaatgttattgcccattcattga

SEQ ID NO: 279286 - DNA, 725 bp, Homo sapiens
aaatccctgaagtatgaggtttggagagcaccacgtgccggaaaggtagtgcacccccactccacagggatagaagctgctgcacttgggaccttgtggacctcaccctatgtacctcttcatctggctagctattcatctgtaacttttatcatatcttttataataagctgggaaatgtgtggctgtcactggcatgtctgcaaaggaaaaactacaatgactgcatgttaaacacagcatcacagactgttaccactgaaaaattttgagaagctctccacttgaacctcttcatgtcatgaatcaggtgccagtggcttagcttgaattacagggtaaaagccatcactttctctatccttttaggtgctttctagaatcaaaactaaactttgtcatcaaaggcccatttataatagctgctttcctagctttttattctatgataaagaaggattgaagcatttttaaaacttgagatttttatcatacctccagcagagtaaggagtctgtgtgatcttgcaatcatggataaggaagaattttccccttccctcccctatggatgctttaaaatgtgattttttaaaaatgagtatgttaatacaatacatgttagtaaaagccatgggtactgatgggccaacacactacagcctactggcaaaatctgacttgcctcttgtttctgtaaataaaatgttattgcccattcattga

SEQ ID NO: 279287 - DNA, 927 bp, Homo sapiens
gcgacttccggcagctggacttggaaaagcaaggagtgtcgggaatggcgaccaagcggctcgcgcggcagcttggattaattaggagaaagtcaattgcgccagcaaatggaaatctcggaagaagcaaatccaagcagttgtttgactacttaattgtcattgattttgaatcgacatgctggaatgatgggaagcaccaccatagccaggaaataattgagtttccagcagtgttgctgaacacatcaactggacagattgactctgagttccaggcttatgttcaacctcaggaacatccaattctttcagaattttgcatggaattgacaggcataaagcaggctcaagttgatgaaggagtccctctgaagatttgcttatctcagttctgtaaatggattcataagattcagcaacagaagaacattatttttgctactgggatttcagagccttctgcttctgaagtaaaattatgtgcatttgttacttggtcagactgggacttgggggtttgcctggagtatgagtgtaaaagaaaacagctgttaaaacctgtgtttttaaattcttggattgatctcagagcaacttacaagcttttctataggagaaaaccaaaaggactaagtggtgccttgcaggaagtaggaatagaattctcaggacgagaacattctgggttggacgattctcggaatactgcccttcttgcttggaaaatgatcagagatggttgtgtaatgaaaattacaaggtcgttgaacaaggttcccactaagaagaatttcagcattctggccagaaatttgaatacaattcaagttgaagaaatgtctgcctgtaacattagcatccagggtcccagcatatataataaggagcctaaaaatataataaatcctcatgaaaaagttcaaa

SEQ ID NO: 279288 - DNA, 1542 bp, Homo sapiens
gcgacttccggcagctggacttggaaaagcaaggagtgtcgggaatggcgaccaagcggctcgcgcggtactcgagggagttccgggtcgggggcgggtagctccgggtccagcgctggcgttggccgcagagcagggcacggcaggtggcatctgcggtgagggcctctattccccgcagccccggcgtctgcgacctgccctctctggcacggttggaaaggcgcctccctggacctcggtcttcagccttgggccaccttctacccgagggtgacaggagcccgaggcggacgaaccctggggccttgactgtgtggccttgagccagtgcctgcctattttaggccttgggaaacgactggacgtgacagtgccctgcagactggttggaggtctcaggcaggccacacactgaatctgtcaaggtgttcaacctgttcgaaatgctcgttcctcggtgctgtaaagaaatagaacttaaacttaaatttaatttatttagtaaggccatttttacttcctgcagaaagggtacactcgccagcagttttgccaggagagtacactgaacaaaggagacagggtcatttataacgtggcgcgtccaccctactgctgtgtccggtttcctttggctggaacgggacctcacattctgtatttgtcccgactgactagcaacatagaactttttaaaagaggcaaaggcagaggagaacaaaggaagaaggaagtaacttgtggaatgctgagaaaggcagcttggattaattaggagaaagtcaattgcgccagcaaatggaaatctcggaagaagcaaatccaagcagttgtttgactacttaattgtcattgattttgaatcgacatgctggaatgatgggaagcaccaccatagccaggaaataattgagtttccagcagtgttgctgaacacatcaactggacagattgactctgagttccaggcttatgttcaacctcaggaacatccaattctttcagaattttgcatggaattgacaggcataaagcaggctcaagttgatgaaggagtccctctgaagatttgcttatctcagttctgtaaatggattcataagattcagcaacagaagaacattatttttgctactgggatttcagagccttctgcttctgaagtaaaattatgtgcatttgttacttggtcaggtaaagaataagttatacctattaatcacagatgggtagcattaccactatgtaattctttatttctagttttatacttgctaacctagaattatgtttgttaatcttctgggctaggaaaaaaaatttaaatgcctagcagatgttagccaagaaaagtaaattaatacatattttttaaattaaccttttgggataccttaaaatattaagcctgaacttaaaaaaatgtttctagagttccactgttaagaattaagcaaagatgatttagtgaacactcttatgctattttctacagtcttcatcagctcaacatcctttgcttttatgctttgacactta

SEQ ID NO: 279289 - DNA, 396 bp, Homo sapiens
gttagtagtgtcttgcctttttattctgtcatctcaaacttcataaacagtcatacgttctttgaaacgtagatttaatgtgtgcagtcatttataaatcaatgacatttctcttttttgtcataaaactgtatactgaagaaattaacgaatgcacagtttctaaagctgttgcatttgtctgtggaatcataggttcccactaagaagaatttcagcattctggccagaaatttgaatacaattcaagttgaagaaatgtctgcctgtaacattagcatccagggtcccagcatatataataaggagcctaaaaatataataaatcctcatgaaaaagttcaaatgaagtcaatttgtgcaaattctcctataaaggcacaacaggatcaatta

SEQ ID NO: 279290 - DNA, 1564 bp, Homo sapiens
gcgacttccggcagctggacttggaaaagcaaggagtgtcgggaatggcgaccaagcggctcgcgcggcagcttggattaattaggagaaagtcaattgcgccagcaaatggaaatctcggaagaagcaaatccaagcagttgtttgactacttaattgtcattgattttgaatcgacatgctggaatgatgggaagcaccaccatagccaggaaataattgagtttccagcagtgttgctgaacacatcaactggacagattgactctgagttccaggcttatgttcaacctcaggaacatccaattctttcagaattttgcatggaattgacaggcataaagcaggctcaagttgatgaaggagtccctctgaagatttgcttatctcagttctgtaaatggattcataagattcagcaacagaagaacattatttttgctactgggatttcagagccttctgcttctgaagtaaaattatgtgcatttgttacttggtcagactgggacttgggggtttgcctggagtatgagtgtaaaagaaaacagctgttaaaacctgtgtttttaaattcttggattgatctcagagcaacttacaagcttttctataggagaaaaccaaaaggactaagtggtgccttgcaggaagtaggaatagaattctcaggacgagaacattctgggttggacgattctcggaatactgcccttcttgcttggaaaatgatcagagatggttgtgtaatgaaaattacaaggtcgttgaacaagggtcccttcctcttgccttcgtggacctggaacagtgatctggcctcaggggaccagcatgcttttcttcagcaagaatttgggtatttcttcaatttcttgtcttttggattactattcaggacaaccaatctctcaagaaagggtcaagtacctatcctagctgtggaacctacagaaccttacttcagaagcccaatatgagtaaacaggaaaaggggaatattctctggttgacaatggtgtggctgtcactggcatgtctgcaaaggaaaaactacaatgactgcatgttaaacacagcatcacagactgttaccactgaaaaattttgagaagctctccacttgaacctcttcatgtcatgaatcaggtgccagtggcttagcttgaattacagggtaaaagccatcactttctctatccttttaggtgctttctagaatcaaaactaaactttgtcatcaaaggcccatttataatagctgctttcctagctttttattctatgataaagaaggattgaagcatttttaaaacttgagatttttatcatacctccagcagagtaaggagtctgtgtgatcttgcaatcatggataaggaagaattttccccttccctcccctatggatgctttaaaatgtgattttttaaaaatgagtatgttaatacaatacatgttagtaaaagccatgggtactgatgggccaacacactacagcctactggcaaaatctgacttgcctcttgtttctgtaaataaaatgttattgcccattcattga

SEQ ID NO: 279291 - DNA, 1795 bp, Homo sapiens
gcgacttccggcagctggacttggaaaagcaaggagtgtcgggaatggcgaccaagcggctcgcgcgaaagggtacactcgccagcagttttgccaggagagtacactgaacaaaggagacagggtcatttataacgtggcgcgtccaccctactgctgtgtccggtttcctttggctggaacgggacctcacattctgtatttgtcccgactgactagcaacatagaactttttaaaagaggcaaaggcagaggagaacaaaggaagaaggaagtaacttgtggaatgctgagaaaggcagcttggattaattaggagaaagtcaattgcgccagcaaatggaaatctcggaagaagcaaatccaagcagttgtttgactacttaattgtcattgattttgaatcgacatgctggaatgatgggaagcaccaccatagccaggaaataattgagtttccagcagtgttgctgaacacatcaactggacagattgactctgagttccaggcttatgttcaacctcaggaacatccaattctttcagaattttgcatggaattgacaggcataaagcaggctcaagttgatgaaggagtccctctgaagatttgcttatctcagttctgtaaatggattcataagattcagcaacagaagaacattatttttgctactgggatttcagagccttctgcttctgaagtaaaattatgtgcatttgttacttggtcagactgggacttgggggtttgcctggagtatgagtgtaaaagaaaacagctgttaaaacctgtgtttttaaattcttggattgatctcagagcaacttacaagcttttctataggagaaaaccaaaaggactaagtggtgccttgcaggaagtaggaatagaattctcaggacgagaacattctgggttggacgattctcggaatactgcccttcttgcttggaaaatgatcagagatggttgtgtaatgaaaattacaaggtcgttgaacaagggtcccttcctcttgccttcgtggacctggaacagtgatctggcctcaggggaccagcatgcttttcttcagcaagaatttgggtatttcttcaatttcttgtcttttggattactattcaggacaaccaatctctcaagaaagggtcaagtacctatcctagctgtggaacctacagaaccttacttcagaagcccaatatgagtaaacaggaaaaggggaatattctctggttgacaatggtgtggctgtcactggcatgtctgcaaaggaaaaactacaatgactgcatgttaaacacagcatcacagactgttaccactgaaaaattttgagaagctctccacttgaacctcttcatgtcatgaatcaggtgccagtggcttagcttgaattacagggtaaaagccatcactttctctatccttttaggtgctttctagaatcaaaactaaactttgtcatcaaaggcccatttataatagctgctttcctagctttttattctatgataaagaaggattgaagcatttttaaaacttgagatttttatcatacctccagcagagtaaggagtctgtgtgatcttgcaatcatggataaggaagaattttccccttccctcccctatggatgctttaaaatgtgattttttaaaaatgagtatgttaatacaatacatgttagtaaaagccatgggtactgatgggccaacacactacagcctactggcaaaatctgacttgcctcttgtttctgtaaataaaatgttattgcccattcattga

SEQ ID NO: 279292 - DNA, 873 bp, Homo sapiens
gcgacttccggcagctggacttggaaaagcaaggagtgtcgggaatggcgaccaagcggctcgcgcggcagcttggattaattaggagaaagtcaattgcgccagcaaatggaaatctcggaagaagcaaatccaagcagttgtttgactacttaattgtcattgattttgaatcgacatgctggaatgatgggaagcaccaccatagccaggaaataattgagtttccagcagtgttgctgaacacatcaactggacagattgactctgagttccaggcttatgttcaacctcaggaacatccaattctttcagaattttgcatggaattgacaggcataaagcaggctcaagttgatgaaggagtccctctgaagatttgcttatctcagttctgtaaatggattcataagattcagcaacagaagaacattatttttgctactgggatttcagagccttctgcttctgaagtaaaattatgtgcatttgttacttggtcagactgggacttgggggtttgcctggagtatgagtgtaaaagaaaacagctgttaaaacctgtgtttttaaattcttggattgatctcagagcaacttacaagcttttctataggagaaaaccaaaaggactaagtggtgccttgcaggaagtaggaatagaattctcaggacgagaacattctgggttggacgattctcggaatactgcccttcttgcttggaaaatgatcagagatggttgtgtaatggccagaaatttgaatacaattcaagttgaagaaatgtctgcctgtaacattagcatccagggtcccagcatatataataaggagcctaaaaatataataaatcctcatgaaaaagttcaaa

SEQ ID NO: 279293 - DNA, 2900 bp, Homo sapiens
tgtgtcaggtgtccccagactactgaaatactgattttattttgcgcctcacatgttgcgtatgccatcaggttacctgcaaggctgagttttaactctgaactggttcactctttcagaaacatctttagcctagtacccttctgctcagtcttttgttttcacagcagtacagtttttaccttgcataactgacattgtctgaaaaagaagacatatactataattgcatagttttgttttgtgaaaccagcagacattttttggtattagaaatcataggatctcccctctaatctcaatttactgttttgttttttttttttaaactttgtcgtcatgagaaaaatcatttttttatgaatgcctatattgcttctcactatttactgagaaacactaggcaaaaggaatgatacagttttaaaatgtttgaaatctctgtgagtagctcagaaatttttctggaaaaggtagatgtacacatttgcatttactccctcaggtcctctgccctgacacagtatatttcacctgttctccttctagctcttgctccccttatggacagcactattattgtgtgtcttgatagatgtccccctacccccagaactggcagacagtgttggaatgcgggcgttgatagtgggccaggcttcgcagaatgtctaaaaagggaatgtgtacatgaagttttttgggggaagaggagctagagcaagttaatctgcttgtttctctagaatcatttaaaggtaacctctgaattgggaagggaggttgtagttggcagggagttttccatttaataggcttaatttcctaagcctgactgaagaaatactgtctttcctttttctgcagctgaaagtagtgatggcatccacataattttgaagtgatgtcttatatagactgaactgtattcagtaccaaatagtcacgcttaaaagtgtgtgaagactgaatccaagaagtcttgggattggattttaccatatgaaatgtttcatattgaaaacacaagatgacctttctaatgagctgtatgagaggtgaatctcctcactgtcactgccatagccaagcatcctcatgagagtgagcacatcggcacagcatgcatccagctctggaggccacggtgcaggcatagctgcctgctgctctggcagaggccagtaaatacagttcctagaagcagcctttgctgtctttttacactgtatgcggtttggaaatgaatgtagaaacttactgtgggcatttacctttctgtgccagtttggcttttattgcctgaaccttatgctgacctggagaggagatgggggacagtgctgttgtggggccagcagtgaatctgtatgcggagagttgtgttgtgctgatgtggccgttggtggtcaggtaagaggctcggcaccttcttggaagaaatcatgtctgagggtgtacgtttgatatgatcatgccagattggagaagatccaagccaggaagatgggcttgaagcaaactgcattatcaggagtaccttggtgagaggatcagtgtaaatcctaataggtacaaagacttttgtgttttggctttgtcacagatttattgaaaaacttttttgcttctgcttccatttttagcattttagtttctggttttcatttttggagattccttgccttttaaactcgtggtttttctctcattttcttccctctctccctccatctctgaccacccccaccctaaccccccacccccaccatcctattaaacatttttaaagccctaccccagacattggaaataggtgacccaagtagggggagaaagtattattgttgatagcttctgactaggtgttaagggatcttcattatgaacaagatgaatttttttctggaaacactagatgttatcaatcaaacactaaaatgtaccatacaaatcccttaagcctctcaaatattgagctttagtacaatcatggatagacattctggtgatgatttaggggctttttatacaccacatactagcttctttctctataagagtgcctctttcataaaaccaaatgcttgtctgctagcatacttttcaaagggaatccactgttttctcactttcctcccatatctccgtccttcatccaaaaccttcccagaatccatcagcaagcatgtttgaggcctgtggtgtaggggactgaattttttttttaacttctattccattttaattgtaggatatctttgtccatatacccaggtgtcctgatttgaatgtactatttgatcctcattgtgttcaggcaaaaaataggaaatgagtaattttgagtttgaaatctctcccagaagacaaactacttcagtgagtaaaagctttgacattttatgttttattcataaagggggttaattatttgctacaaagaagcacgatctattttcatcatcgatttgaaaatatctgtaactcctatagatcctataggcagagagttttcctttctgactttttccctttgctttcgtgtgaccacatgttttctgtaccagtcactggggaaagaagtgagtttatctcgtttgttttaaaagttttgcttgtctatttagcattcctttttgggtctcaagatttatggaacaataaatgtcatttaatgctgtgtgcttattttgaattcctcatcaggttttagaagcggggtaaaaatacttagatgcttatcagacttgaaattatactgagtggcattgaacgtgagtttgtcccagtgaaacaggctaaataaattttggcaccagcaaatttgttactttgtttttttaatagtaggatgtacacatttcagtataataaatgttttctgattgttttgcaaa

SEQ ID NO: 279294 - DNA, 3780 bp, Homo sapiens
agtggggcccccgcagctctcgtcccggccgccgctggtgaccactcgccgcccctccggaggcttcacccgcgccctcccccaggacgcgccagcggagctccggctccttcgccctggacgcggaggccgcggtgtgcggggcgacggcgaggccggaagatggcctgggtgctcaagatggacgaggtgatcgagtccgggctggtgcacgacttcgacgccagcctctcgggcatcgggcaggaactgggcgccggcgcttacagcatgagtgatgtcttggcattgcccattttcaagcaggaagattccagccttccattggatggtgaaacagagcacccaccctttcagtatgtgatgtgtgctgcaacgtcaccagcagtaaaactgcatgatgaaacgcttacttatttgaaccaaggtcagtcatatgaaattcggatgctggataatcggaaaatgggtgatatgcctgagatcaatggaaaattagtaaagagcatcataagggttgtattccatgacagacggctacaatacacagagcatcagcaacttgaaggatggaagtggaatcgcccaggagacagacttcttgatttagatattccaatgtctgtgggaataattgacacaaggacgaatccaagccagttaaatgcggttgaatttctgtgggacccagcaaaacgcacctctgctttcattcaggtacactgcatcagcacagaatttactccacggaagcacggaggtgaaaagggagtgccctttaggatccaggttgacacctttaagcagaatgaaaatggagaatacacagatcatctacactcagctagctgccaaatcaaagtttttaagcctaaaggtgcagacaggaaacaaaaaactgaccgagagaagatggagaagagaacagctcatgaaaaagaaaagtatcagccgtcctatgataccacaatcctcacagagatgaggcttgagcctataattgaagatgcagttgaacatgagcagaaaaagtccagcaagcggactttgccagcagactacggtgattctctggcaaagcgaggcagttgttctccgtggcccgatgcccccacagcctatgtgaataacagcccttccccagcgcccactttcacctccccacagcagagcacttgcagtgtcccagacagcaattcttcttccccaaatcatcagggagatggagcttcacagacctctggtgaacaaattcagccttcagctacgatccaggaaacacagcaatggctgctcaaaaacagattctcttcctacacaagactgttctctaatttttcaggtgccgacttattaaaactgacaaaggaggatttagttcaaatttgtggtgcagccgatggaattcggctctataattcactgaagtcaaggtcggttagaccccgtttaaccatctatgtctgccgggagcagccaagcagcacagtgctgcaagggcagcagcaagctgcaagcagtgcaagcgagaatggcagtggggcaccctatgtttatcatgcaatctacttggaagaaatgattgcctcagaagttgctcgaaaacttgcgctggtgtttaatatccctctccaccaaattaatcaggtttacagacagggtcccaccggtattcacattcttgttagtgatcagatggttcagaattttcaagatgagagttgttttttattctccacagtaaaagctgaaagtagtgatggcatccacataattttgaagtgatgtcttatatagactgaactgtattcagtaccaaatagtcacgcttaaaagtgtgtgaagactgaatccaagaagtcttgggattggattttaccatatgaaatgtttcatattgaaaacacaagatgacctttctaatgagctgtatgagaggtgaatctcctcactgtcactgccatagccaagcatcctcatgagagtgagcacatcggcacagcatgcatccagctctggaggccacggtgcaggcatagctgcctgctgctctggcagaggccagtaaatacagttcctagaagcagcctttgctgtctttttacactgtatgcggtttggaaatgaatgtagaaacttactgtgggcatttacctttctgtgccagtttggcttttattgcctgaaccttatgctgacctggagaggagatgggggacagtgctgttgtggggccagcagtgaatctgtatgcggagagttgtgttgtgctgatgtggccgttggtggtcaggtaagaggctcggcaccttcttggaagaaatcatgtctgagggtgtacgtttgatatgatcatgccagattggagaagatccaagccaggaagatgggcttgaagcaaactgcattatcaggagtaccttggtgagaggatcagtgtaaatcctaataggtacaaagacttttgtgttttggctttgtcacagatttattgaaaaacttttttgcttctgcttccatttttagcattttagtttctggttttcatttttggagattccttgccttttaaactcgtggtttttctctcattttcttccctctctccctccatctctgaccacccccaccctaaccccccacccccaccatcctattaaacatttttaaagccctaccccagacattggaaataggtgacccaagtagggggagaaagtattattgttgatagcttctgactaggtgttaagggatcttcattatgaacaagatgaatttttttctggaaacactagatgttatcaatcaaacactaaaatgtaccatacaaatcccttaagcctctcaaatattgagctttagtacaatcatggatagacattctggtgatgatttaggggctttttatacaccacatactagcttctttctctataagagtgcctctttcataaaaccaaatgcttgtctgctagcatacttttcaaagggaatccactgttttctcactttcctcccatatctccgtccttcatccaaaaccttcccagaatccatcagcaagcatgtttgaggcctgtggtgtaggggactgaattttttttttaacttctattccattttaattgtaggatatctttgtccatatacccaggtgtcctgatttgaatgtactatttgatcctcattgtgttcaggcaaaaaataggaaatgagtaattttgagtttgaaatctctcccagaagacaaactacttcagtgagtaaaagctttgacattttatgttttattcataaagggggttaattatttgctacaaagaagcacgatctattttcatcatcgatttgaaaatatctgtaactcctatagatcctataggcagagagttttcctttctgactttttccctttgctttcgtgtgaccacatgttttctgtaccagtcactggggaaagaagtgagtttatctcgtttgttttaaaagttttgcttgtctatttagcattcctttttgggtctcaagatttatggaacaataaatgtcatttaatgctgtgtgcttattttgaattcctcatcaggttttagaagcggggtaaaaatacttagatgcttatcagacttgaaattatactgagtggcattgaacgtgagtttgtcccagtgaaacaggctaaataaattttggcaccagcaaatttgttactttgtttttttaatagtaggatgtacacatttcagtataataaatgttttctgattgttttgcaaa

SEQ ID NO: 279295 - DNA, 3316 bp, Homo sapiens
tcggtaccaccactcctatagatcagtggaaaattagtaaagcatcataagggttgtattccatgacagacggctacaatacacagagcatcagcaacttgaaggatggaagtggaatcgcccaggagacagacttcttgatttagatattccaatgtctgtgggaataattgacacaaggacgaatccaagccagttaaatgcggttgaatttctgtgggacccagcaaaacgcacctctgctttcattcaggtacactgcatcagcacagaatttactccacggaagcacggaggtgaaaagggagtgccctttaggatccaggttgacacctttaagcagaatgaaaatggagaatacacagatcatctacactcagctagctgccaaatcaaagtttttaagcctaaaggtgcagacaggaaacaaaaaactgaccgagagaagatggagaagagaacagctcatgaaaaagaaaagtatcagccgtcctatgataccacaatcctcacagagatgaggcttgagcctataattgaagatgcagttgaacatgagcagaaaaagtccagcaagcggactttgccagcagactacggtgattctctggcaaagcgaggcagttgttctccgtggcccgatgcccccacagcctatgtgaataacagcccttccccagcgcccactttcacctccccacagcagagcacttgcagtgtcccagacagcaattcttcttccccaaatcatcagggagatggagcttcacagacctctggtgaacaaattcagccttcagctacgatccaggaaacacagcaatggctgctcaaaaacagattctcttcctacacaagactgttctctaatttttcaggtgccgacttattaaaactgacaaaggaggatttagttcaaatttgtggtgcagccgatggaattcggctctataattcactgaagtcaaggtcggttagaccccgtttaaccatctatgtctgccgggagcagccaagcagcacagtgctgcaagggcagcagcaagctgcaagcagtgcaagcgagaatggcagtggggcaccctatgtttatcatgcaatctacttggaagaaatgattgcctcagaagttgctcgaaaacttgcgctggtgtttaatatccctctccaccaaattaatcaggtttacagacagggtcccaccggtattcacattcttgttagtgatcagatggttcagaattttcaagatgagagttgttttttattctccacagtaaaagctgaaagtagtgatggcatccacataattttgaagtgatgtcttatatagactgaactgtattcagtaccaaatagtcacgcttaaaagtgtgtgaagactgaatccaagaagtcttgggattggattttaccatatgaaatgtttcatattgaaaacacaagatgacctttctaatgagctgtatgagaggtgaatctcctcactgtcactgccatagccaagcatcctcatgagagtgagcacatcggcacagcatgcatccagctctggaggccacggtgcaggcatagctgcctgctgctctggcagaggccagtaaatacagttcctagaagcagcctttgctgtctttttacactgtatgcggtttggaaatgaatgtagaaacttactgtgggcatttacctttctgtgccagtttggcttttattgcctgaaccttatgctgacctggagaggagatgggggacagtgctgttgtggggccagcagtgaatctgtatgcggagagttgtgttgtgctgatgtggccgttggtggtcaggtaagaggctcggcaccttcttggaagaaatcatgtctgagggtgtacgtttgatatgatcatgccagattggagaagatccaagccaggaagatgggcttgaagcaaactgcattatcaggagtaccttggtgagaggatcagtgtaaatcctaataggtacaaagacttttgtgttttggctttgtcacagatttattgaaaaacttttttgcttctgcttccatttttagcattttagtttctggttttcatttttggagattccttgccttttaaactcgtggtttttctctcattttcttccctctctccctccatctctgaccacccccaccctaaccccccacccccaccatcctattaaacatttttaaagccctaccccagacattggaaataggtgacccaagtagggggagaaagtattattgttgatagcttctgactaggtgttaagggatcttcattatgaacaagatgaatttttttctggaaacactagatgttatcaatcaaacactaaaatgtaccatacaaatcccttaagcctctcaaatattgagctttagtacaatcatggatagacattctggtgatgatttaggggctttttatacaccacatactagcttctttctctataagagtgcctctttcataaaaccaaatgcttgtctgctagcatacttttcaaagggaatccactgttttctcactttcctcccatatctccgtccttcatccaaaaccttcccagaatccatcagcaagcatgtttgaggcctgtggtgtaggggactgaattttttttttaacttctattccattttaattgtaggatatctttgtccatatacccaggtgtcctgatttgaatgtactatttgatcctcattgtgttcaggcaaaaaataggaaatgagtaattttgagtttgaaatctctcccagaagacaaactacttcagtgagtaaaagctttgacattttatgttttattcataaagggggttaattatttgctacaaagaagcacgatctattttcatcatcgatttgaaaatatctgtaactcctatagatcctataggcagagagttttcctttctgactttttccctttgctttcgtgtgaccacatgttttctgtaccagtcactggggaaagaagtgagtttatctcgtttgttttaaaagttttgcttgtctatttagcattcctttttgggtctcaagatttatggaacaataaatgtcatttaatgctgtgtgcttattttgaattcctcatcaggttttagaagcggggtaaaaatacttagatgcttatcagacttgaaattatactgagtggcattgaacgtgagtttgtcccagtgaaacaggctaaataaattttggcaccagcaaatttgttactttgtttttttaatagtaggatgtacacatttcagtataataaatgttttctgattgttttgcaaa

SEQ ID NO: 279296 - DNA, 3806 bp, Homo sapiens
agtggggcccccgcagctctcgtcccggccgccgctggtgaccactcgccgcccctccggaggcttcacccgcgccctcccccaggacgcgccagcggagctccggctccttcgccctggacgcggaggccgcggtgtgcggggcgacggcgaggccggaagatggcctgggtgctcaagatggacgaggtgatcgagtccgggctggtgcacgacttcgacgccagcctctcgggcatcgggcaggaactgggcgccggcgcttacagcatgagtgatgtcttggcattgcccattttcaagcaggaagattccagccttccattggatggtgaaacagagcacccaccctttcagtatgtgatgtgtgctgcaacgtcaccagcagtaaaactgcatgatgaaacgcttacttatttgaaccaaggtcagtcatatgaaattcggatgctggataatcggaaaatgggtgatatgcctgagatcaatggaaaattagtaaagagcatcataagggttgtattccatgacagacggctacaatacacagagcatcagcaacttgaaggatggaagtggaatcgcccaggagacagacttcttgatttagatattccaatgtctgtgggaataattgacacaaggacgaatccaagccagttaaatgcggttgaatttctgtgggacccagcaaaacgcacctctgctttcattcaggtacactgcatcagcacagaatttactccacggaagcacggaggtgaaaagggagtgccctttaggatccaggttgacacctttaagcagaatgaaaatggagaatacacagatcatctacactcagctagctgccaaatcaaagtttttaagcctaaaggtgcagacaggaaacaaaaaactgaccgagagaagatggagaagagaacagctcatgaaaaagaaaagtatcagccgtcctatgataccacaatcctcacagagtgttctccgtggcccgatgcccccacagcctatgtgaataacagcccttccccagcgcccactttcacctccccacagcagagcacttgcagtgtcccagacagcaattcttcttccccaaatcatcagggagatggagcttcacagacctctggtgaacaaattcagccttcagctacgatccaggaaacacagcaatggctgctcaaaaacagattctcttcctacacaagactgttctctaatttttcaggtgccgacttattaaaactgacaaaggaggatttagttcaaatttgtggtgcagccgatggaattcggctctataattcactgaagtcaagggcaggcccagatatgatgcaggcactgatgagggcagaggtagactgtaagactggtagaaatgcacatgggcagtactgatttcttgaagacgactgggtttgttgccaagaaaacaaaacttctaatttaggtcggttagaccccgtttaaccatctatgtctgccgggagcagccaagcagcacagtgctgcaagggcagcagcaagctgcaagcagtgcaagcgagaatggcagtggggcaccctatgtttatcatgcaatctacttggaagaaatgattgcctcagaagttgctcgaaaacttgcgctggtgtttaatatccctctccaccaaattaatcaggtttacagacagggtcccaccggtattcacattcttgttagtgatcagatggttcagaattttcaagatgagagttgttttttattctccacagtaaaagctgaaagtagtgatggcatccacataattttgaagtgatgtcttatatagactgaactgtattcagtaccaaatagtcacgcttaaaagtgtgtgaagactgaatccaagaagtcttgggattggattttaccatatgaaatgtttcatattgaaaacacaagatgacctttctaatgagctgtatgagaggtgaatctcctcactgtcactgccatagccaagcatcctcatgagagtgagcacatcggcacagcatgcatccagctctggaggccacggtgcaggcatagctgcctgctgctctggcagaggccagtaaatacagttcctagaagcagcctttgctgtctttttacactgtatgcggtttggaaatgaatgtagaaacttactgtgggcatttacctttctgtgccagtttggcttttattgcctgaaccttatgctgacctggagaggagatgggggacagtgctgttgtggggccagcagtgaatctgtatgcggagagttgtgttgtgctgatgtggccgttggtggtcaggtaagaggctcggcaccttcttggaagaaatcatgtctgagggtgtacgtttgatatgatcatgccagattggagaagatccaagccaggaagatgggcttgaagcaaactgcattatcaggagtaccttggtgagaggatcagtgtaaatcctaataggtacaaagacttttgtgttttggctttgtcacagatttattgaaaaacttttttgcttctgcttccatttttagcattttagtttctggttttcatttttggagattccttgccttttaaactcgtggtttttctctcattttcttccctctctccctccatctctgaccacccccaccctaaccccccacccccaccatcctattaaacatttttaaagccctaccccagacattggaaataggtgacccaagtagggggagaaagtattattgttgatagcttctgactaggtgttaagggatcttcattatgaacaagatgaatttttttctggaaacactagatgttatcaatcaaacactaaaatgtaccatacaaatcccttaagcctctcaaatattgagctttagtacaatcatggatagacattctggtgatgatttaggggctttttatacaccacatactagcttctttctctataagagtgcctctttcataaaaccaaatgcttgtctgctagcatacttttcaaagggaatccactgttttctcactttcctcccatatctccgtccttcatccaaaaccttcccagaatccatcagcaagcatgtttgaggcctgtggtgtaggggactgaattttttttttaacttctattccattttaattgtaggatatctttgtccatatacccaggtgtcctgatttgaatgtactatttgatcctcattgtgttcaggcaaaaaataggaaatgagtaattttgagtttgaaatctctcccagaagacaaactacttcagtgagtaaaagctttgacattttatgttttattcataaagggggttaattatttgctacaaagaagcacgatctattttcatcatcgatttgaaaatatctgtaactcctatagatcctataggcagagagttttcctttctgactttttccctttgctttcgtgtgaccacatgttttctgtaccagtcactggggaaagaagtgagtttatctcgtttgttttaaaagttttgcttgtctatttagcattcctttttgggtctcaagatttatggaacaataaatgtcatttaatgctgtgtgcttattttgaattcctcatcaggttttagaagcggggtaaaaatacttagatgcttatcagacttgaaattatactgagtggcattgaacgtgagtttgtcccagtgaaacaggctaaataaattttggcaccagcaaatttgttactttgtttttttaatagtaggatgtacacatttcagtataataaatgttttctgattgttttgcaaa

SEQ ID NO: 279297 - DNA, 1158 bp, Homo sapiens
ggaatccactgttttctcactttcctcccatatctccgtccttcatccaaaaccttcccagacattggaaataggtgacccaagtagggggagaaagtattattgttgatagcttctgactaggtgttaagggatcttcattatgaacaagatgaatttttttctggaaacactagatgttatcaatcaaacactaaaatgtaccatacaaatcccttaagcctctcaaatattgagctttagtacaatcatggatagacattctggtgatgatttaggggctttttatacaccacatactagcttctttctctataagagtgcctctttcataaaaccaaatgcttgtctgctagcatacttttcaaagggaatccactgttttctcactttcctcccatatctccgtccttcatccaaaaccttcccagaatccatcagcaagcatgtttgaggcctgtggtgtaggggactgaattttttttttaacttctattccattttaattgtaggatatctttgtccatatacccaggtgtcctgatttgaatgtactatttgatcctcattgtgttcaggcaaaaaataggaaatgagtaattttgagtttgaaatctctcccagaagacaaactacttcagtgagtaaaagctttgacattttatgttttattcataaagggggttaattatttgctacaaagaagcacgatctattttcatcatcgatttgaaaatatctgtaactcctatagatcctataggcagagagttttcctttctgactttttccctttgctttcgtgtgaccacatgttttctgtaccagtcactggggaaagaagtgagtttatctcgtttgttttaaaagttttgcttgtctatttagcattcctttttgggtctcaagatttatggaacaataaatgtcatttaatgctgtgtgcttattttgaattcctcatcaggttttagaagcggggtaaaaatacttagatgcttatcagacttgaaattatactgagtggcattgaacgtgagtttgtcccagtgaaacaggctaaataaattttggcaccagcaaatttgttactttgtttttttaatagtaggatgtacacatttcagtataataaatgttttctgattgttttgcaaa

SEQ ID NO: 279298 - DNA, 3706 bp, Homo sapiens
agtggggcccccgcagctctcgtcccggccgccgctggtgaccactcgccgcccctccggaggcttcacccgcgccctcccccaggacgcgccagcggagctccggctccttcgccctggacgcggaggccgcggtgtgcggggcgacggcgaggccggaagatggcctgggtgctcaagatggacgaggtgatcgagtccgggctggtgcacgacttcgacgccagcctctcgggcatcgggcaggaactgggcgccggcgcttacagcatgagtgatgtcttggcattgcccattttcaagcaggaagattccagccttccattggatggtgaaacagagcacccaccctttcagtatgtgatgtgtgctgcaacgtcaccagcagtaaaactgcatgatgaaacgcttacttatttgaaccaaggtcagtcatatgaaattcggatgctggataatcggaaaatgggtgatatgcctgagatcaatggaaaattagtaaagagcatcataagggttgtattccatgacagacggctacaatacacagagcatcagcaacttgaaggatggaagtggaatcgcccaggagacagacttcttgatttagatattccaatgtctgtgggaataattgacacaaggacgaatccaagccagttaaatgcggttgaatttctgtgggacccagcaaaacgcacctctgctttcattcaggtacactgcatcagcacagaatttactccacggaagcacggaggtgaaaagggagtgccctttaggatccaggttgacacctttaagcagaatgaaaatggagaatacacagatcatctacactcagctagctgccaaatcaaagtttttaagcctaaaggtgcagacaggaaacaaaaaactgaccgagagaagatggagaagagaacagctcatgaaaaagaaaagtatcagccgtcctatgataccacaatcctcacagagatgaggcttgagcctataattgaagatgcagttgaacatgagcagaaaaagtccagcaagcggactttgccagcagactacggtgattctctggcaaagcgaggcagttgttctccgtggcccgatgcccccacagcctatgtgaataacagcccttccccagcgcccactttcacctccccacagcagagcacttgcagtgtcccagacagcaattcttcttccccaaatcatcagggagatggagcttcacagacctctggtgaacaaattcagccttcagctacgatccaggaaacacagcaatggctgctcaaaaacagattctcttcctacacaagactgttctctaatttttcaggtgccgacttattaaaactgacaaaggaggatttagttcaaatttgtggtgcagccgatggaattcggctctataattcactgaagtcaaggtcggttagaccccgtttaaccatctatgtctgccgggagcagccaagcagcacagtgctgcaagggcagcagcaagctgcaagcagtgcaagcgagaatggcagtggggcaccctatgtttatcatgcaatctacttggaagaaatgattgcctcagaagttgctcgaaaacttgcgctggtgtttaatatccctctccaccaaattaatcaggtttacagacagggtcccaccggtattcacattcttgttagtgatcagatggttcagaattttcaagatgagagttgttttttattctccacagtaaaagctgaaagtagtgatggcatccacataattttgaagtgatgtcttatatagactgaactgtattcagtaccaaatagtcacgcttaaaagtgtgtgaagactgaatccaagaagtcttgggattggattttaccatatgaaatgtttcatattgaaaacacaagatgacctttctaatgagctgtatgagaggtgaatctcctcactgtcactgccatagccaagcatcctcatgagagtgagcacatcggcacagcatgcatccagctctggaggccacggtgcaggcatagctgcctgctgctctggcagaggccagtaaatacagttcctagaagcagcctttgctgtctttttacactgtatgcggtttggaaatgaatgtagaaacttactgtgggcatttacctttctgtgccagtttggcttttattgcctgaaccttatgctgacctggagaggagatgggggacagtgctgttgtggggccagcagtgaatctgtatgcggagagttgtgttgtgctgatgtggccgttggtggtcaggtaagaggctcggcaccttcttggaagaaatcatgtctgagggtgtacgtttgatatgatcatgccagattggagaagatccaagccaggaagatgggcttgaagcaaactgcattatcaggagtaccttggtgagaggatcagtgtaaatcctaataggtacaaagacttttgtgttttggctttgtcacagatttattgaaaaacttttttgcttctgcttccatttttagcattttagtttctggttttcatttttggagattccttgccttttaaactcgtggtttttctctcattttcttccctctctccctccatctctgaccacccccaccctaaccccccacccccaccatcctattaaacatttttaaagccctaccccagacattggaaataggtgacccaagtagggggagaaagtattattgttgatagcttctgactaggtgttaagggatcttcattatgaacaagatgaatttttttctggaaacactagatgttatcaatcaaacactaaaatgtaccatacaaatcccttaagcctctcaaatattgagctttagtacaatcatggatagacattctggtgatgatttaggggctttttatacaccacatactagcttctttctctataagagtgcctctttcataaaaccaaatgcttgtctgctagcatacttttcaaagggaatccactgttttctcactttcctcccatatctccgtccttcatccaaaaccttcccagaatccatcagcaagcatgtttgaggcctgtggtgtaggggactgaattttttttttaacttctattccattttaattgtaggatatctttgtccatatacccaggtgtcctgatttgaatgtactatttgatcctcattgtgttcaggcaaaaaataggaaatgagtaattttgagtttgaaatctctcccagaagacaaactacttcagtgagtaaaagctttgacattttatgttttattcataaagggggttaattatttgctacaaagaagcacgatctattttcatcatcgatttgaaaatatctgtaactcctatagatcctataggcagagagttttcctttctgactttttccctttgctttcgtgtgaccacatgttttctgtaccagtcactggggaaagaagtgagtttatctcgtttgttttaaaagttttgcttgtctatttagcattcctttttgggtctcaagatttatggaacaataaatgtcatttaatgctgtgtgcttattttgaattcctcatcaggttttagaagcggggtaaaaatacttagatgcttatcagacttgaaattatactgagtggcattgaacgtgagtttgtcccagtgaaacaggctaaataaattttggcaccagcaaa

SEQ ID NO: 279299 - DNA, 2374 bp, Homo sapiens
agtggggcccccgcagctctcgtcccggccgccgctggtgaccactcgccgcccctccggaggcttcacccgcgccctcccccaggacgcgccagcggagctccggctccttcgccctggacgcggaggccgcggtgtgcggggcgacggcgaggccggaagatggcctgggtgctcaagatggacgaggtgatcgagtccgggctggtgcacgacttcgacgccagcctctcgggcatcgggcaggaactgggcgccggcgcttacagcatgagtgatgtcttggcattgcccattttcaagcaggaagattccagccttccattggatggtgaaacagagcacccaccctttcagtatgtgatgtgtgctgcaacgtcaccagcagtaaaactgcatgatgaaacgcttacttatttgaaccaaggtcagtcatatgaaattcggatgctggataatcggaaaatgggtgatatgcctgagatcaatggaaaattagtaaagagcatcataagggttgtattccatgacagacggctacaatacacagagcatcagcaacttgaaggatggaagtggaatcgcccaggagacagacttcttgatttagatattccaatgtctgtgggaataattgacacaaggacgaatccaagccagttaaatgcggttgaatttctgtgggacccagcaaaacgcacctctgctttcattcaggtacactgcatcagcacagaatttactccacggaagcacggaggtgaaaagggagtgccctttaggatccaggttgacacctttaagcagaatgaaaatggagaatacacagatcatctacactcagctagctgccaaatcaaagtttttaagcctaaaggtgcagacaggaaacaaaaaactgaccgagagaagatggagaagagaacagctcatgaaaaagaaaagtatcagccgtcctatgataccacaatcctcacagagatgaggcttgagcctataattgaagatgcagttgaacatgagcagaaaaagtccagcaagcggactttgccagcagactacggtgattctctggcaaagcgaggcagttgttctccgtggcccgatgcccccacagcctatgtgaataacagcccttccccagcgcccactttcacctccccacagcagagcacttgcagtgtcccagacagcaattcttcttccccaaatcatcagggagatggagcttcacagacctctggtgaacaaattcagccttcagctacgatccaggaaacacagcaatggctgctcaaaaacagattctcttcctacacaagactgttctctaatttttcaggtgccgacttattaaaactgacaaaggaggatttagttcaaatttgtggtgcagccgatggaattcggctctataattcactgaagtcaaggtcggttagaccccgtttaaccatctatgtctgccgggagcagccaagcagcacagtgctgcaagggcagcagcaagctgcaagcagtgcaagcgagaatggcagtggggcaccctatgtttatcatgcaatctacttggaagaaatgattgcctcagaagttgctcgacagggtcccaccggtattcacattcttgttagtgatcagatggttcagaattttcaagatgagagttgttttttattctccacagtaaaaggtactttgcatgtgtgtgtgtcttaaaatgctggaatcatgagagatggtgtgtgcctctaattagtgcctctcgtgtttattctttaaaatgattgctttactcattttaagaagaaagtttgataaatgagaatatttctagtggttgtaacagaaattagcatataaggaagaggagtcagtctttctagatgactggaaaaaaaaatctcaattcattcagccaacgtcttactgagcactttgtgtcagacaccgtgcttctgtcgctcagtggatctattgaataaaacagaatccatgaaactcctattggggaaagcaaaccaaaattggccaagagatacacaaaattcccaatatgttaagttccatgaaggaacaggaaagtgtgggggtacttatggataagggagatctgggttgaggggaatatgaaactgtaaggcaaggcttctctgaggaggtgttattaatcctgagacttgaagaatgagaagaagcgggagctggccattggattagcatccccaggcaacgtggggctgtgtgcaaagaaaacacctggcttcttggaaagcctggcagtgggccatgtaggtgccatgcagtgtgtgagggtgagcggatcagggcaaatcaaagcaggagcacagatgcagtcggtaagcctgcttcc

SEQ ID NO: 279300 - DNA, 2454 bp, Homo sapiens
agtggggcccccgcagctctcgtcccggccgccgctggtgaccactcgccgcccctccggaggcttcacccgcgccctcccccaggacgcgccagcggagctccggctccttcgccctggacgcggaggccgcggtgtgcggggcgacggcgaggccggaagatggcctgggtgctcaagatggacgaggtgatcgagtccgggctggtgcacgacttcgacgccagcctctcgggcatcgggcaggaactgggcgccggcgcttacagcatgagtgatgtcttggcattgcccattttcaagcaggaagattccagccttccattggatggtgaaacagagcacccaccctttcagtatgtgatgtgtgctgcaacgtcaccagcagtaaaactgcatgatgaaacgcttacttatttgaaccaaggtcagtcatatgaaattcggatgctggataatcggaaaatgggtgatatgcctgagatcaatggaaaattagtaaagagcatcataagggttgtattccatgacagacggctacaatacacagagcatcagcaacttgaaggatggaagtggaatcgcccaggagacagacttcttgatttagatattccaatgtctgtgggaataattgacacaaggacgaatccaagccagttaaatgcggttgaatttctgtgggacccagcaaaacgcacctctgctttcattcaggtacactgcatcagcacagaatttactccacggaagcacggaggtgaaaagggagtgccctttaggatccaggttgacacctttaagcagaatgaaaatggagaatacacagatcatctacactcagctagctgccaaatcaaagtttttaagcctaaaggtgcagacaggaaacaaaaaactgaccgagagaagatggagaagagaacagctcatgaaaaagaaaagtatcagccgtcctatgataccacaatcctcacagagtgttctccgtggcccgatgcccccacagcctatgtgaataacagcccttccccagcgcccactttcacctccccacagcagagcacttgcagtgtcccagacagcaattcttcttccccaaatcatcagggagatggagcttcacagacctctggtgaacaaattcagccttcagctacgatccaggaaacacagcaatggctgctcaaaaacagattctcttcctacacaagactgttctctaatttttcaggtgccgacttattaaaactgacaaaggaggatttagttcaaatttgtggtgcagccgatggaattcggctctataattcactgaagtcaagggcaggcccagatatgatgcaggcactgatgagggcagaggtagactgtaagactggtagaaatgcacatgggcagtactgatttcttgaagacgactgggtttgttgccaagaaaacaaaacttctaatttaggtcggttagaccccgtttaaccatctatgtctgccgggagcagccaagcagcacagtgctgcaagggcagcagcaagctgcaagcagtgcaagcgagaatggcagtggggcaccctatgtttatcatgcaatctacttggaagaaatgattgcctcagaagttgctcgaaaacttgcgctggtgtttaatatccctctccaccaaattaatcaggtttacagacagggtcccaccggtattcacattcttgttagtgatcagatggttcagaattttcaagatgagagttgttttttattctccacagtaaaaggtactttgcatgtgtgtgtgtcttaaaatgctggaatcatgagagatggtgtgtgcctctaattagtgcctctcgtgtttattctttaaaatgattgctttactcattttaagaagaaagtttgataaatgagaatatttctagtggttgtaacagaaattagcatataaggaagaggagtcagtctttctagatgactggaaaaaaaaatctcaattcattcagccaacgtcttactgagcactttgtgtcagacaccgtgcttctgtcgctcagtggatctattgaataaaacagaatccatgaaactcctattggggaaagcaaaccaaaattggccaagagatacacaaaattcccaatatgttaagttccatgaaggaacaggaaagtgtgggggtacttatggataagggagatctgggttgaggggaatatgaaactgtaaggcaaggcttctctgaggaggtgttattaatcctgagacttgaagaatgagaagaagcgggagctggccattggattagcatccccaggcaacgtggggctgtgtgcaaagaaaacacctggcttcttggaaagcctggcagtgggccatgtaggtgccatgcagtgtgtgagggtgagcggatcagggcaaatcaaagcaggagcacagatgcagtcggtaagcctgcttcc

SEQ ID NO: 279301 - DNA, 266 bp, Homo sapiens
agtaggatgtacacatttcagtataataaatgttttctgattgttttgcaaatgtgtgtctcatttaaaatcccagttcctgctactgtcacttcgtgtcatagaatcaaggagtttccctgtgtgtattctgagccagtctaaatgtagtaagaggttaggctcatagttttttccttttcagtttattttctgaaagctgatgcaactgaggatatgttgttattccattaactaactaactaactaactaactaactaaacta

SEQ ID NO: 279302 - DNA, 249 bp, Homo sapiens
tgagggcagaggtagactgtaagactggtagaaatgcacatgggcagtactgatttcttgaagacgactgggtttgttgccaagaaaacaaaacttctaatttaggtgagctatacagaatctatggttttcaaggtcatgactattactaaacagttattaaaaatgtaaactaattgtgaattaaaatgacagaaactgtaaattgtgctggcttgtaagaaccatttactatcattgctctttcta

SEQ ID NO: 279303 - DNA, 634 bp, Homo sapiens
gtttgacatgttattctctgtgaaatttctggggaaaatatttaaatttggggattttgatagactgtttcctgggtgggatcttaaatgaagatgctgaaatcccaatgaggtcttagaaacagaccttaaaaactttgaagttggcaagagacttaagttggagcctagaaagtccaatttttgtcactgctggggttttgcattttttttaactttgaatcctgttagtcatgcatttgtttaattggactgaagagacatgaaacagggtgttagatctttctttgtataatgaaaagacattgatcccaatctttggtgtttgtccagatgaggcttgagcctataattgaagatgcagttgaacatgagcagaaaaagtccagcaagcggactttgccagcagactacggtgattctctggcaaagcgaggcagtgtaagggacttctgcttctcttttcattgtgcaagaaaccttgtgcagtgttagatataggaccaacttccaccgcaaagtaaagccaaaattgtttttgatgtccatgtcttgatttaatttgcttttgtttagacttcctgcttctgtttgttcctcactgaggaaaatttcctaaatctaacactttaaa

SEQ ID NO: 279304 - DNA, 396 bp, Homo sapiens
tctattgaataaaacagaatccatgaaactcctattggggaaagcaaaccaaaattggccaagagatacacaaaattcccaatatgttaagttccatgaaggaacaggaaagtgtgggggtacttatggataagggagatctgggttgaggggaatatgaaactgtaaggcaaggcttctctgaggaggtgttattaatcctgagacttgaagaatgagaagaagcgggagctggccattggattagcatccccaggcaacgtggggctgtgtgcaaagaaaacacctggcttcttggaaagcctggcagtgggccatgtaggtgccatgcagtgtgtgagggtgagcggatcagggcaaatcaaagcaggaggccgggtctggcatgcggggacc

SEQ ID NO: 279305 - DNA, 594 bp, Homo sapiens
ttttttggtactttgaaaggtgtgaccttcgtacagatcctacagatcaggcagaaaacagatcaaagattactgttaaaatgcttttctttttttttttttaatttcagtttatcatgcaatctacttggaagaaatgattgcctcagaagttgctcgaaaacttgcgctggtgtttaatatccctctccaccaaattaatcaggtttacagacagggtcccaccggtattcacattcttgttagtgatcaggtaaatcaaatcatttgtttttccttttcagactggtatttacttttatacatgtaattgtagaactgtagaaaaattctgtgacctcttttgaaaatacttatgagaatcattttcagagagttgggaatcactttggaagaacttataaccaagagtttcaggcatcctagtgataatatggaatacaagccaaggaaaactggcttagcctccccccagccctttaggatgcagccaatcactggggcactctagggatagtggcaggctttggccctttttatgaggtgagtcactggatgtgttttccttttgtctattatttgatgactaattta

SEQ ID NO: 279306 - DNA, 3672 bp, Homo sapiens
agtggggcccccgcagctctcgtcccggccgccgctggtgaccactcgccgcccctccggaggcttcacccgcgccctcccccaggacgcgccagcggagctccggctccttcgccctggacgcggaggccgcggtgtgcggggcgacggcgaggccggaagatggcctgggtgctcaagatggacgaggtgatcgagtccgggctggtgcacgacttcgacgccagcctctcgggcatcgggcaggaactgggcgccggcgcttacagcatgagtgatgtcttggcattgcccattttcaagcaggaagattccagccttccattggatggtgaaacagagcacccaccctttcagtatgtgatgtgtgctgcaacgtcaccagcagtaaaactgcatgatgaaacgcttacttatttgaaccaaggtcagtcatatgaaattcggatgctggataatcggaaaatgggtgatatgcctgagatcaatggaaaattagtaaagagcatcataagggttgtattccatgacagacggctacaatacacagagcatcagcaacttgaaggatggaagtggaatcgcccaggagacagacttcttgatttagatattccaatgtctgtgggaataattgacacaaggacgaatccaagccagttaaatgcggttgaatttctgtgggacccagcaaaacgcacctctgctttcattcaggtacactgcatcagcacagaatttactccacggaagcacggaggtgaaaagggagtgccctttaggatccaggttgacacctttaagcagaatgaaaatggagaatacacagatcatctacactcagctagctgccaaatcaaagtttttaagcctaaaggtgcagacaggaaacaaaaaactgaccgagagaagatggagaagagaacagctcatgaaaaagaaaagtatcagccgtcctatgataccacaatcctcacagagtgttctccgtggcccgatgcccccacagcctatgtgaataacagcccttccccagcgcccactttcacctccccacagcagagcacttgcagtgtcccagacagcaattcttcttccccaaatcatcagggagatggagcttcacagacctctggtgaacaaattcagccttcagctacgatccaggaaacacagcaatggctgctcaaaaacagattctcttcctacacaagactgttctctaatttttcaggtgccgacttattaaaactgacaaaggaggatttagttcaaatttgtggtgcagccgatggaattcggctctataattcactgaagtcaaggtcggttagaccccgtttaaccatctatgtctgccgggagcagccaagcagcacagtgctgcaagggcagcagcaagctgcaagcagtgcaagcgagaatggcagtggggcaccctatgtttatcatgcaatctacttggaagaaatgattgcctcagaagttgctcgaaaacttgcgctggtgtttaatatccctctccaccaaattaatcaggtttacagacagggtcccaccggtattcacattcttgttagtgatcagatggttcagaattttcaagatgagagttgttttttattctccacagtaaaagctgaaagtagtgatggcatccacataattttgaagtgatgtcttatatagactgaactgtattcagtaccaaatagtcacgcttaaaagtgtgtgaagactgaatccaagaagtcttgggattggattttaccatatgaaatgtttcatattgaaaacacaagatgacctttctaatgagctgtatgagaggtgaatctcctcactgtcactgccatagccaagcatcctcatgagagtgagcacatcggcacagcatgcatccagctctggaggccacggtgcaggcatagctgcctgctgctctggcagaggccagtaaatacagttcctagaagcagcctttgctgtctttttacactgtatgcggtttggaaatgaatgtagaaacttactgtgggcatttacctttctgtgccagtttggcttttattgcctgaaccttatgctgacctggagaggagatgggggacagtgctgttgtggggccagcagtgaatctgtatgcggagagttgtgttgtgctgatgtggccgttggtggtcaggtaagaggctcggcaccttcttggaagaaatcatgtctgagggtgtacgtttgatatgatcatgccagattggagaagatccaagccaggaagatgggcttgaagcaaactgcattatcaggagtaccttggtgagaggatcagtgtaaatcctaataggtacaaagacttttgtgttttggctttgtcacagatttattgaaaaacttttttgcttctgcttccatttttagcattttagtttctggttttcatttttggagattccttgccttttaaactcgtggtttttctctcattttcttccctctctccctccatctctgaccacccccaccctaaccccccacccccaccatcctattaaacatttttaaagccctaccccagacattggaaataggtgacccaagtagggggagaaagtattattgttgatagcttctgactaggtgttaagggatcttcattatgaacaagatgaatttttttctggaaacactagatgttatcaatcaaacactaaaatgtaccatacaaatcccttaagcctctcaaatattgagctttagtacaatcatggatagacattctggtgatgatttaggggctttttatacaccacatactagcttctttctctataagagtgcctctttcataaaaccaaatgcttgtctgctagcatacttttcaaagggaatccactgttttctcactttcctcccatatctccgtccttcatccaaaaccttcccagaatccatcagcaagcatgtttgaggcctgtggtgtaggggactgaattttttttttaacttctattccattttaattgtaggatatctttgtccatatacccaggtgtcctgatttgaatgtactatttgatcctcattgtgttcaggcaaaaaataggaaatgagtaattttgagtttgaaatctctcccagaagacaaactacttcagtgagtaaaagctttgacattttatgttttattcataaagggggttaattatttgctacaaagaagcacgatctattttcatcatcgatttgaaaatatctgtaactcctatagatcctataggcagagagttttcctttctgactttttccctttgctttcgtgtgaccacatgttttctgtaccagtcactggggaaagaagtgagtttatctcgtttgttttaaaagttttgcttgtctatttagcattcctttttgggtctcaagatttatggaacaataaatgtcatttaatgctgtgtgcttattttgaattcctcatcaggttttagaagcggggtaaaaatacttagatgcttatcagacttgaaattatactgagtggcattgaacgtgagtttgtcccagtgaaacaggctaaataaattttggcaccagcaaatttgttactttgtttttttaatagtaggatgtacacatttcagtataataaatgttttctgattgttttgcaaa

SEQ ID NO: 279307 - DNA, 3726 bp, Homo sapiens
agtggggcccccgcagctctcgtcccggccgccgctggtgaccactcgccgcccctccggaggcttcacccgcgccctcccccaggacgcgccagcggagctccggctccttcgccctggacgcggaggccgcggtgtgcggggcgacggcgaggccggaagatggcctgggtgctcaagatggacgaggtgatcgagtccgggctggtgcacgacttcgacgccagcctctcgggcatcgggcaggaactgggcgccggcgcttacagcatgagtgatgtcttggcattgcccattttcaagcaggaagattccagccttccattggatggtgaaacagagcacccaccctttcagtatgtgatgtgtgctgcaacgtcaccagcagtaaaactgcatgatgaaacgcttacttatttgaaccaaggtcagtcatatgaaattcggatgctggataatcggaaaatgggtgatatgcctgagatcaatggaaaattagtaaagagcatcataagggttgtattccatgacagacggctacaatacacagagcatcagcaacttgaaggatggaagtggaatcgcccaggagacagacttcttgatttagatattccaatgtctgtgggaataattgacacaaggacgaatccaagccagttaaatgcggttgaatttctgtgggacccagcaaaacgcacctctgctttcattcaggtacactgcatcagcacagaatttactccacggaagcacggaggtgaaaagggagtgccctttaggatccaggttgacacctttaagcagaatgaaaatggagaatacacagatcatctacactcagctagctgccaaatcaaagtttttaagcctaaaggtgcagacaggaaacaaaaaactgaccgagagaagatggagaagagaacagctcatgaaaaagaaaagtatcagccgtcctatgataccacaatcctcacagagatgaggcttgagcctataattgaagatgcagttgaacatgagcagaaaaagtccagcaagcggactttgccagcagactacggtgattctctggcaaagcgaggcagttgttctccgtggcccgatgcccccacagcctatgtgaataacagcccttccccagcgcccactttcacctccccacagcagagcacttgcagtgtcccagacagcaattcttcttccccaaatcatcagggagatggagcttcacagacctctggtgaacaaattcagccttcagctacgatccaggaaacacagcaatggctgctcaaaaacagattctcttcctacacaagactgttctctaatttttcaggtgccgacttattaaaactgacaaaggaggatttagttcaaatttgtggtgcagccgatggaattcggctctataattcactgaagtcaaggtcggttagaccccgtttaaccatctatgtctgccgggagcagccaagcagcacagtgctgcaagggcagcagcaagctgcaagcagtgcaagcgagaatggcagtggggcaccctatgtttatcatgcaatctacttggaagaaatgattgcctcagaagttgctcgacagggtcccaccggtattcacattcttgttagtgatcagatggttcagaattttcaagatgagagttgttttttattctccacagtaaaagctgaaagtagtgatggcatccacataattttgaagtgatgtcttatatagactgaactgtattcagtaccaaatagtcacgcttaaaagtgtgtgaagactgaatccaagaagtcttgggattggattttaccatatgaaatgtttcatattgaaaacacaagatgacctttctaatgagctgtatgagaggtgaatctcctcactgtcactgccatagccaagcatcctcatgagagtgagcacatcggcacagcatgcatccagctctggaggccacggtgcaggcatagctgcctgctgctctggcagaggccagtaaatacagttcctagaagcagcctttgctgtctttttacactgtatgcggtttggaaatgaatgtagaaacttactgtgggcatttacctttctgtgccagtttggcttttattgcctgaaccttatgctgacctggagaggagatgggggacagtgctgttgtggggccagcagtgaatctgtatgcggagagttgtgttgtgctgatgtggccgttggtggtcaggtaagaggctcggcaccttcttggaagaaatcatgtctgagggtgtacgtttgatatgatcatgccagattggagaagatccaagccaggaagatgggcttgaagcaaactgcattatcaggagtaccttggtgagaggatcagtgtaaatcctaataggtacaaagacttttgtgttttggctttgtcacagatttattgaaaaacttttttgcttctgcttccatttttagcattttagtttctggttttcatttttggagattccttgccttttaaactcgtggtttttctctcattttcttccctctctccctccatctctgaccacccccaccctaaccccccacccccaccatcctattaaacatttttaaagccctaccccagacattggaaataggtgacccaagtagggggagaaagtattattgttgatagcttctgactaggtgttaagggatcttcattatgaacaagatgaatttttttctggaaacactagatgttatcaatcaaacactaaaatgtaccatacaaatcccttaagcctctcaaatattgagctttagtacaatcatggatagacattctggtgatgatttaggggctttttatacaccacatactagcttctttctctataagagtgcctctttcataaaaccaaatgcttgtctgctagcatacttttcaaagggaatccactgttttctcactttcctcccatatctccgtccttcatccaaaaccttcccagaatccatcagcaagcatgtttgaggcctgtggtgtaggggactgaattttttttttaacttctattccattttaattgtaggatatctttgtccatatacccaggtgtcctgatttgaatgtactatttgatcctcattgtgttcaggcaaaaaataggaaatgagtaattttgagtttgaaatctctcccagaagacaaactacttcagtgagtaaaagctttgacattttatgttttattcataaagggggttaattatttgctacaaagaagcacgatctattttcatcatcgatttgaaaatatctgtaactcctatagatcctataggcagagagttttcctttctgactttttccctttgctttcgtgtgaccacatgttttctgtaccagtcactggggaaagaagtgagtttatctcgtttgttttaaaagttttgcttgtctatttagcattcctttttgggtctcaagatttatggaacaataaatgtcatttaatgctgtgtgcttattttgaattcctcatcaggttttagaagcggggtaaaaatacttagatgcttatcagacttgaaattatactgagtggcattgaacgtgagtttgtcccagtgaaacaggctaaataaattttggcaccagcaaatttgttactttgtttttttaatagtaggatgtacacatttcagtataataaatgttttctgattgttttgcaaa

SEQ ID NO: 279308 - DNA, 4269 bp, Homo sapiens
  misc_feature (3792)..(3792): n is a, c, g, or t
  misc_feature (3797)..(3797): n is a, c, g, or t
  misc_feature (3803)..(3803): n is a, c, g, or t
agtggggcccccgcagctctcgtcccggccgccgctggtgaccactcgccgcccctccggaggcttcacccgcgccctcccccaggacgcgccagcggagctccggctccttcgccctggacgcggaggccgcggtgtgcggggcgacggcgaggccggaagatggcctgggtgctcaagatggacgaggtgatcgagtccgggctggtgcacgacttcgacgccagcctctcgggcatcgggcaggaactgggcgccggcgcttacagcatgagtgatgtcttggcattgcccattttcaagcaggaagattccagccttccattggatggtgaaacagagcacccaccctttcagtatgtgatgtgtgctgcaacgtcaccagcagtaaaactgcatgatgaaacgcttacttatttgaaccaaggtcagtcatatgaaattcggatgctggataatcggaaaatgggtgatatgcctgagatcaatggaaaattagtaaagagcatcataagggttgtattccatgacagacggctacaatacacagagcatcagcaacttgaaggatggaagtggaatcgcccaggagacagacttcttgatttagatattccaatgtctgtgggaataattgacacaaggacgaatccaagccagttaaatgcggttgaatttctgtgggacccagcaaaacgcacctctgctttcattcaggtacactgcatcagcacagaatttactccacggaagcacggaggtgaaaagggagtgccctttaggatccaggttgacacctttaagcagaatgaaaatggagaatacacagatcatctacactcagctagctgccaaatcaaagtttttaagcctaaaggtgcagacaggaaacaaaaaactgaccgagagaagatggagaagagaacagctcatgaaaaagaaaagtatcagccgtcctatgataccacaatcctcacagagatgaggcttgagcctataattgaagatgcagttgaacatgagcagaaaaagtccagcaagcggactttgccagcagactacggtgattctctggcaaagcgaggcagttgttctccgtggcccgatgcccccacagcctatgtgaataacagcccttccccagcgcccactttcacctccccacagcagagcacttgcagtgtcccagacagcaattcttcttccccaaatcatcagggagatggagcttcacagacctctggtgaacaaattcagccttcagctacgatccaggaaacacagcaatggctgctcaaaaacagattctcttcctacacaagactgttctctaatttttcaggtgccgacttattaaaactgacaaaggaggatttagttcaaatttgtggtgcagccgatggaattcggctctataattcactgaagtcaaggtcggttagaccccgtttaaccatctatgtctgccgggagcagccaagcagcacagtgctgcaagggcagcagcaagctgcaagcagtgcaagcgagaatggcagtggggcaccctatgtttatcatgcaatctacttggaagaaatgattgcctcagaagttgctcgaaaacttgcgctggtgtttaatatccctctccaccaaattaatcaggtttacagacagggtcccaccggtattcacattcttgttagtgatcagatggttcagaattttcaagatgagagttgttttttattctccacagtaaaagctgaaagtagtgatggcatccacataattttgaagtgatgtcttatatagactgaactgtattcagtaccaaatagtcacgcttaaaagtgtgtgaagactgaatccaagaagtcttgggattggattttaccatatgaaatgtttcatattgaaaacacaagatgacctttctaatgagctgtatgagaggtgaatctcctcactgtcactgccatagccaagcatcctcatgagagtgagcacatcggcacagcatgcatccagctctggaggccacggtgcaggcatagctgcctgctgctctggcagaggccagtaaatacagttcctagaagcagcctttgctgtctttttacactgtatgcggtttggaaatgaatgtagaaacttactgtgggcatttacctttctgtgccagtttggcttttattgcctgaaccttatgctgacctggagaggagatgggggacagtgctgttgtggggccagcagtgaatctgtatgcggagagttgtgttgtgctgatgtggccgttggtggtcaggtaagaggctcggcaccttcttggaagaaatcatgtctgagggtgtacgtttgatatgatcatgccagattggagaagatccaagccaggaagatgggcttgaagcaaactgcattatcaggagtaccttggtgagaggatcagtgtaaatcctaataggtacaaagacttttgtgttttggctttgtcacagatttattgaaaaacttttttgcttctgcttccatttttagcattttagtttctggttttcatttttggagattccttgccttttaaactcgtggtttttctctcattttcttccctctctccctccatctctgaccacccccaccctaaccccccacccccaccatcctattaaacatttttaaagccctaccccagacattggaaataggtgacccaagtagggggagaaagtattattgttgatagcttctgactaggtgttaagggatcttcattatgaacaagatgaatttttttctggaaacactagatgttatcaatcaaacactaaaatgtaccatacaaatcccttaagcctctcaaatattgagctttagtacaatcatggatagacattctggtgatgatttaggggctttttatacaccacatactagcttctttctctataagagtgcctctttcataaaaccaaatgcttgtctgctagcatacttttcaaagggaatccactgttttctcactttcctcccatatctccgtccttcatccaaaaccttcccagaatccatcagcaagcatgtttgaggcctgtggtgtaggggactgaattttttttttaacttctattccattttaattgtaggatatctttgtccatatacccaggtgtcctgatttgaatgtactatttgatcctcattgtgttcaggcaaaaaataggaaatgagtaattttgagtttgaaatctctcccagaagacaaactacttcagtgagtaaaagctttgacattttatgttttattcataaagggggttaattatttgctacaaagaagcacgatctattttcatcatcgatttgaaaatatctgtaactcctatagatcctataggcagagagttttcctttctgactttttccctttgctttcgtgtgaccacatgttttctgtaccagtcactggggaaagaagtgagtttatctcgtttgttttaaaagttttgcttgtctatttagcattcctttttgggtctcaagatttatggaacaataaatgtcatttaatgctgtgtgcttattttgaattcctcatcaggttttagaagcggggtaaaaatacttagatgcttatcagacttgaaattatactgagtggcattgaacgtgagtttgtcccagtgaaacaggctaaataaattttggcaccagcaaatttgttactttgtttttttaatagtaggatgtacacatttcagtataataaatgttttctgattgttttgcaaaaaaaaaaaaaanaaaanaaaaanaaaaaaaaaaaaaaaaaaaaaaaaggggggggggggtaaaaaatactccccgcgaagggggccccacgatttatccgctgctgccccggttctttctgttgaacacaaggggggcccccataagaggaggagggcagtaataatagaaagcaggggagcagagggggcggggagtataaaacaaacccggcgcggggcgcggggagaagaaccggtggtctccgcgggggacctcttcgggagagagaggaaccccctcatccttctgggggggcggcgacacccatctcggggggcaccaacccctcccaaggaagaatattaacaggccccagaagggagaaaacttattacaactccagcgcggtgcactactggcggcaacaccaacacgcgggctattatctcgggcgcgggtagagaaaactccggcccacgggaggtgtactcgcaaaatatataggcg

SEQ ID NO: 279309 - DNA, 4195 bp, Homo sapiens
  misc_feature (3718)..(3718): n is a, c, g, or t
  misc_feature (3723)..(3723): n is a, c, g, or t
  misc_feature (3729)..(3729): n is a, c, g, or t
agtggggcccccgcagctctcgtcccggccgccgctggtgaccactcgccgcccctccggaggcttcacccgcgccctcccccaggacgcgccagcggagctccggctccttcgccctggacgcggaggccgcggtgtgcggggcgacggcgaggccggaagatggcctgggtgctcaagatggacgaggtgatcgagtccgggctggtgcacgacttcgacgccagcctctcgggcatcgggcaggaactgggcgccggcgcttacagcatgagtgatgtcttggcattgcccattttcaagcaggaagattccagccttccattggatggtgaaacagagcacccaccctttcagtatgtgatgtgtgctgcaacgtcaccagcagtaaaactgcatgatgaaacgcttacttatttgaaccaaggtcagtcatatgaaattcggatgctggataatcggaaaatgggtgatatgcctgagatcaatggaaaattagtaaagagcatcataagggttgtattccatgacagacggctacaatacacagagcatcagcaacttgaaggatggaagtggaatcgcccaggagacagacttcttgatttagatattccaatgtctgtgggaataattgacacaaggacgaatccaagccagttaaatgcggttgaatttctgtgggacccagcaaaacgcacctctgctttcattcaggtacactgcatcagcacagaatttactccacggaagcacggaggtgaaaagggagtgccctttaggatccaggttgacacctttaagcagaatgaaaatggagaatacacagatcatctacactcagctagctgccaaatcaaagtttttaagcctaaaggtgcagacaggaaacaaaaaactgaccgagagaagatggagaagagaacagctcatgaaaaagaaaagtatcagccgtcctatgataccacaatcctcacagagatgaggcttgagcctataattgaagatgcagttgaacatgagcagaaaaagtccagcaagcggactttgccagcagactacggtgattctctggcaaagcgaggcagttgttctccgtggcccgatgcccccacagcctatgtgaataacagcccttccccagcgcccactttcacctccccacagcagagcacttgcagtgtcccagacagcaattcttcttccccaaatcatcagggagatggagcttcacagacctctggtgaacaaattcagccttcagctacgatccaggaaacacagcaatggctgctcaaaaacagattctcttcctacacaagactgttctctaatttttcaggtgccgacttattaaaactgacaaaggaggatttagttcaaatttgtggtgcagccgatggaattcggctctataattcactgaagtcaaggtcggttagaccccgtttaaccatctatgtctgccgggagcagccaagcagcacagtgctgcaagggcagcagcaagctgcaagcagtgcaagcgagaatggcagtggggcaccctatgtttatcatgcaatctacttggaagaaatgattgcctcagaagttgctcgaaaacttgcgctggtgtttaatatccctctccaccaaattaatcaggtttacagacagggtcccaccggtattcacattcttgttagtgatcagatggttcagaattttcaagatgagagttgttttttattctccacagtaaaagctgaaagtagtgatggcatccacataattttgaagtgatgtcttatatagactgaactgtattcagtaccaaatagtcacgcttaaaagtgtgtgaagactgaatccaagaagtcttgggattggattttaccatatgaaatgtttcatattgaaaacacaagatgacctttctaatgagctgtatgagaggtgaatctcctcactgtcactgccatagccaagcatcctcatgagagtgagcacatcggcacagcatgcatccagctctggaggccacggtgcaggcatagctgcctgctgctctggcagaggccagtaaatacagttcctagaagcagcctttgctgtctttttacactgtatgcggtttggaaatgaatgtagaaacttactgtgggcatttacctttctgtgccagtttggcttttattgcctgaaccttatgctgacctggagaggagatgggggacagtgctgttgtggggccagcagtgaatctgtatgcggagagttgtgttgtgctgatgtggccgttggtggtcaggtaagaggctcggcaccttcttggaagaaatcatgtctgagggtgtacgtttgatatgatcatgccagattggagaagatccaagccaggaagatgggcttgaagcaaactgcattatcaggagtaccttggtgagaggatcagtgtaaatcctaataggtacaaagacttttgtgttttggctttgtcacagatttattgaaaaacttttttgcttctgcttccatttttagcattttagtttctggttttcatttttggagattccttgccttttaaactcgtggtttttctctcattttcttccctctctccctccatctctgaccacccccaccctaaccccccacccccaccatcctattaaacatttttaaagccctaccccagacattggaaataggtgacccaagtagggggagaaagtattattgttgatagcttctgactaggtgttaagggatcttcattatgaacaagatgaatttttttctggaaacactagatgttatcaatcaaacactaaaatgtaccatacaaatcccttaagcctctcaaatattgagctttagtacaatcatggatagacattctggtgatgatttaggggctttttatacaccacatactagcttctttctctataagagtgcctctttcataaaaccaaatgcttgtctgctagcatacttttcaaagggaatccactgttttctcactttcctcccatatctccgtccttcatccaaaaccttcccagaatccatcagcaagcatgtttgaggcctgtggtgtaggggactgaattttttttttaacttctattccattttaattgtaggatatctttgtccatatacccaggtgtcctgatttgaatgtactatttgatcctcattgtgttcaggcaaaaaataggaaatgagtaattttgagtttgaaatctctcccagaagacaaactacttcagtgagtaaaagctttgacattttatgttttattcataaagggggttaattatttgctacaaagaagcacgatctattttcatcatcgatttgaaaatatctgtaactcctatagatcctataggcagagagttttcctttctgactttttccctttgctttcgtgtgaccacatgttttctgtaccagtcactggggaaagaagtgagtttatctcgtttgttttaaaagttttgcttgtctatttagcattcctttttgggtctcaagatttatggaacaataaatgtcatttaatgctgtgtgcttattttgaattcctcatcaggttttagaagcggggtaaaaatacttagatgcttatcagacttgaaattatactgagtggcattgaacgtgagtttgtcccagtgaaacaggctaaataaattttggcaccagcaaaaaaaaaaaaaanaaaanaaaaanaaaaaaaaaaaaaaaaaaaaaaaaggggggggggggtaaaaaatactccccgcgaagggggccccacgatttatccgctgctgccccggttctttctgttgaacacaaggggggcccccataagaggaggagggcagtaataatagaaagcaggggagcagagggggcggggagtataaaacaaacccggcgcggggcgcggggagaagaaccggtggtctccgcgggggacctcttcgggagagagaggaaccccctcatccttctgggggggcggcgacacccatctcggggggcaccaacccctcccaaggaagaatattaacaggccccagaagggagaaaacttattacaactccagcgcggtgcactactggcggcaacaccaacacgcgggctattatctcgggcgcgggtagagaaaactccggcccacgggaggtgtactcgcaaaatatataggcg

SEQ ID NO: 279310 - DNA, 1268 bp, Homo sapiens
agtggggcccccgcagctctcgtcccggccgccgctggtgaccactcgccgcccctccggaggcttcacccgcgccctcccccaggacgcgccagcggagctccggctccttcgccctggacgcggaggccgcggtgtgcggggcgacggcgaggccggaagatggcctgggtgctcaagatggacgaggtgatcgagtccgggctggtgcacgacttcgacgccagcctctcgggcatcgggcaggaactgggcgccggcgcttacagcatgagtgatgtcttggcattgcccattttcaagcaggaagattccagccttccattggatggtgaaacagagcacccaccctttcagtatgtgatgtgtgctgcaacgtcaccagcagtaaaactgcatgatgaaacgcttacttatttgaaccaaggtcagtcatatgaaattcggatgctggataatcggaaaatgggtgatatgcctgagatcaatggaaaattagtaaagagtggcatgtcagggcccaggtgctgctgggccctcagtgtggaggggcattctattggaaagacctgccctctgtggatctgcctttttagtggagcatcataagggttgtattccatgacagacggctacaatacacagagcatcagcaacttgaaggatggaagtggaatcgcccaggagacagacttcttgatttagatattccaatgtctgtgggaataattgacacaaggacgaatccaagccagttaaatgcggttgaatttctgtgggacccagcaaaacgcacctctgctttcattcaggtacactgcatcagcacagaatttactccacggaagcacggaggtgaaaagggagtgccctttaggatccaggttgacacctttaagcagaatgaaaatggagaatacacagatcatctacactcagctagctgccaaatcaaagtttttaagcctaaaggtgcagacaggaaacaaaaaactgaccgagagcaatggtatgatcatggctcactgtagactttaactacgtggctgaagctgtcctctcactccagtttccacccttacacaccagtagctgggattacagacactcaccagcgcgcctggctaatttttattatttgtagaaactgagggtctcactggtgttgcccaggctggtctcgaagctcctggcctcagacatcctgggattacaggtgggagtcactgttgcctgacagcattgtatagtaggaagtgactaaagac

SEQ ID NO: 279311 - DNA, 517 bp, Homo sapiens
gtccaggcaggtcccctggggcagctgcccacccgtgccccggggatgatgtctcagtttacccagagttccagccccaggctgctgggtgaccgcggagagaggaatgcggccatccgtgacatttttgggacatggatctctgccccacctcacatcacctctgatagcaccgctcagccggggagccagaaccgcacccccactgcaccctagagagtattgcaagcagagatggcaagtccaagcgtgcacaggcagaggcttgcaggaaactgacccctggccgcttatctggtgttccggctctcaagcacaaagccaggcatgggctctgcatccccacccattgaggggagccaggacagaaagaagcccacaagtaacccaggtgtatttgtctgttctcatgctgctaataaacacatacccgagactgggtaatttataaagggaaaaggtttaatggactcatagttccacgtggctggttggtggttggcagggttgcgggggc

SEQ ID NO: 279312 - DNA, 383 bp, Homo sapiens
tgggtgatgggggtcatcaccccctcaacccccgtgtccctgttccccatttagccagaaccgcacccccactgcaccctagagagtattgcaagcagagatggcaagtccaagcgtgcacaggcagaggcttgcaggaaactgacccctggccgcttatctggtgttccggctctcaagcacaaagccaggcatgggctctgcatccccacccattgaggggagccaggacagaaagaagcccacaagtaacccaggtgtatttgtctgttctcatgctgctaataaacacatacccgagactgggtaatttataaagggaaaaggtttaatggactcatagttccacgtggctggttggtggttggcagggttgcgggggc

SEQ ID NO: 279313 - DNA, 1753 bp, Homo sapiens
ctccgacgtcatcggggcgcgccctcgcgctgtcgccgccacagtctgcgacgggacccggcgtgcccatgtgtcaggtgggcgaggactacggggagccggcgcctgaggagccgcccccggcgccgcggcccagccgtgagcagaagtgtgtgaagtgcaaggaagcgcagcccgttgtggtgatacgagccggagatgccttctgcagggactgtttcaaggccttctacgtccacaagttcagagccatgctgggcaagaaccggctcatctttccaggcgagaaggtgctcttggcgtggtctggggggccttcgtccagctccatggtctggcaggttcttgagggcctgagccaagattctgccaaaagactgcgctttgtggcaggagtcatctttgttgacgagggagcagcctgtggccagagcctagaggagagatcaaagaccctggccgaagtgaagcccattctgcaagcaactgggttcccatggcatgtggtggccttagaggaggtgttcagcctgccaccgtcggtgctttggtgctctgcccaggagctggtgggatccgagggggcctacaaggcggccgtggacagcttcctccagcagcagcatgtgctgggggccgggggtggtcctggcccgactcaaggggaggaacagccaccccagcccccgctggacccccagaacctggcaagaccgcctgcccctgcccagactgaggctctttcccaactgttctgctcagtgaggacactgactgccaaggaggagcttctgcagaccctgcggacccacctgatcctccacatggcccgagcccacggctactccaaggtcatgactggggacagctgcacacgcttggctatcaagctcatgaccaacctggcgctgggtcgaggggccttcctggcctgggatacgggcttctcggatgagcggcacggggacgtggtggtggtgcggcccatgcgggaccacaccctgaaggaggtcgctttctacaaccgcctgttctccgttccttctgtcttcacaccagccgtcgacaccaaggcccctgaaaaggccagcatccaccggctgatggaggccttcatcctcaggctgcagacccagttcccctccactgtcagcactgtgtacaggacaagtgagaagctggtgaagggcccccgggatggccctgctgctggcgactccggcccccgctgcctcctctgcatgtgtgccctggacgtcgacgccgctgacagtgccacggcttttggggctcagacctcctcgcgtctctcccggatgcagtcacccatccccctgactgagacccggacacccccggggccctgctgttctccaggggtgggctgggcccagcgctgcggccagggggcctgcaggagggaggacccccaagcctgcattgaggagcagctgtgctacagctgccgcgtgaacatgaaggacttgccctcactggaccccctgccgccgtacatcctggctgaggcccagctccgcacacagagggcctggggcttgcaggagatccgggactgtctgattgaggacagtgacgacgaggcgggccagagctgagcgtgaggacgtgcttgccgggacagcaggcagtggccacctggtacaccacactggagccggaaggcaaggacgggggactggcctctgattgtccatttgtataaataaaacattttttaattaaaaaaaaaaaa

SEQ ID NO: 279314 - DNA, 1943 bp, Homo sapiens
  misc_feature (1711)..(1711): n is a, c, g, or t
  misc_feature (1723)..(1725): n is a, c, g, or t
  misc_feature (1730)..(1730): n is a, c, g, or t
  misc_feature (1737)..(1737): n is a, c, g, or t
  misc_feature (1752)..(1752): n is a, c, g, or t
  misc_feature (1757)..(1757): n is a, c, g, or t
  misc_feature (1760)..(1760): n is a, c, g, or t
  misc_feature (1766)..(1766): n is a, c, g, or t
  misc_feature (1826)..(1826): n is a, c, g, or t
  misc_feature (1853)..(1853): n is a, c, g, or t
ctccgacgtcatcggggcgcgccctcgcgctgtcgccgccacagtctgcgacgggacccggcgtgcccatgtgtcaggtgggcgaggactacggggagccggcgcctgaggagccgcccccggcgccgcggcccagccgtgagcagaagtgtgtgaagtgcaaggaagcgcagcccgttgtggtgatacgagccggagatgccttctgcagggactgtttcaaggccttctacgtccacaagttcagagccatgctgggcaagaaccggctcatctttccaggcgagaaggtgctcttggcgtggtctggggggccttcgtccagctccatggtctggcaggttcttgagggcctgagccaagattctgccaaaagactgcgctttgtggcaggagtcatctttgttgacgagggagcagcctgtggccagagcctagaggagagatcaaagaccctggccgaagtgaagcccattctgcaagcaactgggttcccatggcatgtggtggccttagaggaggtgttcagcctgccaccgtcggtgctttggtgctctgcccaggagctggtgggatccgagggggcctacaaggcggccgtggacagcttcctccagcagcagcatgtgctgggggccgggggtggtcctggcccgactcaaggggaggaacagccaccccagcccccgctggacccccagaacctggcaagaccgcctgcccctgcccagactgaggctctttcccaactgttctgctcagtgaggacactgactgccaaggaggagcttctgcagaccctgcggacccacctgatcctccacatggcccgagcccacggctactccaaggtcatgactggggacagctgcacacgcttggctatcaagctcatgaccaacctggcgctgggtcgaggggccttcctggcctgggatacgggcttctcggatgagcggcacggggacgtggtggtggtgcggcccatgcgggaccacaccctgaaggaggtcgctttctacaaccgcctgttctccgttccttctgtcttcacaccagccgtcgacaccaaggcccctgaaaaggccagcatccaccggctgatggaggccttcatcctcaggctgcagacccagttcccctccactgtcagcactgtgtacaggacaagtgagaagctggtgaagggcccccgggatggccctgctgctggcgactccggcccccgctgcctcctctgcatgtgtgccctggacgtcgacgccgctgacagtgccacggcttttggggctcagacctcctcgcgtctctcccggatgcagtcacccatccccctgactgagacccggacacccccggggccctgctgttctccaggggtgggctgggcccagcgctgcggccagggggcctgcaggagggaggacccccaagcctgcattgaggagcagctgtgctacagctgccgcgtgaacatgaaggacttgccctcactggaccccctgccgccgtacatcctggctgaggcccagctccgcacacagagggcctggggcttgcaggagatccgggactgtctgattgaggacagtgacgacgaggcgggccagagctgagcgtgaggacgtgcttgccgggacagcaggcagtggccacctggtacaccacactggagccggaaggcaaggacgggggactgcttgatgtcatngataataacatnnntatanaaaaaanaaaactgaggggccngaccnatngctaangagcgtacaatactgcgcgttacagcggctgaacactcgtccactatgctgagcaccttngcagtggaatcaagccacatgctcaantgacgatgatgcataggatttaatcgaatgaaactttacaagatcgaactatagaacgaaggggctgaagctaaagcccgcgtggtgacg

SEQ ID NO: 279315 - DNA, 1696 bp, Homo sapiens
ctccgacgtcatcggggcgcgccctcgcgctgtcgccgccacagtctgcgacgggacccggcgtgcccatgtgtcaggtgggcgaggactacggggagccggcgcctgaggagccgcccccggcgccgcggcccagccgtgagcagaagtgtgtgaagtgcaaggaagcgcagcccgttgtggtgatacgagccggagatgccttctgcagggactgtttcaaggccttctacgtccacaagttcagagccatgctgggcaagaaccggctcatctttccaggcgagaaggtgctcttggcgtggtctggggggccttcgtccagctccatggtctggcaggttcttgagggcctgagccaagattctgccaaaagactgcgctttgtggcaggagtcatctttgttgacgagggagcagcctgtggccagagcctagaggagagatcaaagaccctggccgaagtgaagcccattctgcaagcaactgggttcccatggcatgtggtggccttagaggaggtgttcagcctgccaccgtcggtgctttggtgctctgcccaggagctggtgggatccgagggggcctacaaggcggccgtggacagcttcctccagcagcagcatgtgctgggggccgggggtggtcctggcccgactcaaggggaggaacagccaccccagcccccgctggacccccagaacctggcaagaccgcctgcccctgcccagactgaggctctttcccaactgttctgctcagtgaggacactgactgccaaggaggagcttctgcagaccctgcggacccacctgatcctccacatggcccgagcccacggctactccaaggtcatgactggggacagctgcacacgcttggctatcaagctcatgaccaacctggcgctgggtcgaggggccttcctggcctgggatacgggcttctcggatgagcggcacggggacgtggtggtggtgcggcccatgcgggaccacaccctgaaggaggtcgctttctacaaccgcctgttctccgttccttctgtcttcacaccagccgtcgacaccaagacccagttcccctccactgtcagcactgtgtacaggacaagtgagaagctggtgaagggcccccgggatggccctgctgctggcgactccggcccccgctgcctcctctgcatgtgtgccctggacgtcgacgccgctgacagtgccacggcttttggggctcagacctcctcgcgtctctcccggatgcagtcacccatccccctgactgagacccggacacccccggggccctgctgttctccaggggtgggctgggcccagcgctgcggccagggggcctgcaggagggaggacccccaagcctgcattgaggagcagctgtgctacagctgccgcgtgaacatgaaggacttgccctcactggaccccctgccgccgtacatcctggctgaggcccagctccgcacacagagggcctggggcttgcaggagatccgggactgtctgattgaggacagtgacgacgaggcgggccagagctgagcgtgaggacgtgcttgccgggacagcaggcagtggccacctggtacaccacactggagccggaaggcaaggacgggggactggcctctgattgtccatttgtataaataaaacattttttaattaaaaaaaaaaaa

SEQ ID NO: 279316 - DNA, 1828 bp, Homo sapiens
ctccgacgtcatcggggcgcgccctcgcgctgtcgccgccacagtctgcgacgggacccggcgtgcccatgtgtcaggtgggcgaggactacggggagccggcgcctgaggagccgcccccggcgccgcggcccagccgtgagcagaagtgtgtgaagtgcaaggaagcgcagcccgttgtggtgatacgagccggagatgccttctgcagggactgtttcaaggccttctacgtccacaagttcagagccatgctgggcaagaaccggctcatctttccaggcgagaaggtgctcttggcgtggtctggggggccttcgtccagctccatggtctggcaggttcttgagggcctgagccaagattctgccaaaagactgcgctttgtggcaggagtcatctttgttgacgagggagcagcctgtggccagagcctagaggagagatcaaagaccctggccgaagtgaagcccattctgcaagcaactgggttcccatggcatgtggtggccttagaggaggtgttcagcctgccaccgtcggtgctttggtgctctgcccaggagctggtgggatccgagggggcctacaaggcggccgtggacagcttcctccagcagcagcatgtgctgggggccgggggtggtcctggcccgactcaaggggaggaacagccaccccagcccccgctggacccccagaacctggcaagaccgcctgcccctgcccagactgaggctctttcccaactgttctgctcagtgaggacactgactgccaaggaggagcttctgcagaccctgcggacccacctgatcctccacatggcccgagcccacggctactccaaggtcatgactggggacagctgcacacgcttggctatcaagctcatgaccaacctggcgctgggtcgaggggccttcctggcctgggatacgggcttctcggatgagcggcacggggacgtggtggtggtgcggcccatgcgggaccacaccctgaaggaggtcgctttctacaaccgcctgttctccgttccttctgtcttcacaccagccgtcgacaccaaggcccctgaaaaggccagcatccaccggctgatggaggccttcatcctcaggctgcagacccagttcccctccactgtcagcactgtgtacaggacaagtgagaagctggtgaagggcccccgggatggccctgctgctggcgactccggcccccgctgcctcctctgcatgtgtgccctggacgtcgacgccgctgacagtgccacggcttttggggctcagacctcctcgcgtctctcccggatgcagtcacccatccccctgactgagacccggacacccccggggccctgctgttctccaggggtgggctgggcccagcgctgcggccagggggcctgcaggagggaggacccccaagcctgcattgaggagcagctgtgctacagctgccgcgtgaacatgaaggacttgccctcactggaccccctgccgccgtacatcctggctgaggcccagctccgcacacagaggtactggggcccacactgccgtggcgcgtgggtaaggggcctcggggctggtgcccactgcagctttctctctagggcctggggcttgcaggagatccgggactgtctgattgaggacagtgacgacgaggcgggccagagctgagcgtgaggacgtgcttgccgggacagcaggcagtggccacctggtacaccacactggagccggaaggcaaggacgggggactggcctctgattgtccatttgtataaataaaacattttttaattaaaaaaaaaaaa

SEQ ID NO: 279317 - DNA, 1650 bp, Homo sapiens
aatcaggctaggtacgaggctgggtggcgccggcgtgcccatgtgtcaggtgggcgaggactacggggagccggcgcctgaggagccgcccccggcgccgcggcccagggactgtttcaaggccttctacgtccacaagttcagagccatgctgggcaagaaccggctcatctttccaggcgagaaggtgctcttggcgtggtctggggggccttcgtccagctccatggtctggcaggttcttgagggcctgagccaagattctgccaaaagactgcgctttgtggcaggagtcatctttgttgacgagggagcagcctgtggccagagcctagaggagagatcaaagaccctggccgaagtgaagcccattctgcaagcaactgggttcccatggcatgtggtggccttagaggaggtgttcagcctgccaccgtcggtgctttggtgctctgcccaggagctggtgggatccgagggggcctacaaggcggccgtggacagcttcctccagcagcagcatgtgctgggggccgggggtggtcctggcccgactcaaggggaggaacagccaccccagcccccgctggacccccagaacctggcaagaccgcctgcccctgcccagactgaggctctttcccaactgttctgctcagtgaggacactgactgccaaggaggagcttctgcagaccctgcggacccacctgatcctccacatggcccgagcccacggctactccaaggtcatgactggggacagctgcacacgcttggctatcaagctcatgaccaacctggcgctgggtcgaggggccttcctggcctgggatacgggcttctcggatgagcggcacggggacgtggtggtggtgcggcccatgcgggaccacaccctgaaggaggtcgctttctacaaccgcctgttctccgttccttctgtcttcacaccagccgtcgacaccaaggcccctgaaaaggccagcatccaccggctgatggaggccttcatcctcaggctgcagacccagttcccctccactgtcagcactgtgtacaggacaagtgagaagctggtgaagggcccccgggatggccctgctgctggcgactccggcccccgctgcctcctctgcatgtgtgccctggacgtcgacgccgctgacagtgccacggcttttggggctcagacctcctcgcgtctctcccggatgcagtcacccatccccctgactgagacccggacacccccggggccctgctgttctccaggggtgggctgggcccagcgctgcggccagggggcctgcaggagggaggacccccaagcctgcattgaggagcagctgtgctacagctgccgcgtgaacatgaaggacttgccctcactggaccccctgccgccgtacatcctggctgaggcccagctccgcacacagagggcctggggcttgcaggagatccgggactgtctgattgaggacagtgacgacgaggcgggccagagctgagcgtgaggacgtgcttgccgggacagcaggcagtggccacctggtacaccacactggagccggaaggcaaggacgggggactggcctctgattgtccatttgtataaataaaacattttttaattaaaaaaaaaaaa

SEQ ID NO: 279318 - DNA, 787 bp, Homo sapiens
gagtgggtgtgggggctcagcagccccaggctccgtcaccccctctctgcttgcagacagtgccacggcttttggggctcagacctcctcgcgtctctcccggatgcagtcacccatccccctgactgagacccggacacccccggggccctgctgttctccaggggtgggctgggcccagcgctgcggccagggggcctgcaggaggtgagtccctgtccctgccacccatggccagctgcatggggcgggagggggacctgtccttaccccacactgcacggcactgaggtgccaaggtgggcacacagccagctctgctcccgcagggaggacccccaagcctgcattgaggagcagctgtgctacagctgccgcgtgaacatgaaggacttggtgagtacgtgcccacctgtcctgggccgggcttggggacgcgggaaggctgtcgtcaccctcgtgggtggcttgagggggtgctggcgggtttcttggcccctcgacaccggcctctgttgcagccctcactggaccccctgccgccgtacatcctggctgaggcccagctccgcacacagagggcctggggcttgcaggagatccgggactgtctgattgaggacagtgacgacgaggcgggccagagctgagcgtgaggacgtgcttgccgggacagcaggcagtggccacctggtacaccacactggagccggaaggcaaggacgggggactggcctctgattgtccatttgtataaataaaacattttttaattaaaaaaaaaaaa

SEQ ID NO: 279319 - DNA, 1725 bp, Homo sapiens
aatcaggctaggtacgaggctgggtggcgccggcgtgcccatgtgtcaggtgggcgaggactacggggagccggcgcctgaggagccgcccccggcgccgcggcccagccgtgagcagaagtgtgtgaagtgcaaggaagcgcagcccgttgtggtgatacgagccggagatgccttctgcagggactgtttcaaggccttctacgtccacaagttcagagccatgctgggcaagaaccggctcatctttccaggcgagaaggtgctcttggcgtggtctggggggccttcgtccagctccatggtctggcaggttcttgagggcctgagccaagattctgccaaaagactgcgctttgtggcaggagtcatctttgttgacgagggagcagcctgtggccagagcctagaggagagatcaaagaccctggccgaagtgaagcccattctgcaagcaactgggttcccatggcatgtggtggccttagaggaggtgttcagcctgccaccgtcggtgctttggtgctctgcccaggagctggtgggatccgagggggcctacaaggcggccgtggacagcttcctccagcagcagcatgtgctgggggccgggggtggtcctggcccgactcaaggggaggaacagccaccccagcccccgctggacccccagaacctggcaagaccgcctgcccctgcccagactgaggctctttcccaactgttctgctcagtgaggacactgactgccaaggaggagcttctgcagaccctgcggacccacctgatcctccacatggcccgagcccacggctactccaaggtcatgactggggacagctgcacacgcttggctatcaagctcatgaccaacctggcgctgggtcgaggggccttcctggcctgggatacgggcttctcggatgagcggcacggggacgtggtggtggtgcggcccatgcgggaccacaccctgaaggaggtcgctttctacaaccgcctgttctccgttccttctgtcttcacaccagccgtcgacaccaaggcccctgaaaaggccagcatccaccggctgatggaggccttcatcctcaggctgcagacccagttcccctccactgtcagcactgtgtacaggacaagtgagaagctggtgaagggcccccgggatggccctgctgctggcgactccggcccccgctgcctcctctgcatgtgtgccctggacgtcgacgccgctgacagtgccacggcttttggggctcagacctcctcgcgtctctcccggatgcagtcacccatccccctgactgagacccggacacccccggggccctgctgttctccaggggtgggctgggcccagcgctgcggccagggggcctgcaggagggaggacccccaagcctgcattgaggagcagctgtgctacagctgccgcgtgaacatgaaggacttgccctcactggaccccctgccgccgtacatcctggctgaggcccagctccgcacacagagggcctggggcttgcaggagatccgggactgtctgattgaggacagtgacgacgaggcgggccagagctgagcgtgaggacgtgcttgccgggacagcaggcagtggccacctggtacaccacactggagccggaaggcaaggacgggggactggcctctgattgtccatttgtataaataaaacattttttaattaaaaaaaaaaaa

SEQ ID NO: 279320 - DNA, 2000 bp, Homo sapiens
ctccgacgtcatcggggcgcgccctcgcgctgtcgccgccacagtctgcgacgggacccggcgtgcccatgtgtcaggtgggcgaggactacggggagccggcgcctgaggagccgcccccggcgccgcggcccagccgtgagcagaagtgtgtgaagtgcaaggaagcgcagcccgttgtggtgatacgagccggagatgccttctgcagggactgtttcaaggccttctacgtccacaagttcagagccatgctgggcaagaaccggctcatctttccaggcgagaaggtgctcttggcgtggtctggggggccttcgtccagctccatggtctggcaggttcttgagggcctgagccaagattctgccaaaagactgcgctttgtggcaggagtcatctttgttgacgagggagcagcctgtggccagagcctagaggagagatcaaagaccctggccgaagtgaagcccattctgcaagcaactgggttcccatggcatgtggtggccttagaggaggtgttcagcctgccaccgtcggtgctttggtgctctgcccaggagctggtgggatccgagggggcctacaaggcggccgtggacagcttcctccagcagcagcatgtgctgggggccgggggtggtcctggcccgactcaaggggaggaacagccaccccagcccccgctggacccccagaacctggcaagaccgcctgcccctgcccagactgaggctctttcccaactgttctgctcagtgaggacactgactgccaaggaggagcttctgcagaccctgcggacccacctgatcctccacatggcccgagcccacggctactccaaggtcatgactggggacagctgcacacgcttggctatcaagctcatgaccaacctggcgctgggtcgaggggccttcctggcctgggatacgggcttctcggatgagcggcacggggacgtggtggtggtgcggcccatgcgggaccacaccctgaaggaggtcgctttctacaaccgcctgttctccgttccttctgtcttcacaccagccgtcgacaccaaggcccctgaaaaggccagcatccaccggctgatggaggccttcatcctcaggctgcagacccagttcccctccactgtcagcactgtgtacaggacaagtgagaagctggtgaagggcccccgggatggccctgctgctggcgactccggcccccgctgcctcctctgcatgtgtgccctggacgtcgacgccgctgacagtgccacggcttttggggctcagacctcctcgcgtctctcccggatgcagtcacccatccccctgactgagacccggacacccccggggccctgctgttctccaggggtgggctgggcccagcgctgcggccagggggcctgcaggaggtgagtccctgtccctgccacccatggccagctgcatggggcgggagggggacctgtccttaccccacactgcacggcactgaggtgccaaggtgggcacacagccagctctgctcccgcagggaggacccccaagcctgcattgaggagcagctgtgctacagctgccgcgtgaacatgaaggacttggtgagtacgtgcccacctgtcctgggccgggcttggggacgcgggaaggctgtcgtcaccctcgtgggtggcttgagggggtgctggcgggtttcttggcccctcgacaccggcctctgttgcagccctcactggaccccctgccgccgtacatcctggctgaggcccagctccgcacacagagggcctggggcttgcaggagatccgggactgtctgattgaggacagtgacgacgaggcgggccagagctgagcgtgaggacgtgcttgccgggacagcaggcagtggccacctggtacaccacactggagccggaaggcaaggacgggggactggcctctgattgtccatttgtataaataaaacattttttaattaaaaaaaaaaaa

SEQ ID NO: 279321 - DNA, 1694 bp, Homo sapiens
ataggctagatagagacgggcgttaatcgagacgagggggagcggcgcctgaggagccgccccggcgccgcggccagccgtgagcagaagtgtgtgaagtgcaaggaagcgcagcccgttgtggtgatacgagccggagatgccttctgcagggactgtttcaaggccttctacgtccacaagttcagagccatgctgggcaagaaccggctcatctttccaggcgagaaggtgctcttggcgtggtctggggggccttcgtccagctccatggtctggcaggttcttgagggcctgagccaagattctgccaaaagactgcgctttgtggcaggagtcatctttgttgacgagggagcagcctgtggccagagcctagaggagagatcaaagaccctggccgaagtgaagcccattctgcaagcaactgggttcccatggcatgtggtggccttagaggaggtgttcagcctgccaccgtcggtgctttggtgctctgcccaggagctggtgggatccgagggggcctacaaggcggccgtggacagcttcctccagcagcagcatgtgctgggggccgggggtggtcctggcccgactcaaggggaggaacagccaccccagcccccgctggacccccagaacctggcaagaccgcctgcccctgcccagactgaggctctttcccaactgttctgctcagtgaggacactgactgccaaggaggagcttctgcagaccctgcggacccacctgatcctccacatggcccgagcccacggctactccaaggtcatgactggggacagctgcacacgcttggctatcaagctcatgaccaacctggcgctgggtcgaggggccttcctggcctgggatacgggcttctcggatgagcggcacggggacgtggtggtggtgcggcccatgcgggaccacaccctgaaggaggtcgctttctacaaccgcctgttctccgttccttctgtcttcacaccagccgtcgacaccaaggcccctgaaaaggccagcatccaccggctgatggaggccttcatcctcaggctgcagacccagttcccctccactgtcagcactgtgtacaggacaagtgagaagctggtgaagggcccccgggatggccctgctgctggcgactccggcccccgctgcctcctctgcatgtgtgccctggacgtcgacgccgctgacagtgccacggcttttggggctcagacctcctcgcgtctctcccggatgcagtcacccatccccctgactgagacccggacacccccggggccctgctgttctccaggggtgggctgggcccagcgctgcggccagggggcctgcaggagggaggacccccaagcctgcattgaggagcagctgtgctacagctgccgcgtgaacatgaaggacttgccctcactggaccccctgccgccgtacatcctggctgaggcccagctccgcacacagagggcctggggcttgcaggagatccgggactgtctgattgaggacagtgacgacgaggcgggccagagctgagcgtgaggacgtgcttgccgggacagcaggcagtggccacctggtacaccacactggagccggaaggcaaggacgggggactggcctctgattgtccatttgtataaataaaacattttttaattaaaaaaaaaaaa
